United States Patent Application Publication US 2006/0040262 A1 - sequence listing, part 6

SEQ ID NO: 511 - DNA, 58687 bp, Mus musculus
  misc_feature (1)...(58687): n = A,T,C or G
cttgatccagtcaccctactctcccctgaggactcccacttttgcacttactctttgctccccacttttagtcacctgtcagatgctctcattgctgaggcctctaactgggtcattggtgggacctctttttcaaggatttatttttattatctataattgtgtgtaggtgtgtgtgtgtatgtgtgtttgtgtgtgtgtgtgtgtgtgtgtgtgtgtgtgtatacaagtgcccatggaggcctgaggcattagatcccctacaggtgtagtttcagatggctatgagccacctgacatggggtctgggaactgaactctgggcctttggaagagcagcaagtactcttagccattgagccatcgtctctccagcaccatgggaggagctcttttaaagaattccatcaaattgcaggttgtgacactgtcacagatgatactactgaagaacttcaatctttctcttcccccttcctaccacctcacagcatgcagaactcattgctcttctctggcactcgaattagcatgaaaatgaaggctaacagctacctcagttccaaattcctaattctggtgccacaatttggtaagagagagaggctctccgcacttcccagagcactgctgtcattcatgacaaagaccttcaagctgcctggctgtctctggctgcagcaatcctctactgcacaggccagatagccaaaggcaactctccgcagctgacaccctcattaaacaggtaacactggtctccgccctgcatacttccagtcctctggagtctgctcacccagagcctgcctttttttattgttcactttctcatctttccagtccttgttctttttcaacctatccacctcccatgtgtgtatgtctggtggtggtgggggaatgggtcaagccatcctcaaagactcttgggaatcccatcacctccttttctgttcaagaatgggccctcctttccaccctacatgatgtgggatgtcagcttctgctcaccttatccaagacctatctctactccccagccttgtcacagaccttccacaccatgcccccttcctcactcaccaagccccaggacatctgctgggacagaactagcagatggacttcccccacatgctatcctctcggtctctgctccgctggttgacactcttccagggcaggcggagaggctttccccactaggtctgagaggacacagaggctgctcatatctttctatttcaagtcaccccttgctttggtctgttttcatctccactgtctgacaatggacctgtgtgtgtgtcttatttctaaggtaactcaacccttgactacctccttagtcatcaaaccctggtttcacattccctatagacctcagtcctcagggctggcggaccatggtaatgcttttctcaacacttagctcgtggttgacgtcaaactgtcctggtcagctcttctactgttctctctttctttttttcaggttctctccaggaaagcccgttgatctcagcctcctaaggctcaagcacagctggttcgtcaccaccttctcactggcacttcattcccatttctggatgcacggactgcttcacatcttaccaccttctgccttcatttggctcacaaacaccttcctaaactcatcctgagtcttccggaaagggacctgcccaggtaggtcactgtgaccaccccagcagtagcaaaggtaaaggaatctctcactggctgcactactctgagctccaaagggctccaggcactaactcaaaaactcttaatcctgtttggtgacactcccccatctatgtttcttctttcccaggtctgacctctcacctcataacctgagagcctacagccaccctgtctttaccagccacctttgaacaccccaactgagcaagtttcaggactcaaggatccactcgaccaacgtctcggcaccccgcactactgctggccattcccaaagcaccatgacaggcttttgggtcctctgtttcgtccttttcccctcctccttatcctatccggaaagctggatgccccttgtaaacctcactcaccacatcctacgtgataccaactcttccctgttttccaactgttgggtctgcttgtctacccaaacccagcggtccttagcagtcccagcccctctgtccatttggacagatacacccatgaagcttcatcttacctactcagtcaggcccttctctggctccttttccattagcgacattgaaagacgcctccgtctcttccgcccactgactgcctcctattctttccacaatcctgacagaagggcgattgcttttcttcaactcgtcagctcaacaggcatatttcggatcatcacccggataacctctgtgatatatccccataaggaccgtttcttcgaatctgcccaacgccctctctggggaccactctttactgagaccgtgctcaggtcgcaggccccactctgcatatctcgctttttcaaggtctcagcatatgccacttttgtaggcaacctctctgcctctctctgcaactacaccatgcatatttcaccttctaccagtcatgaaaacctagatctttccaccacccatacgttcaaacaggcaatgaaaagaccggatgccaaatggaaaaacccgctccgtttttccgggcccccctccctcatcttctcgaagccggcttactatccctgcccaacagacatcaaacactgccatacctctccggccactccctggatgcactgtcctcaggctcccttcggcacctgctataacctcactttatttgaaccagacaactcaacccaccctgttaccatgtcagtgaaccctacccacttcaaggtcaaactccaggggcacagagacccctatccgctctcccattaccagcccctcacgggagctgccctgtctggacaatattcagtctgggagaacgagatcactgtccaagaaaactgggacatcacctccaacattttctcacatcttctcagcttctcgtacgccttctgcctcaactcttcaggcgttttcttcctctgcggaacatcgacttacatctgcctcccagccaattggtccggtgtctgtaccctggtcttccaatacccggatattgaacttctccccaataaccaaacggtgcctgttcccctttttgcttcagttctttcctcagactcagttcttcgcccaaagaggtcccctcacctctttcccttccttgcaggcctgggtatctcttctgcccttggtacggggatagctggcttggccacctcgactctctatttccaacagctttctaaggttctttccgaaaccttggaagaaatagctgcctctatcactaccctccagaaccaaatagactcgctcgcaggtgttgttctacaaaaccgccgagctctggacctcatcactgctgagaaagggggcacctgtctcttcctccaggaagagtgctgcttctacgtaaaccagtctggaatagtccgggacgcggcaaggaaactccaagaacgagcatctgaactcggccagcattctgactcttggggacagtggcctgaccttggacgttggttgccctggctgactccctttctgggacctcttctcttcctcttcttcctactgacatttgggtcttgtcttctgaactgcctaacccgttttgtgtcccagagacttggctcctttgttcaagacactgccaaaaggcatgtggacagcatcctccaaaatttccaatataaaaaactgccccaagactccccagatgaggacaccattcctacataacagggaaaagttgagagagcaccaagtataccctcccttctacccagttaatagaatccaagtcgggagacttagttatggcctcatgtttgtatcagggttaattccagaaactatagtaatttggcatccagaaaatttcttctttttctagatctgagctccttctgctccttctagatcttctccttatcagtagcccccatctcagacatggcctctggagttgtttcacctgacattctttaatccatcactcaccttgctgcttagctactcttagcaatggccaaagaaggaatgttttcagtgccctgcctgtaggtggagagtgggctctcttatacagagatctctgctcccaggcctgtgctgccagggagtggcttgttcctccgttgtctttcttgctttctgacctcatacgaagaacattgaggtgtcagggagcttccagaagctggaagggggccagcaaggattctctatgacagctttgagagagagagagagagagggagagagagagagagagattattttttttaaataaagtttttacagcatcatcgtatctttttttttttaagatttatttatttattatatgtaagtacactgtagctgtcttcagacactccagaagagggcttcagatcttgttacagatggttgtgagccaccatgtggttgctgggatttgaactccggaccttcagaagagcagtcgggtgctcttacccactgagccatcttaccagcccgagagagagattattatccccttaaccttagactgtacccttcagaagatattataaatatgtagtttcaagctgtcagcatagcagcactttggtactgtagatccaagactcatgaatcaactctgatccgtagatgtggtagaatatttaggtggagctcttctggagcacatgaacaaggtgtggagagcacaggctggggtaggatgtacgactgagctgggcctggtaactgggatgggcaagaggaccacagggaagggagggaaggagagaaaggagaagtcaagggatgaaagagtggatggcgagagaggattccagaggtaagagcaagacgttcatgctggagatgttaccagagttgttaggggcagagctgggaccctggcagccatagcaagctaggcttgaccacctgtcctcaacaagccaatcattgtcacacttaatagtgaagaacagaaagaaaacacttatccaatgtggccacactggaaaaaagaaggaagaagtctgtggagcccctctctcacaaagtccacgctctgggtcctgacatgaggtttgggtttaaatagaaagcaagagacaggcataaggaagcagacctgtccaagaccccgcccttcctaccatcattgttccagtctggtctcttctgcaagggactgtctgacacatgatcagagttgtgtgtaatctcttcctgagaggtaagctcctcctaacaggccccagccttctccaattccagatggaattctcaactctaacccctgcctgtcactgcctgcattcaaagaaagcccagtaaactgaggtagttctgtcccacctcttcatttgtctctgtttcttattctgtgtcctggggaaagttatctccaagggaaacttatcccacaggtcaagagtctataaacagtactgtccttggaaaagcaagggattctgggattataaggacaaatatgtgcagttgtgaggactggatatgtttagaggtgcttgtgatctctcatatatatacttgagttaaaattagctggcacatgcatgctctcattctcaatgtactggtgtgttttgtttattatgtggtttcgtatccatggccatagccttcaaaagaagtaggccaatccagaggccagagccccattgtcagtaaatgggggaaccagagctggcacaggcctctgagccaaagttagaggctgtgcaccctgcatgctcagtaacttcctctttctaagctaagcttggcttccagttgacctgaggcagatggcatgctgacatttttgggccttcaacagtcaggaacttaaatgcaagactccagcagaatcagcagcctgtgtctctggacctgaccctggagagaatattgtcacctcagcagccagtcttttgttcctgaatttctgggctcctgtctttcaaagaaaaagcagctttcccctgtgcagggtgtgtctaaaacacagggttctagaactggaatgtggaccttgtcccaacaggctttcctccggaagtgggggtggggtggggtgggggcagggctgactgttgaattgccatggccaggagcgagtcctccaccatcgggcccttctactgctatacatggcattgttggaggcgtggagagccaactccaagctaggtctctgaggataattcacagatgcacacagccaagatggtttctcaaggaaaacagttaactctctcacatccctgagggtcagggatcaagaggccatatatgacactaccgtgaagggtttgggaggctgccatcaaagactcccaacaagcatatgcctggtggccagacactgcaatgctattgctgagggaagccactctcctccccaacacaccgaccctcctgtctgcagcctttccagggagcaagaaaacagtgagcagaagaagacagctctggttgcacttctgctttctggatctctccagttctatctattggcagagcagcacatctagacccctggctgcaggcatgtcttagaaatgtggcccttgcaatccactgagtgtgacatagacattgagcacacagtccaccctagagagaggtagaaaaaaatgctgaacacttgttgtaaacccaacacaaatctgcagttgggcctgacttgaattcttttcatgttttgattttttttaatatttatttttgtatgtatttcacatataagtactgtatttatataatttccccttcttctcctccctccaactcttgagttctttgctacacatactcctcaaattcatggcctcttcttcctctttttttaaataaaagatttacttatctgtgtattttatgtatacaggttctttgtctttgtgtacatctgaataccagaaaaggacatcagatcctgttgtagggagctgtgggttgcacgtgagtgctgagaatctaacttagggcctgtggaagagcatccaggactccttaccattgaatcatctctctagcccctggcctcttattctttattattgttacacatatacatatgcatttataaatacatcctctgagataactgagtgttgctcatatgtggttaggaatgacctcttgggattggatagcctatcagggggctcatcccaggagaagactaattcttggtttcctagcaactattaattgcccatcgttctccatctaggggtggagccttgtgagaattcccccacccatgcggtcatgtctataggtgctgtcatttttcaggtcttgtttcgtcaacaacatggttgccattccctgggtgctgcttccctgtcgtatagaagacatggtcccccagcagatgttctggtcctctggtttttataatctttctgtcccctctacctctatgttatgtgaaccttaggagttggggttgtgttgtagatgtatcagttggggttgggttccccgtggtccgtggtctgttgttctttgcagtttgacaagctgtggctttctgtaaccgtctctgtctgcttcaaagggaagcttctttgatggggggtgagagttacaccataatgattttttttaaagaaaaatctaaaaatcttcgaactccaaagattatagtcatatgcacatttgtaagaacctttaatttaaaaaaataaatttaaaatttccaagaatagtcactgatacattgaatcccttccaccaatgccattgttgccaacctcagatggtttccccatccactaacatgtgacatataagtccttttatttcgaaatcacagaaataatgtattaactgaaacctgaaaaaaaattagttgcctgtaatcccattactatcgcaagttgtttcacttttctttctgtacacagaaattttttttgtgtgtaatggccccataattgtgctttgctttcctgacccagccgtgtatgaatcatttcctctgtgattgcctaatagaaccacagtttttatggggtgtgtaatatttcacccaacacacattctttcttcatttcccctcttaccgaatgtttagacagtttgtaagtatttgctactacaaataatgctttcaaaaaagctttatgtgtgtatcttgggtcttcatgtcccaaatccagaagtgggacggggaggggggggtccatatgtattgaagactttcatttttgtatgtacgagacagagtctcacactgagctcaggatggtctggaacccactgcacaacacaaactggcctcacactagttgtaatccccttgcctcagattcttagttgctggtgtgaatatcaacaacttctgatcaacagtttttaaaaacaccacctttgtcaaaagtggagctttgtttctgtcacctttgttagacagtgacctgatatctactttcatagtcccaggattcacctggaagctactaggacagctacaaacactggaaaaatgatgcccttgccctccacacctttatcatcttctgctgaatccccgagggctgcttgagatggctaacctggcgcttggcaggcacagtgtctgcaggatccttcccagccccgcatatctcattgcccagccttgctgctcagaagtctttacctaatcgaaggaggccctggcactaaatgcatccaaggacagagcggcccacaaacaggcagacctctgcgttttgatttctagttttaatcgcagatggagcaaggcaatactaagttaaaataaagcatcccggactctaattcattgaagggctcagcagggatggttttaaaagaacagctttagaagataggcagtgttgcaaagctttattcagttcacttgagcactcttgctgtgacatcagctaaagatcttacaaaccccaagtaaatgtcccagggagctgcttagtgaagggttctgtccctgctacgattgtcttggtctatccaggacagggtggacttggatcttcagagaacaagagcagcatacacttagctcttcgttgttttcagaagagaaacacacttcccaatctccaagattattcccaagcaaagctgactagaagcggggaccttgagtgttaactgttcattccctggaatgggccctagcagaatacaaaacgagcacatatccaagtgtatcctcaattctagattcctacaagcactctattgtccaaccactccgcttcataattgacattcccagtaacagacctcacctcctaccagatccccagccttcggaatgctaaagctggttgattagtgtctgcaaaactaccgattctggggacagccccttctcctgctcttgcagctctgagcatatcccttctgctgactctccccagggacctgactgtcccttgcagatggtcaccaccctctaggtagtacaacttcccgggacaccccaatgtctgctctcgcccccgtccggttgcttggaaatgtgcagcgggcagcgacgtcacacagagaggtgggtgccctctgcccggcgcaccaatagcgcggccacggccggcctcttcttctccagctattggtgcttctggccgctcggctccaccccagcccgccatggcgtcagccgccgcaacccgggggaggaggttcccactttaagaagtgaagttttcctccccctccccctcctgcccacctcctgccgcctcccgcgccccgcggggccgcggatggagctccgccgtggcggcgtggggaaccaggctgcgggccggaggatggatggggactgccgcgatggcggctgcggcagcaaggacgccgggtcggaggactacgagaacctaccgaccagcgcctcggtgtccacccacatgacagcgggagcgatggccgggattctggagcactccatcatgtacccggtggactccgtgaaggtgaggcgcgcggaggactgtgggggaaaggagccggagagcagtcgcagcagcgcgcgcgtttgcatcccgcgcagttccagcctggggcagagccacgaagccacgctgccggttccccggggcgcggcgacaggccagggctctctcccggattggctgcgtgcagccggggctccaggaaagcgcaccatgtcgctccttccgcgatgtcccgggggagtacccctagattccgccagggagtcttgcacttctgtctctgtcgtggtcgtgggggacaagtggtgagcactcagtgcgcggaggtggctgtggctctgagccgtccgatcgctcgggcgctgcacgtgcgcggcttctgagggagctggtggccgggaagcgcttgcctcgctcctccgagaaacgtactccccctccctccccccggccgcgcgccctctggccccggcgcgtgcctgctgctctggggtggcttagggtctggggaagagccagggacgccgtttcgccgagtccccaggctccggtcagctctttgggggggcatactggatcagcgacactccatgtgacacctcccctcccacctagttctactagaagacagtgggacatccagggatctttgctgtctttcacttgctgcgaggtggacctgcagacttgtactgtacagctatgggttgtgtaataggcttccagtttgacctggtcacttcccccaggtagtttcgcatgcgcttctgtcaagaggcggcttgaacaggtgaggtttgttagagcaagaactgcctgtgttggacctagagaggccccgcgagagatgcaggaagtaatacctgtactgacattgcacctttagagctggaatacggggcgagacacccctgggagttaacatgaataagcccgaggggcaaggaggagagcggagaagcttcctctaactcttagccgcttgaattttgggtggctgcagctccactatgctttggggaacttgggggcctcactaagtggcagttattttgtaaggcagggtgccaggcctgcacacatgaaacagtaccttactgcagatgcgggccccacctgagcaggtatgagtatctgggttttctcagagctgccagtcagtgactggacaggccaagtccagtgaacaggatgctgggcctaaggcaaggcctgtcttccagctcactgccagacccgagtcatcttcactgtccctccgctgtcctagtgggcaatcatgcagtgctcctttgccggccactgttgagtgaggaggggggaactgatttttgattttaaaatcaccttagaaggagcctggacacatgctagatcgcattaatacaggagaagatggatcaaatgtaaggacattttctacagtctaatgcatcttggttagagacaggggaaagtcaggagctattaatttgaactggtcacagacctggagatgaccttgcatcgaaggagcccttccacctgtgaggcctgatgtcccttagccatgagttctggttcctatccccttagctgactttgaaggttagaaacaattattgatgcctcttgatttatttgacagtccaggcatgcctttcccctttgtaagtaacacacgttgtgtttagttctcccacactctccctacctgtttggattcagacttacttctgtgcttagtcttttccaaaaattttccatctgtggatagacaaacataggctataaggatgtgtgtgtgtgtgtgtgtgtgtgtgtgtgtgtgagagagagagagagagagagagaaagaatgtgtgtgtgagctatgagtgcatatgtgagtgttcttgagtgtgcaaactgtgcatatacctgtgtgtgtatatgtatgtgtgtttgtatgcacatatgtgtgagagagtattgagctgtgagtgtgtgtgagagtgcatgttcgtgagtgtgtgagctgtgagtgtatacctcactgtgtgagagtgaatgtgtgtgtgtatgtgtgtgtgtgtatgtgcactcgcacagctatcttgagtgtcatagcaagtattcacctcatgggatttgcttgtaaaatgaagttgctcattgccagtcagcaggttcttctagttctgagaccgatcccgactgctggtcagtagtgaccctttgctgttcttagactcacagtttgggtgtgaaatgccttctgtgtaccccccgcagctttttttgggggcagcaaggatttttctttctttctagttttcaacaaagataataataattaataataaaggcacagcgaaggttagtgtcacaagccctatggctccaagtaggcagcaggcgggccagagtccaccaagatcatcacagttgtctgtatctaacctgaggtggcaggacacaattatgccccagtcatggaaacagttcatgtgggaagcccacagctgcgtccctcttaaatattttggatgatgaagactgagtaattgagtcaggagggcaggcttggctcttagccctgtagctcactgctgtctgcctcaagcaccaacctgtgcctttgttttgttggggaaaatgggtgctccttctcctttagcccctcccactttgtaaggtgcccctattgtcctttcgtgttaattattacagctgagaccaagtgcgtgtgaatcagatcttggaaagatgaaaaaaagatgtctttgatttttttttttattttataaaggcattcattttttgaacttgttaagtgtgagtagagtccgccagctttctttcggatttgctgtcccaggctgtgtgagcgttgggacccagggcaggtcctttgcaatcaaagcttgctgatttccttgggtcttcagtacagaaagaggactcatgggatgtgcactgttctaatactgaagttgctatttcataagcttctgtcgtctcccgatgccactttaatgtccactgtctttcaaactgtgggttttgatgtattagtgggctgagcatttggaagccagattggtgacagtatgtaagtatgtaagcaggtatgatttgggtaggaagaaacacggttgaagttctgtttgagtcatgcaccccagagactgtgtgaaaaagcacttctggccagaacaggtagtaagtacatgcaatgagtcctagtactcagagacccagatgggagggcagagaatttgaggtcagcctgaatttcatagtgagttcaaggccagcctgagctgcctagcaagactccatctccacacaaagtctgagcatcatagaatcacatggtccataatttctctcctagcagcaacagtctaaggtcacttaagttcctcttgggaagacttgcatggatttttttcctaacctttctctttccccttagtcttcacagctagtggttagatgcgaagacttcatttaaagagcaccagactggtgggacccctgagctccggcatgattgtagcaaactgatggaagctaagtcagggatctagggtgcctgggtgtctgcagactcgtgtccaactgtggcttctctctaagtgcctcttggcagcatttccttagaagcctctaaccggtggtggcaagccggtatggtggctttcgctggcccgtggggtggaagcaagagctggtggtcaggacgctcatgactggtgggagcgtgccaggtgggtggggaaggaaattccatccagattaggcagagaccatgcaagtcagcttggtaagcacggggaagaaaggaaacaggaaagatttgaagtgggggaacttccgctgaccctttcacggtccttctttgagtgacttgtcaggaaagttctgctctaaccctccctgggtgagccctctgttctccagacaccgaatggctgacactgcttaccttaccttagctcctcaggaagccctcatgggtgtcttcgggggatggcctaagtggggatacaggctaagcatggatatacagcctggcctgcctttggggacagccctggtgaggcaggtgccaggacacccctctcccccagcccttgagcttttccatctgactgggagggagtactggcagctgccagaatcccgctcccagttcctcatgctttatagaacaaagtgtggggcagctggtagtgcaacttcaagaggtcatgaagtcccaaattactctgttccctggagcaaagtgatagtgctttctctctccctccctgcttttccccgcccttcactgagaagcccttttggacaggtgagttacaggtggacagacacagagtcaaaaaagagttcaactaagttcttccattctttcatgacaccccggtgcactctgataaccagatctgctgtctgcatccctttgcaaagttggaacttgacccttacacattcccttgcccaggaatgaagggagggacaggctggttggggggggggcggtcacaaaggtggggggataacacccagaacaacattgagtagcaaagggggctcagcatttaaacaataaacaaacaaactttattttaaattttttacataagctttagttagtttctgtactgactggttttgtgtgtcaactggatacaggctggagttgtcacagagaaaggagcctcccttgaggaaatgcctccatgagagccagctgtaaggcattttctcaattagtgatcaagggtggaagggccccttgtgggtggtgccatccctgggctggtggccctgggttctataagagagcaagctgagcaagccaagggaagcaagccagtaacatccctccatggcctctgcatcagctcctgcttcctgacatgcttgagttccagtcctgactttctttggtaataacagcagtgtggaaatataagctgaataaaccctttcctccctaacttgcttcttggtcataattttttgtgcaggaatagaaaccctgacgaagacagtttatttatttagacaaaaatctctctatgtagccctacctggcccaagactcactatgtaaaccatgctggcctaaaactcacagataatcgcctgcctctgcctcctgagtgctgggataaaaggtgtgcactcctatacctggtgtcttacttagggttacttttgctgtgattaaaaaaaaaaggatgaaagaaacttgggcaggcaagggtttatttggcttacacttctacagcactgctcatcactaaacaggaactcatacagggcaggaacctgcagaggccatggaggggtgctgcttattggcttgcttcccatggcttcctcagcctgctttcttagagcacccaggaccaccagcccaaggatgatgatatccacaatgggctgggcccccttccccatcaatcactaattaagaaaatgcctcttacgggcattttctccagcatataactccagataactccagcacatctggccactgtagctttttagttcggagtggcatatgagtgggcatgacccgggtagggtgcacgtgtgtctgcaggtcaggggacagttttgtggagtcagttctctccttccacttttaaagagagttcagaggctagaacttaggtcatcaagcagaccgcctgctgagtcatcttgcttactgtgcatttggagtttaatggtaggggtgggagtgggggtaggagtggtgttaattgactgtgtttcttaggtcacaggggcaagtgttcagggcttaagggatgtgttctccaaactttttattggcccttattggctaagtctttgccaccaccttgaccatcccttcttggatgaggttttgtgtcatttacaataatcaacttcagaccccaaatcccactttgctttgccttgggcatgtgtgtgtgtgtgtgtgtgtgtgtgtgtgtgtgcgcgtgcgcatgcatgtatgtatgtgtataaaggtatttttaaattatgcatatatgtatatgcctatgtgggtatgtgcacgtgagttggagttacaggtgattgtgagccacccggcatgcatgctaggaaccaaatttatgtcctctgtagctcacttgaacccctccccccaccttttcttttgagacaggatagaaactgacctgaaagtcactaggtagcccaggctagcctcaaactcctgtcaatcttgcctttgagtgctgggattacagtaggctggcaccagcctactggacttttgccttctggtttcgtggaactaactgccttccctggaccactgggtgagctacccactcctcttccttccctgatcatcctccctgcttctcattaagccagaagggccctctctggagactgcttcccagtctttgcctatctccctttttactcagccttcccttttgaggcattgatgtttgtttctaatctgaagcagtctggccccacatggtgctccccagggacacagcacctgcagctctgtggtttgaccttgctatttcctgctctgtctttgttgaactccatgaagctcagttttattctgcccttggggttggcatcctagtgttctgctccagatggctgagttctgatttccttatctatggaggagaactctaacttctgtctctcattcccctccctggccttactgttccctgatggcttctcacctcatctgtactgtgggaatgtctggttgacatcatcggcccctgtagcaaaggccacctccattcccattcttttcctatctccctttgctgtcctcctagaagtccagctctcttcctagtggtcaggaactcactctcaggacctttcacccatctgcctgacaatggccctcattcttacctgtgtgatcttgacatagtttcttagcctctctctgctgttttctcacttgcagaaagaagacactgttctcttgggtggtcggagggtgaggtccttgtaatgctcaggacacagttggtacaaggagaatattctccaggagtgagcctgctttttcttcctccccttcagtaatgtggctagagtcactgtccctcctccaaggactcggactcttggcaatccacttctctccagatctctatgaatataccacctgacagtgcaggcctctgtgcctgtcgtgagtgtgtctgtgaaagcacacagtgtgggtgtgtgcgtgtgtatgtggatctcattggcttgggacttggtagctcagctaggctccagggatctgcctgcctctgcctccccagggattgtaagcaaatcacacctagcttgtgcactctctcctctctctccctccccccatgcgtgtatgtatgtatgtatgtatgtacgtatgtatgtatgcatgcatgcatttacacaagatctcaatttgtagtcctggcttttcctggaaatcagaaactagcacaaccgtgtgtttacagagatcagcttgcctctgcctctcgattgctgggattagaggcatggtgggttctggggatcaaattcaggtctgttgttagtacagctgcaggcttaagtttcttagtctttgcttctttaacttgattctgaaaagctgctctgcccactgggcagctgagcccttgggtaattcatcactgcccccatcagtatccatgggctgtgggctctgagcctccctctcctcctaaggccccatcaacagcttctgaccccccaccagtgccttcacgctctcttgctttccaacccccattgtaagggaatggggctctcttggtcctctgggggagttgatagtggcagggaggggtgagccatccagatacagcaggactgagtcctgactctacccccagggcacatggcttaacctctgtcacttcaggtcccttcccagcagactggggggcattaaccccagatccatcttactgggttacaggaagaaaaaaatgtcctcgcctggtgaggctctcagtaaaatggtttgtttatttcctcctcctccccctnnnnnnnnnnnnnnnnnnnncccctccccctcctcctcctccttcttcttcttctcagggtttctctatgtagccctgactattctagaacttgctctgtagaccaggctggcctcaaactctgagatctacctgcatcttgtgtctctgcttggtgcctcctacagcttgccctggacacaccatgtctgggtgtcatgatcatcggctcagcccccctcttccttatctcagggcccttctgagagcctatccctaaccctgaggtgtggcaccttcagcttcttcctggctcccgattgtgtacatggaagacaagtgtatctccgagtccaagatcttttatgtgctttcccatccctgctgccatgtgtttagggcatttggttttgtcagtggacttggcttcctggtctccctacctctcttctattttggtttttcatttctttgttttttccttctcgcacacagtgccgtttgcttgtttatagtgtttagacgttatctgcagttacagaattctttattgcttatttattgctcattaaactgtcatcttccagtgggagggacttgggcatgtgtcctttcgatcttggcattcccatgacctgaaacagattagttgctagcaagcatgtggtgtgtgaatttcagccgtcccttctctggagcccacccttcttagctgctccttcgcacctggcctcagagccctccaagtttatccatctgaaatcagaagagtggcaacaccagatgtgtgtcacatctggtcagacgctttgacggggattccaggcgctgtggttttcaatagggaggttctatgatggggctgcccatggtatttatgatagtcaaagcgagatcctgctgtaaaggtaaggttagctcctccacgtgggtcatctagctggctttcctggtgctagttagaccctggggcatggggggatgggaagcagccctgccttcccatactctgcatccagtaacccagtgcactctacacctggcagccccttcacatacagcaatgctgggtgtgacttccgtggatgcagagacccttccctccggcctccttccacatgctcgctcaccagattgaggcccacaaaggcattcctggaatattattagcccggtgaatcaggtgaatgaaggcaggacatgacagttatagagagctacaaaacccagccaaagagaagttaaaacaaatgaatatctcattattaagcaaatactagctttgcctttgtcttattctatattgttttgaaatcataacatatcttggccacacatacacaaaagagattaccttagtaattgtgttaaggttccatccttttaaaaaaatttttcttttcagtagaacctgggagtagctttgtctttgtggtgatttgaataagaatccgccccctcccacccccgcccctgaggtctctagttggtggaaatgtttcaggaaggatgacggggtatggccttgttagaagagctgtgtgtgttgttgggggtgggctttgagatttcaaaatttcactccaggcccagtcttcccccccttctctctctctctctctctctctagtacctttggataagaaaaaagctctcatcactgtcccagccccgttcctgccacagtgcttgctgtcacgatggccgtgggctcactgtctgaaagccccaataaactctttcataagttgccttggtcatggtgtgtctttacagcaatagaatagtcactaagacccttgtcgtgagaccatccctccatctgacttgctccatatttgctgacccctctccttccacactctgcactaaacacgaggctgcaaaaagaagaactcctggttcgcattcccaaagtaggcatgctccttccctgtaacgagaccctaagcagggtgaagggctttccttaaagaggaaagtcttgtctccatgcgtacagcagccccctttatcctgggggagggtatggtgatgtagtttggaagatagtttgcctatatctggaaacacaataataaagaatgctgtacacatactattttcccccactggtaatacctgtgataatagtgtagtttataaattagacaccttaagggatgaacactaaccaatgataaacagaactataataagacactgtaaccaagttgtttaaaaacttataaatacgatcccagcatttgggaggcagaggcaggtggatttctgagtctgaatccagcttggtctacaaagtgagttctaggacagccaaggctacacagagaaaccctgtgtaagaaaaaccaaaccaccccccacccatgcaaataggaatcatcaacaacaaaaaccatgaattatttctggcattttccatttaatattttccaagcactttggctttccaccctcacccaaggcacagaagccttgaaagtcaatactttcacttgggcaagaaggacgaggtggagttgttggattttgagtggccacaccgatgttctcttgaaggtctggaggttagaacagtgtcacctggcttcctttggggacattgttaaatagggaaggtgatggtggatcctgactgctcctaccctgtgacctttagtcattctagaaggtcacattggctcacagaggtccctttgaaaatatccacccaccctgtgtgtaatcccagacagcccaggatgctgttggcttagtcactaaggggccacagccttaaaccggtgtcttctttgagagaaaacaaaacgtgttgaaattgggagaaatcccagactgcttgagtgaggcaacagttgcataataggtttaggaaatgtctgtcctccactggtcaagtttagccactgtcccgatggcacttcccatgtcttatgagctcttgggtccatcagaggtggctgggcaaagccttagaaagttccagaactttgcgtggctatccacacagtaggtggcgcatactgcagctggaagaagacccgatcctgttacctctgtgttgatgggtttttatttcctgggacagccaggacgggtacttctgagatgtagctgtgggtggggcctcagaagaggtgtgtgcctgccctgcgtatgacagtgttgaagccatcaaaccaagagacagcctttagtgttcaattcttggtcttgccattaagcagcttcagttgttgggcaagccatttctctgagctggtttcctcgtggaaccacatatgactcagctttccctattgggaggcttaggtgagatcgcattagttaaatggcttttgtaagccttgacatacaagagtaaggacaatttgtatatagtttgtaatgtatagtgtggttaacgattagaaatgttcagacttgtgtctagggacagaaacagagctatagggatagaaagaacctgactacgtatccaaacctccttgtgctatttgaaatgggctttcatgattttagtacgttgtagtataggctagcctctgactgtcttcctgtttcagcttcacagacttctgagattataggtatgtagtatcataccatgcagagaacacagctttttctatccgtctccctcctcctctccctcctcctctccctctttccttcccttccttccctctttcctagttgtaggtgttggtgtcatggcacatgttcagaggtcaaaggacaactttggatgctggctcttacctcccctcttgttgagacaaattctcttgttcatcgctgcccaggccaggctagctggcccagaatcttccagagattgttctgtctccgctcctcttgcagtagaagcactgagattacacacagtactgtgcatgcctttatgtgggatctggggatcaaaaatctcaggtcctagcttgcatggccagtagttttccctgagccacctccttagcctgggagcacagtcttaaagctcaatgcaggttgctccaccatgttatctattgttcaactgggctctagggagaggcgtgaagccagccctgtgttcatgaaggactgtagggttccctgtggctgcagccttgggctttgacctcttatccagttgagtcctcagctgcctgctggtgtcttcacctgagacacaagggaagaggaggtgaccattaaaatgcacagggctgctgctcagtaacactctatagacttttcagtgcacaccttcatcctgattttgagtctgcctcatgggtcaccagacagatgagtctggggatgttttgaggagggatacactccgagatcatctggctcttgtactgtgtactgtcctgatttctgagcttatttgtctgtgtggaaataggtgccatcgcctctgggtctcctgacctccctttcttcatggtgtttgctggtatttgacatcaagaacagaagattgagtggtgagtactggtttgtggggcacagacttgcccacacagccatggccagagtgcagggtgctctccgtcccgacatggcagggtagttagaagtgtctggattgaaagtaccagcacatttttctgtctgtctttctgtctgtccggtgagtggttatgcaagtgaactgggttcatcttaatgaagaatagagagatggggttctatagtcaccgtctctggtttggttgctactatggtctccaatctgctgcctcgctaattcattgtaatgtccctcccgggaagacttcagggcctccgtgcagatgctttatgccttggctaccatcaagcgaaggtactcattgtgagatggatgcctctcctgtgaggtctgatgcccagtaggatagatgcatgttacatcaagtcctcgaagagagatggaccgttctcgagactttgagcttcaaagagaaggaaagggtctttgaggtcccataggatctcagtgtgtgtctaagcgtgaggaagttgtgggtgttagaacagggatatacatgttttgttcagtgcgtcacagcaagtccccccagacagcagctcatctcactccctcttttcatacacatgatgcatgctgactcccatctctcccggaggccaatccagcaacgtgtgcgtggacctactgaccagaacagcatgtggctgtggagttccctggcacaggaggccttggtgactccgctcgttttctgggtgctgtggttgggaacagacctttttctgtgtcaggtggctactcagaagaaacactagaaggaaagatttggtctggttgtagaaaagcccaagaaagtaccaagatgggagtttctctcttcttgcatcccttcttgtatgtgtatgtggcaggcatgtttacatgtggatggggacagatgtgtatgtcagatagtgtgttttatggagacttgaggttgatgtccagtgaccccccttaattgctcaattatattttgaggcagggtctctcagttgaccccccagagctttctcattgacatatctaatccagttaggcagccttctcctgagggccactgtccccacttcccttgtgctgaggttatagatggaccaccgcgtctgtccagcatttacctaagagtctggggatctgaaccctggtccttgtgcttgtgtggaaagcactttgcccatggagttgttttccccacagccctagagcacccccttaatgaaactgtacatgaaaccatgtttccctcttcggtctcttagcttttccaggcccacctgagtactaagcacttgtgcatgccgggaaggaaggaaaggctcaacaaactcgattccagaattattgaagattgtcgtacgtgtatcttagagctttgaaggtgtcagctcagaaatggcctttaattatatatagggcaactctcacagtctgcgaatgggactaactcttagctgcttgtttacttctgacagacccttgcaagtttggattggagttggagacattgaaattgcaatatgggatgcatagcgccatgactacaggtagcagtgggctctgttgaccctttcaggcttgtaagcaggcccctgtctgtatggtgacatgttgcagaccttgctctttgcgttttgttcctggaattctctgtcagaccctggacatcaaaagttcttgcaaagctgggctgttctcaggagctactgtgcaattgagaacagatgtctgctctcagagcagcttggatgaagggaccaggaagcactgggcagggctttttcatcctggagggagggacttcaaagaagcgaagagaagcctgtgtttacttgcaggtgcaaggtgaccagggatgcattgactgagcagcaagtatgacttgaactcatggcctctctgtgccttgggacactgtgacttctaggttctctgaatacacttggccacaaatgtagacttctagccagagccattctacctcaagaagaaagctgggaggcaggactgcttgtagtgcattctgggaggggagccaactgctctcgtcccattttgggcctgccttgtccctgaattccaaagtgcccgcctcgaagttgcagtttattttgtccacttgaagtcacccttcacgattgcagacccttcatttaagcctctcccagagtgttgaatgactctagccccgccctggaaccaggggcagaaagtcccagaggtttctggatgggctctgtttacaactctctgactctttcctgcttggggacctttcataagttcatcaccaggaagctgagtcatgcaggggtcagctggcgtgatcaaagatcaccccagcgctgccggcaactcacatcggttgtctgggcatttgtggggagcagtgtaggaatgacgaggtagatgagctcaaaggccctcttagcatcgcccctctggggtagggagagtggggagggtgggctgcacaccctggggactgcacagcggagagccgtcacccacttcattcacttgatttctttccctcttctctgaattcaaggccaaggtcagagccaaacagaaacacagtgcagaggataaaataccttcccttgtctcatgtttggagttcagcacgccctctctgcccctgtgctgtgctctcaggctctgctcctgatgcttagcacatttatgggaaaccagttcccccagtcatgcatccacattcccattccatagtccattcacctgaacccctttctttcattttttgtgtgcatgtgtgcatgcacatgtatgtgtgcttatagaggccagaggacaatcctggtcattattcataaggtattttccatctggtctatgttttcctttcctcttctcttctcttctcttctcttctcttctcttatcagagcctgcgcccctgtcctcacaggccaagtactgagccgcttcccgcatagacctcacaggcgcagatctccannnnnnnnnnnnnnnnnnnnnnnnnnnnnnnnnnnnnnnnnnnnnnnnnnnnnnnnnnnnnnnnnnnnnnnnnnnnnnnnnnnnnnnnnnnnnnnnnnnnnnnnnnnnnnnnnnnnnnnnnnnnnnnnnnnnnnnnnnnnnnnnnnnnnnnnnnnnnnnnnnnnnnnnnnnnnnnnnnnnnnnnnnnnnnnnnnnnnnnnnnnnnnnnnnnnnnnnnnnnnnnnnnnnnnnnnnnnnnnnnnnnnnnnnnnnnnnnnnnnnnnnnnnttttttttcttttttttttgggacagggtttctctgtgtagccctggctgtcctgtatcactctgtagaccaggctggcctcgaactcagaaatccgcctgcctctgccccccaagtgctgggattaaaggcatgcgccaccactgcccagcttggtctatgttttctacacatctccagcttcactttcctgagccttggtattgctgctggcttgaatcagggtctccttatgtaacccaggctggacttgaactcacagagatctgcttgtttctacctcatgagtgctgggattaaagacctgtgccactatgcctagcattaccttgtctttttgagacagactgtcatgaggttaagctgtttagccaggtctgttcgtcttcccttcctcagtgccgggagggcgagagtgagccactgtgccagttatttttaaaatgtgaattctgattgtctgattcaggtcctttgtaagtactttaccaatgcccgagctgtcccccaagccacaggctactttctttctcctacacatcatcagcttttcggtcctcagccttggtgtccatgtgatggtacccacagatctaaattaagtacccttcataggatctggtagtacctagtatttggggcattcagagtttggaaattatttgagtttcctcttctccctttttagatcataaatatctcaaagaccagaactccactcaccctcctgtccccaactccccagcagtgcactaatgggtagtttgtgggaagatctctctggcaacacagcatattttccctgctgggacctctgtaaaactagagtcactgtcaccctcgtccctcatcttctgtcactcctgggaacccttctctcagacagttttactttaagtcgcactccctagttcgttctttttagggagaagattttagttagcgtctgttctcacccataatggaagctttctgccatacttggatacagagaaaccttaaatctgccttaaatctggggctcagctttgatcatgcttgtgtccttggctgttttcctgtgtgttgtgtcccagactctggggcacacagatgcattattgatagcgtgtagggccttgtgcatgtgggtgaaaccctgttggcccctgactccttgggccattgttacagtttagtggggcacagtgaacaacaatggatgattctcacaggagacagacgcagatgcatcacctgatataattataagcagaggaatgagcaagccaagcctggcgacaggattgctgtggattctgctttttctcctttgtttaatgggctaatcactgggcacgcttcgggaaggtgtggcctctgtgaagggtgtggaagccggccttgtagaagctggcaggaccgcacccaatttgcaggcatgcaccgggtgcctggttcccagtccggtgtagatttcagccgagctgtacctactgaatcctggggcctctcccttgcttggtatcaacactaaggagatgattagggccacttgtcttgtcaccctcctggtctctcacaaagacacatagctgcttcttgtcagttccctcgtgcctgaacagctgggatgtgttctgggagggtgtccgttggcgtggcaagaggctggcacacattagagaggaagtgctgtgtcatccagtcaggttggcccgtggaaggagaaagactcgggttttgtcgcctaagcattttgtcttcctttgcagaagcccgagagtcctcggacttggcctctcagaagcctcctccgtggcatgttcctcctgcctagggacagtgtggcagactcctggctagggacagtgctgtgtccggggtggggtggggtgggggtggtgtctgacactgcggagaacccagggcggatgacagacaagacaaaggccagctccggaaagggctgtgggagatttcagggaattctgattgcagattccgggatacatccttgaagcaaactgtaggttacacctttttgaaattgagtatatatatatatatnnnnnnnnnnnnnnnnnnnncatatgtgggaaggccagagaccagccttgaatattgttcctcaggagctacccaccttattattattttttaatttttaaaatatattgtatttatttatacacatggaacatgtgtgtatgtggaggtcagaggacaacctctcttctaccatgcgagttctgggtattgaactcagattgtcaggcttggccgcaagcatctctacgtgctgagccatcttgccagcccacttttgttttgcctgcaggtatgcctatgtttatgcaccacatgtatgcctggtgcccacagagatcagaagagggccctggtatgtcctagaactggaagtacacagagatggaaagccactgagtacatgttgggaactacaagaacagcaagtgcgctgaactgcttagccatctctctagctgatcgcattatcttttgcgagatgggtctcttctacctgaacctggttggctggcagccagagagcttcaagggtctactgtctccacccctgtgcctctgtgcctggctcgtgcataggttgtggggggttgcagttggggccgcctgcttctttgggaagcactttactgactgagccatctcttttcaagtatacccttcagtggtgttgagaacctcttcttaatgatgtagctggactcagacgtcttttcatcttgcagaactaaaacccgcctcttaaataataagttcctatttctcccacctccagaccctggtactctctattctgctccctgtctcttcgaattccattcctttcagtgcctgtcgtaaccagaagcatagtagagctgcccttttgcaattggcttatttcactcagcatacggtcttctaggttcatctgtaatgggacatgggtcagaatttaaacccttttccaggctagatggtattccaccgaatggctgagacccacattatctttatctgtggtggacaacagggctctttctacccgcccacatctctccttgagcctctgcttttagttctcctagctatagctctactctccacaggtggaattgctggatccttgggatttctgctttttttttttttttttttttttacttttggaagaattgccttagtgtccttttaaaccttcttactactaataaatagtgcctttgaatgagagtggcccccagaggctcatatatttgaacattaggtctccatttggtggaactgtttgggaaggattaggaggtgtggacttgttatggaaagggtgtgtcagtgggggtggggtgggatttaaggtatcaacagcccatgccaggacgagcctcactgtgcctgcctctaacctaaggataagctataaggtctcggtttctgctctagcaccatgcttatctgcatcctgaggtgctccctactctgatgatcagctctctgaaactgtaggcatggcctcaaataaaagcttccttttataagtctcctttgtcatggtgtctcttcaatgcaatagaacagcatctaagacaagtgcacagggtccgggtctttcctggttttcagcccctctacctctttggctctttgacagagcctcctcatatgtctccctggctggctttggcttagacacttcctgccttcacttcccaagtgcgagggttttaggtgtgcaccaccatgcctgctttaaaatttttaaacaggtgggggtaaagttgcaaacaggtccaatgtacattaatgtcagtaggtttaacctccttcaactaaacactgctacacacagatgcacctttgtttatagctggccctacgtgtacctacataggtactgatggctgacattctgaatgtctccatggagacaacattagccctatttgttcatgcagcatctctcagtagttgtaatagacggtgaacaaaagcactaggagtccatctgtcaagctcctctcctggtaagtgtccagagaggtgattgctcagagtccctgtggtggctgagctgcagagatatttcggtctgttaacttccagaacattttggaggaccttcagtttggcaaagtgagttagcacttgcactgggtttgcattcctagaggacctcagaggcgagagcccctgcatcccacctctgggctgtggagagctctaagggacatggacaggggagagaggtcctctgtgctcagtcttgtagctgacctcagtccacacctggctgccactctgggtctatttttcaacactccagaaggcattgagagaggccaaaggcttgtcacagaggggagcttgcttataacagaccacacaacagttttaggatgtcttggtactcaaggaccctccccagtcctgggctggaacttcaataacccttaaaggtgagcaaggaggccaggtgagtgaacttcctggagcacttttgtttgtgacttttttaataccagtaaactgatattagtgacagctccccatcccccatggtagttagctgtccaagtttcctttgttacataagcaggattaatttaagcagctcatatcccttcattcagaagtgacagggaagaggagtgactgcaggagggtcggtatccctcgtgggacagcctgggcgaattctctcattcctctgggcctagctttccttccgttcaatgcaatggcagagtggaatagcacctcaggtgtgctggagtctgtaggtgtttatgggtgggttcactcccaccctgggcagatcttgcaggtacctttctccaagcaagaagagttgaagggaggaatcggtacaagtgacagtttccaggagtttgtttttttttttcccaccagatctacagtaaaaggaatttgatcttcatagccttttttagaaggttggtgctgtgaggaacctcacacagaaaaggaaacaagcagaggagatgagccattgtctgagtttacgcttgggagaggaagaagcccctgggatgtctcactgctctgccagcccccggccagagtctgtaattctcaggaagtggcctagcatcaagctgctcttgcgctaagagaggagagggaataaatgccgaggccaggagtttttgacactcaaaaacctgttgtgtgatttcttgccatctgttttatagtctaatgggattccgttcaaacctgttgtcttagtcagggtttctattcctgcacaaacatcatgaccaagaggcaagttggggaggaaagggtttattcagcttacacttccatactgctgttcatcaccaaaggaagtcaggactggaactcaagcagggcaggaagcaggaactgatgcagaggccatggagggatgttctttactggcttgcttcccctggcttgctcagcctgctctcttatagaacccaagactaccagcccagagatggtcccacccacaaggggcctttcccccttgaccactaattgagaaaatgccttacagttggatcccatggaggcatttccgcaactgaagctcctttctctgtgataactccagcctgtgtcaagttgacactcaaaaccagccagtacacttgtcatgatgtcctgtgtgccagacatggagtcctttagcagttagctaagaggaacactccttcaggtgaggtgaagctagtggtaggttgtggggagagtgtgggcatccatattaccagaggtggtttcccctctctcagggatggaggaggagcagcctctccacaagtcattgcaacagagacgaacccttactgaccacttggccactgccctagctggcccgtttgcttccgttccctctttcttcatcatgggcagcacaaggcacacacgattgggagggtgctctgcaggtgagccagctaaaggtcagagaggtgacataataatttaccaggctacaaagttgaactaggacttcagtgactagatggcagaggactgggccatcttttgtctccttggatcttgatccaagtacaaggaaggcctcaaatcagcttgtactctgcaacagatgggtgaggagattagcgtgtagatgaactggtaacaactatccctgccaggaatgaagatattctaaggagccgagactgcccctcccttttgcctgtcagattattgagacaagaaagcctcaggtattgggatttcccctagaagtgttacgatgctgaaggaaaggagaaagctgctggctgccctagcaggagggttagagatttctcactgttctgtcaacttgtcagaccaccttgcaggagactggagcccagacagtaactgacacctcacctagaactgcttaagtgtacattcctcttccttctgtttaaatctaacccccgaggcaggaccccaaagatggaaagggacactatttgacctctatactctttcctctgcttttcacaatgtctttgactcattgtagacaggtgccacctaggtcactgggtcttcttggggtctagggtctgaccctaattcaggtaagcctccaactctttcctgtgtcccagtgaccccagctttgtacccagtgctccagagcctgtgcgaggcctctcctgaccccatctctgtaccatcccaccttttctttatggggctgagatgtccgactagtagagtatcctcagagagtctgagattccttgagagcagtggctgtctctgaggccttgtgtggctggctgaaggctcccagcagagtctgagattccctgtctggctctctgttcctcttccttcatagcagaacaaagcggggggaggcccgtgggaactcaaatgaaaactctctcaaggcacacctcccttccgccccccaccccccatgggcttctgtggtgcttgcatggggactcttccatgtcaatttcttttcctttgtggcatgccaagcctacctatgctttgcagaagtaacacgccgtttctccagcttgtctcaacatcttgtccttacttgtgaacggagtgtttacaagccattcagctcctcaagactgagtcagtgagaggcctcaggagttccctttatgagcaggcagttgacctgtggctcctgtacgcactagcctttgcataccgggccgtttggagtatcctgttggaaaacaatgttgaaatggaactgctgctctttggctcctgatgctggcaagatggtcaagtgccatggtctccttactgcccggaagctccaaaatcacccgtgggatccaaagaggcatggtaaacagaataagaaagccctcttaggcatggccctgtaggccagtcctgttggaggcgtttcttatgcaaagagaattgtgcaaggaagaagttggggttgatgttaaacatccagatcctgctgccagggagcacaacagagtgcaggctcaagacctcagggagcacggcagagtgcagctcctcaggaacccagggagcacggcagagtgcagctcctcaagaaggcaagaaggtcacagtgtttgtgcccagtgatggctgctcgaacttcactgaggaagacaatgaagttttggttgctggatttggtcagaatgggccacacacaccctaggcgctatccctggagtctgcctgaaggctgttaaagtagccagtgtggctctcttggccccgtacaaaggcaagaaggaaagatcaagaccatacattttgacagcagaaatactaataaatttatatattcttgggaaaaaacaaagaaaagaaattgagctgctattataatagcacagctgggaagcagatccttcagggggagtctgagaaagggctctgggctactgaatggattgagagccctgatactggagtaagtccactgccatgggagtgggcgagttcctgataagattgggttgggctggatctactgtcttgcatgcctttgcccttctgccttccacaatgcaggagtcctccccaaatattgggatgtgctcttggatttccagggccctggcactgggatgcccccaaacactgctgctgctgtacccagaggtgttccgttacagcacaggatgggctgagacaaacactgactcagccccaagctttcatcctttcagatacccgacctgcccctgacctcagtgagtatctggctcagattccttttcaggagactgagtggtgggatgttgatgcagctctatatggagctggggtggagatctgcgcctgtgaggtctatgcgggaagcggctcagtacttggcctgtgaggacaggggcgcaggctctgcataaacagagtatacatagacagggatgtctggacttgaacttgggggagcttgggtggcttggacagtcagtgtagctcttctgctcaccaacactgggcacaaaggagatggctgcgtgtaacttagagtgaccatagaagcagagcaccctgggaacagccaggaatttggagccatgttgcctgttgcctggctctctaccttggtttccccatttataaaacggggatagctagctgttccttttcttgcttttagtataatatttttggtaagcagagatatgaaaggctcagactttaccgctgatagaagctggagtaggtcacggccctgttcagggtgggaaggagtgacccgtgtctcaggtttcccttctgtccctcagtgaggtcaccgcaggacccgtgagatctcagtcctgctatctggtgtcctgggaatttgctccccctgaggagtagataatccttggggtgtgcctcacatagggtgttctgagagtgtcctgaatcaactggacttgggccaagcacggattcttttatccctccctgcttgctgtaggaccatccggagaaaggggggcacccaagtccagctcctggggtcaggaatgggagccatttccttggagccataggcctactgtaagctgcttccctagatagagggggagcccaagtgtatggaacaacctgtctggggatcctgcagggagggcttcagttgtatgtggctgcctcccgaggcagggagcccatctgtcctagttaaatgtctgacatttcctgctgcctgtcctctcactgttggaagcagggtgtagccatgtgtggaaagtcacctgagtaaattccagcttcattggctggattcaggctctcctctccgtggtctgattctaacttcctttcttccagccattttcagatgcccatgtaatggtccagctgtttctctgagtcttgtcctgggggccatccctgcacacaatgccccagccacacagtcttgtttcccaggtagctgcacatgtctgtatggtcctattttttcccccaaatactcccacatgtctctgttcccccacaactaggtcattgtcccctgtccctccactactgcacttaccttatatttttttctcagagtaatatagtctaaatgattaaacaatatagaaagagctattgtgacagttctgctctgacagtttgatgccctgtcacttttcctaagtgaagcttgagcggtccctttctggtcaccctccactttggtagtgtgagtctttgtaccttggtgcgctccactgtggtcttgggaggagaaacaggcttggtaccctggctccttcaggcaacctgaggaacttcgttattcttgccaaggtggaattccatccaacacatgatgtacgttgtccccagaaacagccagtgtcttggctggggtctagcttagtcagtagggtgtttgcccagcacgcacaaggacccgatttgatggctagcacagcaaacaaaacaaagcaatgaaacaaaactagcagtaattcctaaagcagcctacatggggccctggaggtttcagtgttgttcctatagggtgagcagcagctgggagggtactttgtagtcataggtagctaggaagggctgcctcctaacactgcggccacctgaagaacttcagggactatgatgagaaatcatcttccttcaggtttcctcctcttcactgtctctaatgctgtccttttaactggcattgcaggtggactagcctttctgcttgctaccaactagaggtgtttcaggaggaggcatttcatcatgcacgggaggtctctgctcagaatatatgttctggaacgctcattgcatgtgctgtgtagcttctctaccttttaagaagacagtagtgaccactcttggggtagttgttttctcttgctgctcaataaacatcacagttttcctcttggttaaatatacatatgtacatgtctctatttttgtatgtctggataggcaagtatgctctctgtgtctgtggtttctaaggatgatataaaatcaaagcatgggagatgaattagagcgaagtgtattgtctcatgtgcgaaagtgctgtaataaaattctttgtatgctggttctaaaaaatcaacttttaaaaaccagcaaagcacgaggtgaagttcagagctcgtgggtaaagttggatgtatatggagcataatgagcgtcggtttctctttcagggctcattgtatgcttcactctcagtgagcacgtgagaacgatgctgcctggtagttttttttttttatacaggatttttttttccatttttattaggtatttagctcatttacatttccaatgctataccaaaaagtcccccatacccacccacccccactcccctacccacccactccccctttttggccctggcgttcccctgtactggggcatataaagtttgcatgtccaatgggcctctctttccagtgatggccgactaggccatcttttgatacatatgcagctagagtcaagagctccggggtactggttagttcataatgttgttccacctatagggttgcagttcccattcatgataaaagtttatacaggattttaaaggaccaggatgaggccataaaagctccatcatgagtctgtcttctataaggcagaatgaaatgggtgtgggctctaatttgggaatgctggtgagttagggatgctggtgagttagagatgctggttagttacggatgctagagtgttagagatgctggtgagttagggatgtagactgttagagacgctggtgagttagggatgctggttagttagagatgctagagtgttagagatgctggttagttgaggatgctggtgagttagagatgctagagtgttagagatactgatgagttagggatggtggtaagttagggatgctggtgtgttagggatcctggtgttagggatgtggttggaatagaggtactggtagtttagctgtgttgtagggttgggggcattggtgatttgagcctgaatattgagtacttcactgcacatgctgtttcttgcattttggagacccacatctatagtatgtacttcagaaggattctggaagaagagtcatggctctcaaggcctgggtgagttttacagtttcacttcagaagatttctcacagaacacatggccagaggagactctttctgctgaccttgggcttgtgatctgcagggcgatgagtcagtctgaggtcctaggccccatcctctgtattgtgggcgggctgttgatggatgctggctttctgtgtctgcagagttgcctcagcttccggtgtggagggaacacagtactgggtgtgagctgaacatgtccaagtacatgcttgtgtgtgtgcatgtgcgtgtgcatgtgtgtgcatgtgtgtgtgcatgtgtgtgtttgactagatatactaaaatttttgctctttgctgacactggtagacagttagtgtggaagttgcctgtctgattatatattccagagccaaccctagcaagagaagctacagctgtctggcctttttctagcattttctgggtgcctttccttccttcttttcttcagggagtctctggaacatgggtacacaagttgttgggcattcttagctcggcttcggtgcctagggaaatgtacatacgttcacaccaggccctgggagccttcaccctgactgtatccctattcttggctttcatgttattttctgatcctgaaagtgtcacttgtactttgaacaagggaaggtcctctccccaccctctcttcagaaatatgaaacggaaggttgaaagtcgccagctcctctgggttgttggacagggagtcagtggcttagtgatgacacgctggtgcgtgggctgggccagccagcgttctgagcagactctttaaggagatctgaggcctctcctccaggccttttttcttttttgggtttgaacccagcttccacactccccacccatcagaagatgcaggcattgctttcctgagtcccagtttcctttctaaatacctgtgtttaagctgaactccacaggctgtttgcctctggttatatgatccacgcgctcacctgggacagcacatacattttccactctccctcctcctccccctcccccaggtaagagaacaggctgggcctacctgtcttgccttcctgggggagagtttgagaaagagatggcccctctcctaatctctctggaagcttatggaaaggaacccagcccatgggtgtatcattccccaaaatccttctaacttgagtctggtcccaaggggcctgagcatgccacagtctgagtgacagagccccggagcaccctgctatttgctgcccccttgagagtgagtggcagaggtgtaggaggaggatgggggacgctcatctgcagaagagggtgcacctgctgctgctcagggctccctgtcgactttagaccactcccccgctgacagtcctggctcttccttgtaggagctgcttcagggtccctgacacagccatactcccagtgtaagagccttagagatccgcctgttggccctggctgtgttttcacaagaatgcttggccgagtgtaactgcttattaaataaaaaaacaacaaaaaaaccgcatgtgctgccaaaggcacatgtttaggaagtgcccggttaaaactagctaaacgagtttctttcccgaatgccttctcagagcctgtcacactactgctgtgtgtaatggatttccaagggttagaattacagcccagccatggaaactgagtggaagggaaggcaagcccagtccagtgcaggggctgaagtccagatgggacagttcagtgaataaaggctcttgccccggatccttgtggcccgaggttgatccccattatccacttggcagaaggagagaattaatgccttacaggttagccactcatcttcatgtgtgtatcacagcacatgcttgcccgcatccatacccaaatgcaaacaaataaatgtacaatttaaaatgatgatgataatacccagatgggtgaattctttctcttatatgcatgtgtgttgtttctgcatgttctttgtgtagcctcatttgtttccttcattattccctcctttctcatgtctttattttaaaaattatagttttatatataatatgtaggatatattaactattttcaagctagggttggagagatggctccgttgttaagagcacttcctttgcagtcatgtggtctagagttggactccagcagccacacaataaaacagtcattccatgcatgctgtaaccccagctccctggcagatgagacaagatgctgggggccctgcacacttccagcctgaaaaaatagagtcccaggttcaggaagtggcacagtctcagacgagtatgtgtccagcaatagatgatacttcctgatgccccttttgtggcctctgcattttaaacacacccacccactcacattcacacacatgcccccctcctttaccgttcttatcatttttaagtacacagatcagcatcatacttactcatgttgctgtgtagctgtggccactgtcaatctatggaactcttcctactgcagaaccaaactcctgtgcccataaaatgccagtctccatcatccactccccccacctctggctgccccctctctgccttgcctggatggatctgactagggcaggtccctcctattggtgtagtgctctgtggaatagccagattttggctcacccttcatgttttttttaattaaaaaatttttaaaatttatatgagtacactgtcgctgtcttcagacacacactaaaagagtgcactggatcccattacagatggttgggagccaccatgtggttgctgggatttgaactcaggactgctgggaattgaactcaggacctctggcagagcagtcagtgctcttaaccgctgagccatctctccagcgctcactcttcatccttttactcaccctttctcctccttgggcccacacaatagagaatatcaacttttttcgtttacattttatagacagagtaaattgaaaacttaaaaaggagaggttaaattgattacattcccgccatctctggcatcctcctgcctcactccttaccctcctgactccagcctctcatctgaagctatgttgtctttcagtcagttctgagcttcttctcttggcacctcagtggttattctctgccttcctgtcacatgtcccgttcccgccccccccccccaggcccccagtgtacacactccagtgctatttgctctttctgttccatggcttgggtggctgctctttgcaggttggtgagggcttgacggggccctgctccgtgcacacagccatccgccgtacttcagagatgcgcagttgactctctctcttaggtggtgggcgcaagtaggttcggtggggcttggcataagggctacagctttatcaggaaagagggtgggaacggatgcaaagtcaattcagacttccctgggcagcgttagagttggtgcagtgtcagtgagctgacaaggatgtgcctgtaagatgtctgtgagatgatcgtgcatatataaaaggggtgaaggatgtatagttgttgactgacagccagtacagggttctccaggagctctctgggtggttatcacagctgagggcaggcacattccagggtaagctacctcaggttgattcttgaagcctacactgtggaccccactgtcaccctgcttggctctgtgcctactgccatccatcaatcaccacccacctccctcctcataggactagaggtggatcccatactgctgaggatgttatttgaaagtaccaggggcctggaaggggcctaaagggtcctttaatgggtcttcctaacctgcagtgattagaaccatcagggaatttaggaaagaaatacattttgaattcatgtgtgtagaggtggtacccagggatcttgccacagtttccccagggattctgctaacaccccctctctccccccatcacctctggtttccctcctctctttcattttcaaaacaaacatgctggggaccaggtaagtaacatcacaaatcagaacgcacttgtgactgccggagctagcatctgatctagtccgaggccttgcaacagccattccagaagcctctgttttctcacctggttgccccaagttcttaccccggtctctgtagtttctgcctgctcagatacaaggaagccctcaaccatacatggggtgtgtaaaccctaacaggaccctgcccctatgccagaaaccctggaggaggtggtaagctactgcttcactctctgagaagaggtacaagacagcagactctctctaggcacggggcctggccagagtcgttcttttccatgagccccaattagtcttccgggacaagctcattcagcaggggataacacagcttgaggcatagcaggcatcatttaggaacgagtcaaagatggtgatagggaaggatgggtttagtccccgagaacatggttcttgctcagggaaggtgggtggggtgatggggaatcccctcacccgctgcatcacccgctgcatcatcaactcatccatccatccgttcagcaaatgtttgctgggtgcacacggctagtactacatctaccacgcacaagtccttgcagtgaacaagagctagaacccagactgggagtggcagtggtgtctcagctctctgggagatgaagtgtctagctccatgttcatcctcttcatgtaccccgnnnnnnnnnnnnnnnnnnnntgtgaatgtgtgtacccagaaattttctctctctctctctctctctctctctctctctctctctctctctgtctccctctccccccaccccagactggctcacatcactgccggggctgtccattggtagcctgtgtggcaggccagcaggctggacagctaccaacaccacacaagtgaccttctttagtcaggagcaactgactttaaatgttaacctgatgtaaacaaaacaaaacaaatattagggaatcatctagagtacactgatgtctgatcagttatttgggttcctcagcccagccgttgaagtatgagattaactctccaatctccttaagtgctttttatacctgagtagcgaggacctgggttcaattcctagcacctacatggcaggtagctcacaaccatctgtgaatccagttccaggggatctgacagtcctaccaatgcacataaaataaaacaaatacagaaaaatgtgcgcctgtattaaacaagtgcagactgttcgagcttgccattcattggtcctgaatagtgtgctctaagaacttcctatagcactttttttcggtgatcacagctgggtttgtttttgtttttgtttttgtttttcattggttgtttagttggttggttagttagttttgttctttgagacaggatctcatatagcctagccttgaacttctgatcccctttccttctgcatcccgagtgctgagactgcagatatgcccaatggtgcctgggtcctgtatgtggtcctggggctccaccccaaggcaaacgttctgccagtggagccacatcccaaggacttcccacaacccctttgtttcatcagatatcatctggagacatgcgcatgggtcacaagtgctgtagcattttatagaaagttaaatggtcatgaatctcggtatccttagtggggacgccaggatcagctctcctccagagacttggggccaagagtccaaggttaaggaggggttttgaagacattgtttcaacgcttgctcgtaataaatgcgtgatttcattgaagatcccaaggcctagggcagccaaaggctctacctgaggcttacacagcttacccatggcacatgacacagcagggatctcattcagtatttgtccatcttttctacaagccttgaggctttgcaaatgcggagctgtggtggagactgatggaggaggccatccaattttttttttttttttattttcttaccagcttgttttccttctgttttctgggttgttccttccctcttatcatatgtattaactcccctatattcatacatattttctgtctcccgcagacacggatgcagagtttgaatccagatcccaaagcccggtatacaagcatctatggcgccctcaagaggatcatgcacactgaaggcttctggaggcccctgcggggcctgaacgtgatgatgatgggtgcagggcccgcgcacgccatgtattttgcctgctatgaaaacatgaaaaggactttaaatgacgttttcagccaccaaggaaacagccatctagctaatggtattttgaaagcgtttgtctggagctgggaagctcttctctctggggcttcctcccccggacccagcaaccttcatcctcggcaaacagagaactctagggtcacgtgaatgcggtcacgtgaacgcgcgcttttttttttttttctttcaattcaatccctctttctctgggggaagctggtggtagatgtgttttggtatttggtatttattattgtgtggcttttttttttttcttttaagaaaacactcgaaacaattaatgatcagtcataggaaaaaatatcttttgaatgctggatgcaaaccaaaaatacacagaaaaggacagcttctttgagactatttaaaaactggtacagcaggtatctccagcgccaggatctaactaagctttgaaaggtcaagacgttttatgctgacagaggactccgagccactgtggaaggccatccccactttaagctgccggagactcgggcctttgacccccccccacagcgtcctccgtgtgtctgagtcgcatctttctgcaagccagggctgaactagtttcctgtggttgatctagggagggcgggtggaccgcaatggggcacttgtggacagcttttacataaggcaggagtcgatgggctgggactttaacaggcttttcagtgggtgggagaggaccgtcgatagcagcaaagcaacttaaaataatgtttattttgacaaaatttactctgaggaatggagaagtggatgtgatcaactctcccctttgctttttattcgacccacaataaaaacggtttcccttctgtcagccacccttagacccaagcatacccgggtgctttgctgaagtcctttgctttttcatttggtgaccattctttgaatttattcctttggtcaccaagagccatgcccccatgcttctgagatggtggtaacagaccctcatttcacccaaactaccttacgtaatggcttggctcctttaaggaggaggctaggggacttgacaaaacccatccctgcaccagggtctgcccaatgctgtccctgctgcattggtgtaaatgctgtggtgtctgccacctttctgggaataattgtgtgtgtgtctatgtgtgcactaagtaagaggtgccttcctgagaggtggcctgtagtctgacgctcatccctccctctttccacctgttataattaacgggcagctgcattgctgtggaagtcactgggaggccagaagcagaaattccagggccaattcaggctttcaaagccaggctaaaggagacttcagatgaaattcttcacttacaaggctggtcctaagtctgcttagacttcagctaaggcaactagccttctgcatgattgtatcctcttcagtagccttagcttaagggcccagagagctctctgtacctaaaggcttgggacaagggaataaaattctaggcagtgggaaatgcctgaggtatggtttctgagctctaacttttcccaaggttgatttacaaacaaaaggagtctctgaggtttagctgcaacggtgctccagatagctgctctccctattgctgttcagcgtttctgccaccactttgggattttaaaattttctcaccttggctgagctgctaggcaactttgagccttagaaagctaagtccagagtttatctgacttaagttcatggaacttcccatgagcaccaggtgacagcgggtaattttctggagtttgttttgcaggggtagctgggagtatggccaccctactccacgatgcagtaatgaatccagcagaaggtaatgttccgtggctctagggagggactgtgggggataggtagagaggccagaggagcggggtggtggtggtggtggggtgggtgggtgaggaaaagtgggcaaggactggcttccctggagcccacgggaagacttcattcctcacacattactggggtgtctccagaaagccagcgagcattggggctctaggagcatcctgttgtggaaaccaaccgctaagcagagttgtctgcctacctgtagcatcctggggaggagttagaaacgaatcttcaggccctgctgcaggggatttcttggcctgcttatcactactgtgcaacctgtgtgttgagggggtgtgcacaccaaatatatacatctgaccctgttaattgtctctagtcacaaacaaatctagagggaactattcccatctcattcactgtgggttgactttttcaggcccattaatatagagtctcaccatgcaactcaggatgccctggaactctctctgaggctcaggctagcccaaactctgaaccttcctgcctcagcctcctgagtactggggttataggcacacccagcctaattttttttttcttaatttgtaagatggtggcaatttcctagaaacagtgaatatatagaactattagccctctgtacttctaaaattaatgtggccattttgaagggggttaccttttttgagttttgggggtcctcttataaaataaggcagtatttataacccacttggcatcctcatgcatgcttaaatcatctctgccttactcctagggttcagtacagtgtaggtagatgctgtatgacctctcttagagaataacgctaagggaaatatcttcttatgatacgtatagactgttttcttttctggttattttcatacacagttagttaaatctgtggatacagactcatggtatagagggaccgactaggattcctttttaaaaaatctattcatacagggagctgacaatgacagtcactcagtcaatgttaactaaacaaagagtttgtttatttaaacagttttttttcccctaaaaaacaaaaaccaaaaacaaggtggtgttatgtaacccgggctagccttgaaatctttatcccctgactcagcctctagatttttagaattataagtaattgctaccctacctggtgtttatatttaaaaaatacttttttttatgtggatgggtgttttgttggcatgcatttatgtgtacctggtacccacagaagccagaagagggtatatgggatcccctggaactggagttacagacagttgtgagtctctttatgggtgctgggactcaaatccaggacctctggaagagcagcaagtgctcttaacatggaaccacccgtctctccggtccccaacccccttggtgtgactcttgactcaattaggcccttatttaaagatggagcatcttggcagtgtgtaggtaccatggaaactctagggaatacactttgttttctctggtcctatgaaccattggatcattttgtgttaaagccaaggtctccgctaggagacatcacccaattgggcagatgtaattctagtgttgtcccaggggtacgtgtgataggcattaaaatcagagaagacagattattgagaaatcagggatactcttgtaggacaatgttttgttttgacacaggatctcaccatgtagtcttggctggcctggaactccctgggtagaccaggctgtccctgagcttatagagattcacctatttgtgcctcctaagggctggaattaatgacatgtgccaccatgtttagctcagggataaggacagatcagggagagggaagtattttgggggagttatatggaaggctaggaccttggaaagcaggctagctaatcaagcctgaagtgaccgcttgatttggggatcttctttcattccagcttcagacaggaaattgtttagaagtacctactttcctggcgcagagtcacaaagttgaggtgggctacctggagctggccttccgtggcctcttagctggggctatacgtgtgctgttttggtacctgtcaccggtgtgtattctaacatgcttgtttctctctattggttggcttcccttctcactcccatctgggatggggccaaaccatccacctgtctgctggttggttgctcatcccccacctgacagtggtgaaacagcgcttacagatgtacaactcccagcaccagtcagccttcagttgtatccggacagtgtggcggaccgaggggttgggggccttctacaggagttacaccacacagctgaccatgaatatccccttccagtcaattcacttcatcacctatgagtttctgcaggagcaagtcaaccctcgccgggactacaacccacagtctcacatcatctcaggaggcctggccggggcactggccgcagctgccaccaccccgctggacgtctgcaaaaccctcctcaacacgcaggagaacatggctctctccctggccaacgtcagcggccggctgtcgggcatggccaatgccttccggacggtgtaccagctcaacggccttgccggctatttcaaaggcatccaggctcgagtcatctaccagatgccttccaccgccatctcctggtccgtttatgagttcttcaagtacatccttacaaagaggcagctggagaatcgaactctgtactaaaggaatggggcagtgggaagtggttctgacatcctttgttccagcttcatcctcttgttctcgcacccagggcttgtcctgaagggtgcttgcgccaggcccttcgttccctggtgccgtagagagggaggaccggcctccactgaccagcatgctgtctgtggggacatccgaggtggtggtaggcgggagaaacttggggagagggagaagttgcttttctcctccttcctccagaggaatgtagcttttctgcctcactgtggccttctccctagatctttagatcacaccgcagaggcaaacagtgacacagcaaagaaaaagtttatgtacataaaagtaccattaccccagtctgaaataggtggataatgtttatcctttatttttctacatagagatttttgaaattgtgtgtgcttgtgtgtgtctataaataatattagagttgggaatgatggacctgttttgtttttttgttttttaaataagagagttccattcttccatcatgagaagtaaaacaaacaacaacaacaacaaacaaggggaaaaaggcaccaaagtaataaatggctttatgtggcctgaaattgtgtgtagcgcccctcccatgggagtttaacttgaatgtaaaataataaatataaagtttatattttgaatttctcttttcatggggaaaaaggtacgttgaaaacaaatcaaaatagtctatcacttggagcttttttttgttttgtttttaattttaattttaaatacagttaccctgcgtgcctttctgtcttttctaagacttccaggaccaaaaatagggtcctggagcattttctccctctgtagacacccccgtacagtcctcagcaccatggctgtctcagtagaataagaatggctggccttaaccttccgtgtgagtgatgtgagcgtgtgcctccctgttcagctcttagcactgggaatgccactgtatgcctagccaattgatgagacagttcctgcctttgtcttaggagtaatctccatagcaacctcctccttgggcacttctgctaacctggtctataaggtttgttagtagtctcctgttgacccatttccccggcagtctagggattttgagtatttctggtactcatctgtcacctaccctgttcagctccacgacttaaacatcagagcctcttcactgcactgaggccagccctccagccgggactgaagcctgccacgatcctccgcccctcccgagctgctcagcagccttgtctcaccctgtgtcacttgagaacctccgtcctttccgctttgttttctgaagtggagtcagatcatctcagagaaagcacaagcctgtgttgtccagtctcccatcctcatggagatgacaggataggctcagtttccttcttccagttgtcaacgagtaagctgggaagacgctcatgttttcgtgtccattgccctggtctcatttggaagccacgactagcatgctccctcactggggaggcttagaccttgagttcccacggatggtcatgctgctgcctgggaagaaattgagcttgtacttggagaatttcatcttggacccacgtaccacttggtgccagtagatgcagctttttggttttgtccagcagctatgagaagttacacactggtcagctgactttttttttttttccccagagagaaccacctctctcaagtactcctatgtattccaggagggcttcctggctggctgcagtttgtcttactagtgtcctgggctggctggtgtcctattatcactgacaatgtttctattcttaccctgctagcattgagtagagttaaattctataaatggagagggaagtcaaattgtagagtctaaagtcaaatttaaatcaaaccccaaactattcctataccacgcttagatacattgttgactaatcctgctgcaagaccaatattttcccttggattttctttacagttatctaatactaggatagcccctttggtcatggccttataaggtaggaccaggacttcaggactctgtgagcttgaagtccaggggtcccatcctggctatcctctcctcatgattggtgggtctgcaggaagatagcttttttaacctgcccatccaattcagtcaccctaaggttgagcgagtgatatgtctgcaaaaaagttgttaaaggttgggatacattcaacgtaagttctgtgccagtcagtcccccctcccttagctccaacattgaaattgtccttgaccctcacgcacatgatagccagtgtgttgattgtcatttttgacgttgcaaatttcaagataggaaaaggctcagtgaccagtttaggatagccataacctatctcggtcattggcatctttggagtgacatccaaggatggaccatcccacctgtgtacaatgataatactttagctgtgtgtgtgtgtgtgtgtgtgtgtgttcaggccatgtgacagtcaaccatttaatagatgagtgttaatttattatagataaatattgatctttaaaaatgggatgctcttaattcatgactttttaaagaattggattaaatatagctacttttatgtgagctttcccctctgtccccctgccccttctctctgtctcatttctcacaaccatcaccctccagtgtcacccccaaggctatatctccaacatactgctatgccattaaggttttatttaactttatttatggataattatgtctatgaacaacaaatgtgccgttaccggtcacacagtgtgtgggataagagtggcctagtgttgctttccgaatgtcttaaaatacctgtggtcaagattgtttttgcctttgtggcctttgggtttggagagcagcattgtgttcacatgtgtggatgtctgtcgtgctgctacagttgtaacactggagctggaaaaaataaagcattgatcttgaaaccattgtggggtctttgtggggatgcagaagggtccggagaatgggttcagaggagacttgatgcgctgggaactagctgaataggaagcagatcatcttgccagcagagggcgctcatgtacatcacacggcctagaggcctcctgcttgaacatcaggaggatggctccctcaccccatccccaccccgcccccgcacatacctctgtgcagagtccgtcaggaacctcttacagagaaagtctcagatgaccagagtccacagtctcaaaatatcacagccaaagccagagagtagaactttcccaagaggtacaggtgaggaagcctgaaaggaaaacgtttgctttgagaacgctggactctatccccagaaccaaggccaaagatctgctcagtatgactgccgagtctctcccaaaaaggtacaaagttagaacggaggctaagcctggaatccagccatggacacaggtgccaggtgggcaaaggtgcagagcggagagtgccacggagcaactgtctgacttgtctcctcctacccgactctgagctactctatgtcccttgtggcttgtagctgctgcattttggtgtgggggtgtggggtgggttcagggtctactgattcaacccagtctgcctgcctgcctcagccggcaaacatggtagtggtggtgagcggaagtcatgtggagctgtgggaaggaagcgtgagatgtcctaccctccataagatgcagtctagtagaatacaaagccagcccgccctgttgtcgcaggcctgttgatgccagctacctgggaggcaggaggtgatacattcaagaccaacatggattaaagagattagtcaagccaccatgagtagcttagtggggcaggttgtgtgaatgggagacctggctccatttaaagcacctgccattcttactgaggacctgggttcagtcccctacactataggtggttcacacccatctgcaacttcgtttagggaatctgatgatgcttctggcctccaagggtgtctgcacttagtgcacgtagccctccgcacatatgcataactgaaaataatcttaaaatcttttatttttaaaaagtttaaggtggtctagggttaagctgagtgtccaagtacttgcctagcacatatgagaggttctggcttagtccctagcacctcactgacacacttcagtccccttccccaagatggcagtgctccatgctatgggggttacaggtagcatggaacctctttgtgtactgttggttaggttcactggttctccctagcctgggggggctgaagctgctctgtctggcctggcccctcagtgttcatgttgcgtttctttccatgcagggactaatattatgctggacattcgcaatctgctccagtggggcagtattcaccacagaaacgagcggtttttacagatctgggtgcttgtctccctgagagctggtagtacactaggctggtccatagcacacgtttggtgtgaagtacgatttttttgagagggataaagctggtttcaccttagagttcttggttagtgccgcctctcttagctcctggcctttctcctgttactcagagccccctgcagaacacagttcctgcctccaaaagtccctaaaggaagggttttcttttctcctcagctaaggtctcctgtcgtgacttttagtgggtaactgctctactaggaagaactcaatgctgatgctgaaggagagcccttggtgggatggatgcctcgggaggatgccattctcccactgctgtccaacagatttagctgtgtgtggggggcatgtgtgggagagaggaatagaggattattaccaagtgtcctatataatctaaggctgaatgtagacctttaagtatgggttgggaagggaaagcctgggccatagacacactgctttggggttttgtccatagtaagctatagtaaccatttaagctgccgttttaaattctaaaacaattttgtgtatgtgttgggggttgggtggggggcaggtatgtatgtgcacatgagtgcaggtgcccacagagttcagaagagaacattggattcccttgaagtttacaggctgttgggagccacccagtgtgggcactggagaccatactgaggtcccctataagagcagcatgcactcttacctataggaccatctttctagcctctaggttgtttcctcctcctgcttctcctccccatcctcaggctcctcccactccctcctttcctccctccccatcctcttctctctcctccccccttctcttcccttttcaccatgataaaatgcctggctaaatccataaccatctacatggattgggcccaggaaatcttcacagtcatcaagaatggccatgaagcctctgagctaattgattgagctctttaggtcaaaattcagtgccaggacccaatgaagtaagaaggggatgagagtggtggtggtgccagttacagggttatttacaacatggtaaaggacatggggggcaaagctcccaacctgtcacccaacaggcaaaacagctaggggacaggggcaagaaagaccaagtgggcaagagaacaacttcaagaaaacagaggaggaagattgtgccttatagggaggtgtgatcagtcacatcacggaaggcaagggtatgtgagatgcttgctcacttctgagagggagggagactcagagggaacagagaaataagaagaaatggagagcagagccgtggtgtggtggcacacgcctttaatctcagcactcgggaggcagaggcaggcagatttctgagttcgaggccagcctggtctacaaagtgagttccaggacagccagggctatacagagaaaccctgtcttgaaaaaccaaagagagaaagagagagagagagagagagagagagagagagagagagagagagagagagagagagagagaaatggagagcaggcagaacccttggtgccatccctacccccttcttacaggtaggctccatctcccaaagattcaacgacctcccaagaatgccaccagcacttaaagccctcgtttgttggagacatttcacgttcaacccgtaacactgcctttgcaagaagtttggcccttaagtaccaagttatggggtgatgctgttattggagaaacccatggcacagaagtcacagggcgagtggggttggcgagcgtcctcagtagtttggtgatgtaatgaatttcctagaaggatgcctaagaggcaggcaaagaagattggaactgagtatcagggactgagttgctgaacaagttcacggtctttgggaggtggggctcagtggtaggtgaaaaacaccacggaaaggaaggagggccttactcaaaggaccagcaggtggcagcagagaggctgagacccaggcataaaacaggcacagctacttggagaagttctggtatctccacgctgagccactgctgttcttggacccagggtccttggatggtccatagcagtcacactcttgtccttggcctcacatttacaggtcacagagccaagagagatctctgagatttgaacttgcccccctctcaagagaatacccaccacctgaagagaatgacatttccttggaggatgcttttagcccgggccgacagttgagcatatatgctatgcttgaccatgactgcttcatgaagtattgcagtggccccgcccttcccttgtttgcaccagtgtataatctgggctgaaatcatgtcccaaacatgcttttcatttatgtagcccaggctggcccccaactcataatcctcctgcctctgattcctgagtgctgggtttacaggtgtgaatcaccacctgcgtcgaaaagcttttgatctgagaggaatacatgtgactgtgggaatgattatttcaatattacttcatattcatgtcccacatgttctgggtgggatggggaggccacaagaacagaaaagggatggaggaagggcaaggaaatagggtggggagaaccacaacacacactttgttcaaaaatatcataatggtatctaacatatatgttgactaaaacatataatttagatatattcactttatgtgtttgagagttttttttttctgcctgcatgtatgtatgtacaccacttgtgtgcctggtatcctaagaaattagaagagaaagttaggctccctagaactggagttctggacatttgtaagccaccaagtggttgctggaaaaggaatctgggtctttgtgagaacaaatgctcttagcaactgagccatctctccagccccatatacttatttttaaaactttttttttaattgaccagaagtgcttatttggccagaattgctcatgaaaataaaatctactaatatgacgatttagaaaatgcaaagaattcaccagcatatcctgctgaacttgtatagcattctaaacatgaattcctttcccattaaaatgtcctgagttattctgagcttgttggatgagagctgttcctttagctctgggatgttgctcactgaaatcgtgttggtcctaattttcatggaaacgtatgtagtgtcatctttttcacagatgagcattccatccgagtgtttgtcatgagtaaacccacacagatgtcattggaagagatgatccattctgcagagaagagtgggggcggggctcagaaatgtgtgcattgtacagagcagagcagaggcatatttgttttttttttccttttaactttttattgattctttgtgagtttcacatcatgcactcatccatgattttgtatatgtcctctgcccttgcaacctacccacaaaagaaaattaagaaaaagaaattaaaaacgataaaaatcttgttgtggaagctgtagtgtgtcacagtgtgtcccacaatgtactctcttgtccacacttcttcacttgcaaatgtccattgcagtgagtcactggtctggttcaaggcctctggcttctgctacagcattaatactggacggatccctgtattgatataggcactcctcttagatgtcctgttgttgccctgtgtcatggagatcttgtagttttggatctgcaggataggccctttcattcactccagaaattaatagatgaggtagatgttgggaatcacagccctggatctgggccagggggggtaggagagttgatcagaccactcgctcccacacccatgtaaccagggtgagctctccagcactgcccatgctagcttacccaatgctgcagccagcaaggggcaggaacagctctccctctcctgtgccctcaggctgctcaccctcccaccagcatggccagctccactgtgctgcccaggtgaggtgcagggcctgcttgcccaagtgctgcagctgatgagggacagagccaattctcctgctctcatgatcccggagctagctctccagactgcagcaggtagtaagcggggagagcaactctcccacacctacttcaccccatggcagacgaatggtgtggcccatctttgaggttttaatgtggctatacactgttctcactgggctggttagaacatgtagcttatggaatgcaattttatatttgcttccccactcaatcctgaatttctacttctggccacaaggtggtatctgattttcattaatgctgaagacaaacacctcatcttttacagctcagtcaggaaactcctccaaacccaccccacccctcatcctttctgtttctgcatctgttgcaccagatggaattcctaaagaaagttcggttaacatgtctttgtcgaggagacttgtattggatcaatcttagctgcggcaagatatagatatgtactttcagtgtttttggttcatctttgattatctttcaccgcctctattttatagcctagaatagaagcacactgtacttttacaagtgcctgctctaggctgcacacgttagcttgcgagtgggacattgcagaggagccttctcagaagctgccttgccagctgggtatacacagggtacacacacaagatacccactgaaggaagcacatgagtctagttgtctcagttctagacttgtgttcagtgtaaggtctctaaatccatggggattgcattttttagatcttctgagtttatgtgtatgagtattttgcccgcacgcacgcatgtgtatgtatgccgttgtacttactggcagaggtcaggaaagtgtgtcagtggactggagttacaagggatggttgtaagccattatgtgggtgctgggaactgaacccaaatcctctgcctccagatccctgccccataagggattaagattaataggtgttcccttatgtttttcatggcaatatgtccacatgggagtaaactcccaaataaaaggactgcatagttgggaaaggtttcacaaggggtggggtaggtggtgacactggtttacattagtggatttgccacacacactctttagtgcagggattacaggcaagtgtcactaccatattcagctctgatgtgtatgttcttagaaagaaaattttggacagggacatatagaccaaggagaacaaacagcttctagatgttataagcaaggctacggtgacagagcatcatgtagtcagtgagacaggctgatctgttttgtttttggggcctgtgtgtgtgcgtgtgtgtgtgtgtgcgtgcgtgtgtgtgtgtgtgtgcatgtgtgtgtgcatgtgtgtgtgcgtgcatgtgtgtgtttgactagacatattaaagtttttgctctttgctgacactggtagacagtgtggaagttgcctgtctgattatatattccagagccaaccctggcaatagaagctacagctgtctggccttttcctagcattttctgggtgcctttccttccttcttttcttcagggagtctctgggagccagacgacagccactggtggtgccctttggatgttgtgatagctatccttggttgtcaacgtgacattcgtgggatgagggagtttccactaagaagttgcctctcttagattggtctgtaggcttatctgtgggacattttcttgactgttgattgatggaggagggcctagcccactgggtagtgccaccctgggcaagtggtcctgggttacacagcaagtgtgtgagctgaagcaggagtgcagccagtaagtggctttcttccctggttttgctttgacctctcgccttgagttcctatcttggcttccttggatgagggactgtaacctgctacaataagctcttcctccccaggttgcttttggtcatagtgttgatcatagcaagagaatgtgaactagaacactgg

SEQ ID NO: 512 - DNA, 1295 bp, Mus musculus
acccacatgacagcgggagcgatggccgggattctggagcactccatcatgtacccggtggactccgtgaagacacggatgcagagtttgaatccagatcccaaagcccggtatacaagcatctatggcgccctcaagaggatcatgcacactgaaggcttctggaggcccctgcggggcctgaacgtgatgatgatgggtgcagggcccgcgcacgccatgtattttgcctgctatgaaaacatgaaaaggactttaaatgacgttttcagccaccaaggaaacagccatctagctaatggggtagctgggagtatggccaccctactccacgatgcagtaatgaatccagcagaagtggtgaaacagcgcttacagatgtacaactcccagcaccagtcagccttcagttgtatccggacagtgtggcggaccgaggggttgggggccttctacaggagttacaccacacagctgaccatgaatatccccttccagtcaattcacttcatcacctatgagtttctgcaggagcaagtcaaccctcgccgggactacaacccacagtctcacatcatctcaggaggcctggccggggcactggccgcagctgccaccaccccgctggacgtctgcaaaaccctcctcaacacgcaggagaacatggctctctccctggccaacgtcagcggccggctgtcgggcatggccaatgccttccggacggtgtaccagctcaacggccttgccggctatttcaaaggcatccaggctcgagtcatctaccagatgccttccaccgccatctcctggtccgtttatgagttcttcaagtacatccttacaaagaggcagctggagaatcgaactctgtactaaaggaatggggcagtgggaagtggttctgacatcctttgttccagcttcatcctcttgttctcgcacccagggcttgtcctgaagggtgcttgcgccaggcccttcgttccctggtgccgtagagagggaggaccggcctccactgaccagcatgctgtctgtggggacatccgaggtggtggtaggcgggagaaacttggggagagggagaagttgcttttctcctccttcctccagaggaatgtagcttttctgcctcactgtggccttctccctagatctttagatcacaccgcagaggcaaacagtgacacagcaaagaaaaagtttatgtacataaaagtaccattaccccagtctgaaataggtggataatgtttatcctttatttttctacatagagatttttgaaattg

SEQ ID NO: 513 - protein, 286 aa, Mus musculus
THMTAGAMAGIHSIMYPVDSVKTRMQSLNPDPKARYTSIYGALKRIMHTEGFWRPLRQVMMMGAGPAHAMYFACYENMKRTLNDVFSHQGNSHLANGVAGSMATLLHDAVMNPAEVVKQRLQMYNSQHQSAFSCIRTVWRTEGLGAFYRSYTTQLTMNIPFQSIHFITYEFLQEQVNPRRDYNPQSHIISGGLAGAAAATTPLDVCKTLLNTQENMALSLANVSGRLSGMANAFRTVYQLNGLAGYFKGIQARVIYQMPSTAISWSVYEFFKYILTKRQLENRTLY

SEQ ID NO: 514 - DNA, 63609 bp, Homo sapiens
  misc_feature (1)...(63609): n = A,T,C or G
acagtagctgaagtgttcagcctgggagcctgagaggagagggaagatctggctgctctctgaggccactcccagggttcctctctgctacccaatgtttctgaaggcctgtctccacaggccaccaagtggagatccttggttaacccttctctcccacctgagagactctcggtgctaactttgcccccccccgctttggtaggtggcaacctggcaccctttgcacatctttctcctgcaaattcacaatcactctgcaattgccccccaacagcagctgaaacagaggtccagacttgagaaacacatatgactaaagtcaggagagaccagcaaggcataattagatgctgtggacagagaaaacacgtggaacgcaaatggaaaaccacagtggttggtgcttctaactgcaaacgagctgcttctcccaagggcaactcttggaagcagtgggttttactcagtcctgatctgtctccaaagcacatgcttgttatttttatgcgacatcatctccatcctcctacagaggggcatcttctctgctcagtagtctatttgaggcagggaaatacagagactttgctacctgaaggatcgtggtcagtgaactctcttattcactgtgcatagagctcagtacaaaactgtgcaaatgtggccatgtgctaatgtgctgtgtcaggtgaacctgaccagagtggagaattgatgactattgatttttacagagcaggcatctgagatatgacaaatgatagcaataaaggagttttatcaggctctgagtttatttcaaaggtgagtaagtgaacgggtattgaatgacacacctggggttttatcccagctctgccaccaaccacttttgtgtccttggacacgttactttaccttggatctcttttgtccacctgtaagaaaggacttatagactatatcatactctagttctcttccaggtccccagcttagtaactccatgttgtcctaagaaaggtagtcccctggccgggcgcggtggctcacgcctgtaatcccagcactttgggaggctgaggcaggtggatcatctgaggtcaggagtttgagaccagcttggccaacttggtgaaaccccacctgtactaaaaatacaaaaattagccagatatggtgatgcgtgcctgtaatcccagctactcgggaggctggggtggagaatcacttgaacctgggaggcgaagtttgcagtaagccgagatcacaccattgcactccagcctgagtgacagagcaagactccatctcaaaaaaaaaaaaaaaaaaaaaaaaaaaaaaagaaaagaaaagaaaagaaaggtagctctctaatttagtgtttgtgacatatactttggaagaaaaaaaaagtcacctttttctctcttctacacaacctgtgctcagaatctccagctctgaggtgcaacatgttctttaactccctgggaatcatggacgtctgcaatatttcatgctgttatataggaagatgaagctcttttccaaagaaattctgactcatttaataatatgtactgtttattcattgtgtgtattcaaggaacttagagtgtaatgggagggctaagacatggcttccagagctgcaatataaagtgcaaggttctaagtaagagctgtggaagaggcagggaagagctccagggttcctcctactttttaggggtcagagaagacttcatggaaggtgaggtgtctgagttgagaaatgaatgttgagcatcatttcaacagtggagatgtggagagtcttcccttccaagaggatataagaagagacaagggccataggttgagggacatggttttgggggtgacaagcaaggtctggctataattaggtgactctatgtcctggttttcccaggatagtctcagcttataccctctgtcctggtggaattgttaacagtgaccctttccattctcaaaaagtgtcccagtttggatgataaattacagagtcactatagctatagatgatgctatctcagaggctggatccagatgtggctaataggatctaagagtcaaaaaaagagagagatgactctatgcttggctgcaggttggtaaaaaggaggtaaatgcaaggggaaaaaatggcattagaaagagttggtggccaggcgcagtggttcacgcctgtaatcccaggcggaccactcgaggtcaggagtttgagacccgcctggccaatatggtgaaacccccatctctactaaaaatacaaaaactaggccaggtgcggtggctcacgcctgtaatctcagcacttggggaggccgaggcaggtggatcacctgagatcaggagtttgagaccagcctggccaacatggtgaaaccccatctctaccaaaatacaaaatttagccgggcgtggtggcgggcgcctgtaatcctagctcctcgggaggctgaggcatgagaatcgcttgaacccgggaggcagaggttgcagtgagccgagatcatgccgctgcactccagcctgggtgacagagtgagactttgtgtcaaacccgtccccccgcaaaaaaaaaaacacgaaaaaaaccccaaaattagccgggagtggtggcgggtgcctgtaatcccagctactcgagaggctgaggcaggataattgctggaacctgggaggcggagattacagtgagctgagatcaccccactgtgctgggtaacagagtgagactccgtgttaataaaaaagaaaaaaagaaggagttggtgattgtgaagaaagattagaaggacagagctggaggggtctgcataccagtgagtccaatccagataatcatttcacagatgaaggaacgagaaaaaggaatgttaggacaggaacgcaggcctcttggtgctcttgcctcactggactgagttgaatagtgtctgtccctcccacccaattcatgtacacccagaacctgtgaatgtgaccttacttataaatacagtctttgcagatgtaatcaatttaagacaaggtcatactggattaggatgggccctgaatccaatatgacaggtatctttataagaagagaggagttggacaggcacagagacacacagggagggtgccacatggcaacagagcaggggtcagagtgatgcgtctacaagccaaggatgggaccataagctgggaactggcagggggagggtcctccaggatagctttcagagagagcatggccctgctgacacctccatctcagactgctggcctccagacctaccgaccgacctacctacctacctacctaccttccttccttccttccttccttccttctttcnnnnnnnnnnnnnnnnnnnnnnnnnnnnnnnnnnnnnnnnnnnnnnnnnnnnnnnnnnnnnnnnnnnnnnnnnnnnnnnnnnnnnnnnnnnnnnnnnnnnnnnnnnnnnnnnnnnnnnnnnnnnnnnnnnnnnnnnnnnnnnnnnnnnnnnnnnnnnnnnnnnnnnnnnnnnnnnnnnnnnnnnnnnnnnnnnnnnnnnnnnnnnnnnnnnnnnnnnnnnnnnnnnnnnnnnnnnnnnnnnnnnnnnnnnnnnnnnnnnnnnnnnnnnnnnnnnnnnnnnnnnnnnnnnnnnnnnnnnnnnnnnnnnnnnnnnnnnnnnnnnnnnnnnnnnnnnnnnnnnnnnnnnnnnnnnnnnnnnnnnnnnnnnnnnnnnnnnnnnnnnnnnnnnnnnnnnnnnnnnnnnnnnnnnnnnnnnnnnnnnnnnnnnnnnnnnnnnnnnnnnnnnnnnnnnnnnnnnnnnnnnnnnnnnnnnnnnnnnnnnnnnnnnnnnnnnnnnnnnnnnnnnnnnnnnnnnnnnnnnnnnnnnnnnnnnnnnnnnnnnnnnnnnnnnnnnnnnnnnnnnnnnnnnnnnnnnnnnnnnnnnnnnnnnnnnnnnnnnnnnnnnnnnnnnnnnnnnnnnnnnnnnnnnnnnnnnnnnnnnnnnnnnnnnnnnnnnnnnnnnnnnnnnnnnnnnnnnnnnnnnnnnnnnnnnnnnnnnnnttagtagagatggggtttcaccatgttagtcaggctggtcttgaactcctgacctcgtgatccgcctacctcggcttcccaaagtgttgggattacaggcgtcagccaccgcgccaggccacatttctgttgttttaagtcacctagtttgtgtcattttgttagagcactcccaggacacaaatattttacgctttctgagctttaggtgcagcagaatattcaggtagagctgccgggaggcacatgaatacgtgggtgggactggaatgaggaggagctggggttggtaactggggtgtgggaataggagagatgaccaacgggaggacaggacagcagctgccaggacggggttgcagggagggaggaaggagagggagaaaaggcagagggccccaagaaagcgagcggaagtgaggaagggattccagaggaggcggaggctgagaggttcatgctgggaggagcagctgatgtggctggcacgcaaaaattcctgtagaaaactgcaagggttagaaactgccacgcaatggtggcaggcgcctgtaatcccagctgctcaggagggtgagacaggataatcacctgaatccttggggccgaggttgcagtgagccgagattgcgccactgcgcttcagcctggcgacagagtgagattctgtctaaaaaaaaaaaaaaagaaaggaaaagaaaagaaactgtcacgcaaagggttaaggactgagtgcatttttagcagagacagcagggagagtcctctcccgaggacttcaggatggaggagagacttagggtactagcttcaggtaaggagcagggaagagaggttctattaggtgatgggggcaccaattgtatttgtggaaacaggcgaggagagggaaaaatgcagatgtcagctcttgcggtggcccacccacgtcacgaggcatgatgattggtagagtcaagcagcagagtgggaggacgccagggcacaggcggctcctgggaggcagatcaacgcttctctctcaagttactgattacaccccagctctgacccttgccagtcaccactggttgtacaaggatgcctggtaaagtgaggcaaccctgtgttctcccatctgatgactctttcccatctcttctttatttgacttggggtttgagagggaggctagcttttgcctccatttattcgtccatctcatggggagactcatttctgtatgagtctcggatagatttagaaacacagcactgtcccagggaaagcaaggaatctggggctacaggacaagacctgtatgagggagggagggactgtgtgcccagagtcctttgaggccctcccaacatgtgcactccacttaaaattacccaggatggggatgagagtgcattataaaaaacaggccaggtgcagtagctcacacctgtaatccaaggactttgggaagctgaggcaggaggattgcttgagtccagaaggttgagatcagcctgggcaatatacagtgagaccttgtgtctacagaaaaatttaaaaattagccaggtgtggtgacaagtgcctgtagttccagctactcaggaggctgaggcaggaggattgcttgagcccaggagttcaaggctgcatgagcggtgatcataccactgcactccagccagggtcacagagcgagactctatctcaaaaacaaacaaacaaacaaacaaacaaacacacaaaccagaaaaacccacaaaacatcaaagatcaacaaagcctgaaagcacaccacactaccaggtgccctagttgacataatgctagctgcagttgctccgtggccaagagtcttctctctcacacaaagcagaggagtgctgggacccagggagacacccagcactggctaaattataagtagggtagtaatgtacctgtgtgttgcatggagcagatggatgtcagggctagagtaattcttatgaaaaaaagcaggatttgggagaaagcctgaacctcttccctctgcaaccctcattttctgtcctcttttctcccaactctccaaaattatatctaaacttcaccatgagcttccatggtgcagcatatataattgagatatatactcttccaaatatagagtttattttcctctatattttgttcaccatgtagtatgaatgaccaaagtctacagaggaggaagcttgccagaaacaggccagagcccctcagctagtgaacactggaagcagggcttgcacaggtctacacctccaagtcaggtgcttcttgccctgcacattctacagcttcctctttctaaatggagcttggcttccagttaggccagggctgcatgacgacatcttcagaactacaacgttcaggaactttacgaaagactccgatagaagcaacaagtcattctgagcttcctggcctgccccatgggagaggaccaaatgagctgccactcctctgctcctggttgccatgttcttgcctttcaaagagagagctgctcccttcctgatggcagtgtggcccaagcactgggttatgctgtctgggatgccaccctctcgcagcatgccttccctagaggtctgggagctggaccggctgctgccttgtgacatccgggatggcgccttcattactatgccctttcactgctatgcacaaaaccgtggggaggggtttaggcacagatccacactgccaaactggcttcccaagggactggctacctctgccatggcctcaaaggcaaggaatcagaaggccacctacaaagtcacggtgcggggatcgggaggctgccacttatcactgctgcaccccctcattccataaatacctctcagcatccatgaatctggtgaccaaacactgccatgctgttgcagtggggaacccactgcccgccccaactgttcctgcctcaagtgtctgtgaccttgctaggcagcagaaaacaccaaagaacaggaagggagcttcagctcatgttcactttccagatctttccaattcatctattgccagaatataattcatggctagacccttggctgcaagaaagtctgagaaatgtggctttacatgttctggccactgcagtccaaggaggagtgcaagatgctaagtgccaaaccaccatatctaccataggtggggagaaaaaaatattgaattctgttaaataatcaatattccaaagattttcaactgtttctaacatttatttaatgaaattaaacaaaaatcacgtctgtgaagattatgggcatattcacatttgctaagaattctcttaaccatcaaaaggcaacttctttccactggtatcaccattgcaaagttcagggggtttctcatccattaggaggtgtgtgtgtgtgtgtgtgtgtatatatatataaaatatatcttatacatatgtattatatataatataggtatacatataatatacatacatatataacaggtgtatatatgtacatagatgtatatatgtatacataggtgtatatatcatatatacataggtatatattaaatatgtgtaaaatatatagacgtgtatatatcttatatataaaatataaaatttatataaattataaaatatatataaaataaaatttatataaattataaaatatatataaaatataaaattttatataaaatataaaatataaaatatataaaaatatatataaatataaaaaatatataaatatatataaatataaaatctatataaaatatataatataaaatttatataaaatatatataacataaaatttatataaaacatacataaaatataaaatttatatatataaaatgtacatatttatacataaaatgtatatatattttatatatacacatggatatgaatgctgagaggctaagtaaaaaaatacatttatatatacacatatatctatatatatttatatacacaaatcaacatattttatatatgtacatatgtgtatattctatatcctatctatatatcttatacatatgcacatatctatattctatacatatatacttctatatatagatgtgtgtatgtatgtgtaaatatggtatatatttcctaaaaagaatggttttttatttttaaattacagaaataataaaagtattatttaaagtctgaaaaataaagtcaaagcagttgcctataagcctccatcactagcacagtaaccatgcgattcttttcctgagcacatttacatctttgtgaatgcaatggttatagaatttcgttttgtttttttcacctaacattacattataatcatcgtccatgtcgtgtaatgtaaattccacttgtaaaggctgcataatatttcactaatattatgcacacatcataatttccttagccattcccttctggttgaccatttaggttgtttccaatgatttactgctctaaggaatgctttgaagaagagcttcctgtgtatttgggtttttgttacattcccagaagtggggcagtgggttcttacagacttaatgcttaaagggcatccacttaaaaataaggatcaacagcttctgatcagtatttcttaaaaacgacctttgacaaaagtagagttttctctagccattacagagatggctaagtaaaaacacagagcctgtttttacttatcacatccttagcactcagcttgccagctactatctgcagctaccaaaactaggcaaacagtgctcttggtcctgacgcctctattgacctctacccatgctcacattactgtatctcaaatccctaagagctgcttgggatgctgatcacggtgagggcagagagtaggctcagcctcttcagggtcttccccaccctttcatatctcaggatccagctttcctgacgagaagccttgtctagataaggcagggaggccctggtgcctacaagttgatcagcccaagtcatcttaagccctggaacacgcaatttagacggacacttccagaggcagacaggtccctcccctactttctgatttctccctttttccccagactggagcaaaacaatattaaaacagcctgggttacactttattgaagaggccagcttaggacgactttaagaactaggtgaccacagtcttaagacaggcaggggcaaggctgtaagattttactctcagccagttcacactcctaactgtgagatcaggcctctacagaccttatgggcctatcaaacccaaagaaaatttcctggaggtgcctactcagaggggctccctcctggtcactccttatagccttgctcggtccagggcagggtgggttcggtctctcggtgagaacaagaggaacacatttagctctgcattatgtatttaggttgagagaaacaatttcgaatgaatgggggtctctccaacaaagcagtctagaacgggcccctgaggtttgaattcaggccttaggaatgccaaagctcactgagcgattctgtttgcaaacccacccgccacggggacggattttccccgagacactgtcacccatgcctccagctctgggcataccccactgcggcccctccccaatgacctcccctgcccctcgcggaccagcccatcctcaagatagtacaactttccgggccaccccacgtctcctctcgcccccgtccggttgcttggaaatgtgcacgggacggtgacgtcacacagggaggcgggtccccactgtcccgcacaccaatggcgcggcggccgccggcctcttggttcccggcgattggtgtctctggccgctgcgctccaccccagcccgccatggcgtcaggcgccgcggccccggggaggtggctcccactttaagaagtgaagttttgcgcccctccccctccctgcccacctcctgcagcctcctgcgccccgccgagctggcggatggagctgcgcagcgggagcgtgggcagccaggcggtggcgcggaggatggatggggacagccgagatggcggcggcggcaaggacgccaccgggtcggaggactacgagaacctgccgactagcgcctccgtgtccacccacatgacagcaggagcgatggccgggatcctggagcactcggtcatgtacccggtggactcggtgaaggtgaggcgcggggagacttcggggacgcaacgagcggagaaggagcgcgcgcgcgcatttgcatcccgcgcgccggcagcctcggggcagcgtcccgaaaccgagctctccccaggaccgcggctggccggggtcgccccaggagcagctgcgcgcagcctgggcgccgcgccttccgccgaccccgcgagggtgcccggtcctcgccccgcaccgcccgctgctccagccgcgtgcccggccccggctgctggcggcgctgaggcgggggaggcggagtggcgagcaccgctggcttcggcggcgactgggctcccgggggacgcgatcgctgaagctctgcacagtcttaccacgctggccgttcgggctggctggggccgcccacacgtgcgcggtttccgagggagctccccgcaggggaagccctcaccacgctggagctgagaaacgtgtggccctggcccggccgcgcgccctcgggacttggtgtgtggctgctgctccccgggttatttcgggaacttggggccggcaagtcttctctcgactagtggcagctctttaccggttcgacagcggcccgtgggatcccctttctgagggttcctgcacttcttcccccgactttgggtcgccgagccgccgggaggcaatgacgtttgccttctccttttgcttgcggggaggtgggtgggcttgtgccttacagcccttgctgtggattgtgtgagaggcactcagtttcctttaaaccctgtctgtcacttgccccggtagttttaactgcatttctgtaaagaggcagcgttactaggtgcgttttgcctggtagactgagacctgccctctgtcagcctgcccagaacaccccagggccaggatagagtagtgcaggaagtaatgccagtattgactgttacacgttgcacttttataggcataactcgcctaattcatgcaacagccctgggggttaacagatgaagaaactgaggcgcagagaggcgaaccgattaccttgcccaggctcctacaccacctcctatcctctggctgcagctgcagtgtgctttggaggattcggaggcctctctaggtggcaattattttgcaaggcaggtcccacagaggcacccccagcagctttatcttgttgctgatgctggtcctgcatgagcaggtatgaaggccagaaagtataactcagagggttttcccggctccggggagctcgcttggagccagcagtcagtgtctggacaggcagaagtccagtgaggaaagacatgggcttccaaggtgctgctggacctaagcctgagccatcacccatatgtccctccagtgtcccagtggggagttagaggaatggttctcatctccaggaaagacactggactgataccaggtggcatttgtatgggaaagaatccctcaaatgtaataaaattctccatgattgaagctgttgtctcaactgccctgggcagagtctggggaaagttaggagcagggaggtgttatctgagcaggccctagtcctactggtgtcttgagatgaatgttctattcgggaaccccacagtgagttcactttagagcatcattttagcttatttttaggattagaaataattagttgtgccttctgagcaccctttgacactctcaagaggcgtttctcacacgtttaaattgtgtgatctgtgtttagtttctccctgccccatacatgttgatatgttttggttcagatgtcacctgtatacttagtattactttccatagcagttttcacctgtggacaggttaacatggtgtgaatggtagaaggagccggtctggttttcctagacaagtctgtaaaacaaggcgtgggttagctaatcagtgaagtcttctaggttctgggattataactgacccttaggggcccttccatgctgaagtgtgcagggttggttttgaggctgccactgagtgccaaggtctgccaacatcagcacagttgtctgccaagcatgaggagtcaggggtgcatcctccatcatggaaaggcttgggggagaccacacctgtgttcctcttaagtattttggatgatggcgaagaccgggagtaactgagtcaagaaacccgggttgggcttcaagccctgctctcacttgcttcatgcctcgggcactgttctgtgccttagttttgtcactataaagtggggacagtggacctgctcagtccctctccacatttttaacccatgcctcgtttctctgaacacacaacacccatcgtcctcttttatgttacttgaaatatcaaaagaattattacagctgaaaacaaatctatgtaaatcggatcttgaaagagagaaagctttctccagttttgaaaggcgccatttttaactttgatcttgtaatgacaaataagaatgttgaatcggctggcttttttctatcctaggtaatgtggactgtggagctctgtgctggtcactttcaaccctgaacctgatgctacttattttgcagttctaagtgcaaagtcggcctggtggatgcttcccattataatattaaatttgcttcttcgtgaggtcacacctcacatccccagtgtcactttaataactagtgttttttacatggtgggccatgacccattagtggactctgcatttaaaaataaataaataaataaaagaagttattagtgagagtgtaaaaatacgggtgtgcctggcatgcagtgggagaaatgttgaaattctgtttgggttgtgtgtgtgtctctgagtgcattttacagacgtgtacaatgtacttctggctgggagttgtggtcaaacaaatatgaaaaccactgaacctgagaaaatatctctggagccccagcaggcaacactgagattatgaaatgggtatttggaagacctttggcaactttcctgctgcttcctgtgtcttcttctttcccttggtcctcccatggtgggatgtgagcactcattcatccataaagggccagtctactgggacctttggctgcccctgcgatgacagtgagcagcaaagtgatacccagggagggagtatagggtctctgcagggctctcaccaaatggtggcaatgacttactcctgtctaggcggggtctggtggcaggttttccatgagcctctttctggtgttccagagtggcaaggggcacttggggtggatacaagaacccctggtctgatcaggagagctcaagacttgaggagcatgccaggtgggtggaggaggaaattccaaccagattaggcacaccactcggagaccatgccgagtcccgcctggggaaagcaggggcagaaggaaacaggaaagatttgaagccgggggacttccgctgaccctttcacaacccttcttttgctttgctgttgggggaaaccctgcctgtgactctcctaggatgagccctccttcccaggttggtgcaccacggagcgttccctctaggagcctcctggctgaccttatggtgtgcacagccagcctgcccagctcagcagagcattacctcaacttctgacttctcctcttctgagttttctcctggctgcaggcagactggtaggaagggtgctggggggcagtgcaggcagctgccagagtcccctcccacccacttcattgctttccaaacaaagtgcagttcggtccatgccattcagcttcagaagggcgtgaaatcccaaattgctctagttcctgggacaaaactataatgatttttctctctcccttcttgtctcctctccctcacatccccctgctcccttcttttctctcctttgatgagaggtgattttcttaaaaggcgaatttggaacgaggaatcaaaaaaggggtatttgtgagctgcagtcctgttccttgtttcatgaacccccaggcagccatggcctgtacccctcaggcctaccctgaggagtgtgagaacctcatccacttttctctgccctaaattggggaggggcaggctggagcgtggtttggaggcgcgtgcccaagagtactgtgaacagcaaagggggcctcagctttttagtagggagaggtatttggggttgaatgggaggatttaatcagctgctttgcttaaactatacaggggtgtgcacctggggtgggggatgtgcgtgtcacctggaagggaggaatgtgcttcccaaaccttttcctggcttccacttgggcacgtttcagctgcatgtggccatctcattagagatgagttttgtcctgtcttgcagcagtgaccagtcttggggaatcagttccactttctctgttttttagtcttgggcttctgactctctctgacttcaggggtttccttcttctgactcatcggatgaactcacctgctggtgtggaagccttcagcatctttcttgaaccccagagctttttggctcttttcctgtctccactagtacggaaccttttcttgtcaaagaatttgtgtttttgtttttgtttttaatccgaaataccggctgtcatgtcccatccatgctggccacagacatacccctgtgatcatggtgttggctggaccatgccaggatgcatggctttgccactcccatgcccaccttgaatgttgtgtctgatgtttgtcataggaggggtatatccaatctctttctcttttttttctccctctctctctcttttttttgtttttttgagacagggtctcggtctgtcacccaggttggagagtagtggtgtgattgcagctcactgcagccttgacctcccagggcttgagtgatcctcccagctcagactcctgagtagctgggactacaggcacatgccaccatgcctggctaatttttttgtatttttttgtagagatgggggcctcaatttgttgcccagactggtcttgaactcctgggctcaagcgatcctcccaccttggccttccaaagtgctgggattacaggcatgaaccaccatgcccagcctctttctttttgttgaactggaaaccttccctaaagttccctcaaccttccctcaagttcctactgagatggatttcccacccttagagaactatcttggggttcaaattccagtctttgacttactggttgggcaggacacttagcttcttcatgtccttacttgtcaaatggggatcctgattttcttcctgctttctctttcctgacccagctttccattgcttctttcccacttctctcatttttccagtgggccttgtggaagttccttgttaacaagctcccttacatcttcccctctttaccgaatgtttctttcacttccccctcctgatggaaatccagctcctcttgctaagggttgggagcatggacccttgagtccaaatccctggaccgggtcccatttcccagttaggtgtgaccttgggcaagtttcttaacctttctgtgctatttccctatctgtaaaaagaagaagagatggtaccgatctcccagggtggttgtgaggagggttaagccctcgctgcacttcacatgcctggtacacgcacagaacagttgatactctctgatgtctgctctcatctttatcttcatcatcatcagcatgattgccatcactttctctcattccctgaggactctggcatctgatgcacagacttcacctccacagatcccgtcctcaccctgaggatggcccctcttcgtccccacccgactcaagtccaaatcactccattccttacacctctgagtcaatggccttcacctccatggtcccttgacctaactcagaatcttcctgagatcttaaatccagattattatagcctggaccccaagattgactgctgcagctgctggggcctttagtttctctgcctttggttcttccaaccctggcttgccccacctgggtcctggacagcccatctgtcccttgggcagcgaagcccttcaggggacattcacactgcctccaatgcgcatgctccctggcctcagctccacatgtctgggcagctgcttgcatccttcacgagggtcctgttgccccttagctccccaccctattgttgtcagcctcagcctggcatcttgcttccatgtcatagggaaaccaggacctcaatcaaacccatcttcctgtcactgtccttccaaactctcttgccttctacccccactataagggaacaggtgtcttcattcctttaaggtatatcaatgtggcagagaagggagatgtatacaaaccaccttgacaccaggatttgaatactggctgcacacctgggcacattacctaacctctctaagctcaggttccttctctgcaaagtggggatatgaatactgtattagtctgttttcaagctgctgataaagacatacctgagactgcgtaatttatacagaaagaggtttaatggacccacagttccacgtggctgggaaggcctcacaatcatggcagaaggcaaaaggcacatcttacatggtaacagacaagaaagaggacagaacccagtgaaaggggttttccccatataaaatcatcagatctcgtgagacttattcactaccatgagaacagtgtgggggaaactgcccccatgattcaattacctcccactgggtccctcccataacacgtgggaattatgggagccactattcaagatgagatttgagtggggacgcagccaaaccatatcaaataccaagagctattttatagggttgttgtaagaattaaatgaggcaacatatgtaaagttcttgccacagtgcgtggtgcgtacgttgtcaataaatggtgatggtgatgtcatttttgtcccctcactcttgagtgactcggttccaggatctttaggcttcctgctccattgagtttttctcaaaagtgtttctacagatccaagcccatcctgtcttaaataaaccccagacttctcaccttgacctcacatgcacccccaatatttcttcccataaacaaactgttgcccctttttttcctccttaaaacaacaaatgttctgaaagaactattgacactggtctctacttcctcactgccacccctgcttcctggcttttgcactgcccagccgcagcctcacagagacttctggctacccatcatcttcctggcccaccctgctgcctctgttcctgccaggggcacctccgagagggggttggccctgcgatcctcagttttcctctttgggcatggcttctcctcaggaatgtgcccttccacctcattttccccagcacacatgcctcagtttcctcctgggacctgatggctcccagatcactatcttgggcccagactttctggagctgaatctccagttgcctcggagcctcctcagactcagtgtggccagaatggtggtcctggcttcccctcgggcctgcccttctgcctccttctgcaccctgggatggtcatcagcttttctcccactgctgccctgtatgcagggaaggcctgcctgtggctgtatctgtagtacttcttgaatgtgtttccttctctccctccccacagctacttactgccttggttcagggacctggatgtctcctcttccttgagatcccagactgcccaagttaaaagtgagtttaggccgagctcagtggctcacgcctgtaatcccaataccttgagaggccgaggtgggaggatcacttgaggccaggagttggagaccagcctgggcaacatagcgagaccccataggtacaaaaaataaaaacattagcttggtatagtggtatgcgccagtggtctcagcttcttgggaggctgaggtgggggaattgcttgagcctgggaggtcgaggctgtagtgagctatgattggaccaccgcactccagcctgggcaacagagcaagaccctgtctcaaaaaaaaaaaaaaaaaaaatgagattactctcccctgcctcacatttccctattgcccattgctgctttgtttttctccccagcagttgttacttcgtaacacacaccatcgtttatttatattgtttacatattttacttatatttatagtattatttgtattgtttatggtctctcttccctcatcagaatgtaggctccaagtgggcagggatgtatgctcttctgttcaccactgtattcccattgccagaaacacagtaggtgctcagtaagtatttgatggaggagcttctgcagttcattctgcacgtcagccatggctggtcctgctcttcagcctccaagcccagcagcttcctggtgggctgcagttttctcatcggaaatagagaagagtagcagtgccgattctgcctcccttgcaggtcgttttagtgcatctagttggaaaatacaggcaggtttgcagggaacacagttttcaaagtgtaaagctcagtgcaggtgctaggtcatggtgttttttgtcacactgggatcctgcgggagaggtaagtttagctgattggagtggaagatccagcccattcttcgtggtgcctgccgcagagcctgcaagcctgcagaaagacagggagtagccacgtctttctgtagttcacacctgtgtgtctccccacctgataatccctcagcacttctgtttgccttgcatgtaaagcccgacctttgcatggcaggcacacagactgaaactctttcctcctccagcctttcttggactcatccacagaatgacaaagaagtattctgtgaatattggttgaatgaaggaaggcacggctttttaaaaaagatgaaaaaaaaaaaagttatgaaaagctttaaaacttgctattggctgggcgtggtggctcacacctataatcccagcactttgggaggccgaggcgggcagatcacctgaggtcaggagtttgagaccagcctggccaacatggcaaaaccccgtctctactaaaaatacaaaaattagctgggcgtggtggtgggtgcctgtaatcccagctacttgggaggctgaggaaggagaatcacttgaacctgggaggcggaggttgcagtgagccgagatcgcgccattgcactccagcccggacaacagagcgagacttcatctcaaaaaaaaaaaaaaaaaaaaaaaaaaccagaaaaaaaaacttgccattaaacaaattccagttttgatttttgttttgcattggttttgaatccatgcatgttatggccacaaagaaaactttcttggctccgttgtttgtcgtgtgtgtgtgtgtgtgtgtgtgtttgtgtgtgtgtgtagaacccagcaagcagcagctataccccgatgaggcaatgtcttcatttggccactcatgtcattccacgtttcctgagtgccctcttggctaggcactgtgctagacactgggctacaaaaataagaatgcctggtccccgttctcaaagtaagcgtgcttcctataattagaccctgagctaaggcgacagaaccagctccctttcaagacaagagtcgcctgtcttgacggactttcagatgggctggaagaacaaggtctggcgtgtatggactctgaactgctcaagctgctgccgtcttgcaggtctagagcctacagggtagcgtcattctagtttctttgctgggcactctggaatttgttctttctcctgcgagagacagtggtcctcagttgtgttccctccccaccatcctcaccctccctcccacggtggttagtcattctggaggctcaagttggctcacagaaggtgctcttgaaaacatcccccaccctcctcgtaaccccagacagtcaggaagggccgttgtcgggtactaagaggtgttatggtttcacattcatgctttctctctgaagagaaaacaaaacatgttgaaatagggagaaatcccagcagcagcttgcttgaagcaagggttgcataacaggtctaggaaacgtctggccgtgtgggtcaagttgagggactgcagccttgtgtcactgagggaacttcttccgggtccaccgagcctctggatccattagatccatccagagagccacttggaaggctctgggaccttgagttctggctggccacgtggtctgtgatggctgtcactggtgaaagagagaccctggctgatatttagccaacagtgtttattccctggcatgaccagaaagggtgcatttgagacactgctgtgggtgggggacccggaggagtgtttgtgtgtcagacttatgctggtgttgaggccctagaaaggtcaccaaactggggcggggtgtgggccccgtgaatttaagtcctggtcctgccattaaccagcttggaaaccttgggctaatcatttctctgggctagttttctccttgtgaatctagactagtgtcatctactttacctttttgacagggctgttgggaagcttaggtgagatagatttgtgaatggctcttgcaaaccttaacatgcaaagctaatgacagattgtatcagaggcaatgtgcttgattattagagctgtttaggttaacagcacaacctctgcagccagactgcctggagtggcacctggtcaagttcctgaaacctctctttgccttatttttctcatctataaaatggggctaataactttacccatttcagtgttgctgtgagaattaattgagatgatacacctagaatgttaaggcacatggcaaatgccccattaatatcagctcctcttgttatttctaaaagtattacttcaatgcctgggtatgtttatatattgctggtgcaattgttaattttatattatttttgtattgttagcttttatttggtcatttgatcctcttagctctcctttgaaggtgagaaaaggcaggtgttgtttctcatttcatatttgagaaaactgaacttcagaaaaattacatgccctagaactcgggcctttttctgctccagagctgaaagcgagagaagagaggaagggaattaggctggagcaagccagtaggatgttggatgcagactcagatgttaatggcagcagagcccttgagctggattctagaatatgagaaagggctgagattgatgatggggcccagctgcattgttgggacggaggaaccagagttgagtcgagggagtaactccaggaaatcatggcacccagaaagtgtggcacagaatgcagggctctaacgtctagttaggagttctttgggcaagtactccagcaagcaaggaagaaggatgatgacatatggttattgccacaggatatttttggctgcgtctggcttctctctctgaaacaaattgcagttgctgtgacaccttctcatttcagcagtgagtcgaagttgcactcaatatagtgttttgaattcggactagtcgtgaagattcctttccagatcatagtatatgtatataagtcacttactgggaagagcactacatcatagttccgtggtccactaaggctgcagttttcttatctgaaataaggaggggtaacggtgcccatcctgcctcccctggcaggtccgcttacgcatgtagtgagaaaatacaggcaggcttgcagggaacaccgctttaaaagtataaagctctctgtgcaggtgctaggtcatggtatttattatcacactgggatcctgtgggaggggtaaggttagctcattggaatggaaaatccaggctctcattccagcactaggactcagtgcagctgcctggccttgggcacttaacctctctccttacagtgtctcccatctgttgagccaagacagggtggctgtctgctgccgcccatttggctggctaatgaggaagagccagtgctgctcacagcatgctcatttcgtggtaatgtagacaggggatagtagtggctgcgtgtagcagaaaccagcagggtaggaccggatgagcccaccttcagggaggtgtacccagggctgttagtttgaggacgtctgtgggattttatatccttactcttattttccaagaaagtctgtccctttgagcaccaggcagatgagtctggggacgctgtgaggaggggtcccccaggagcaggaaggtgactaatgatcccggaagaatgactgtgtgtgtttgcagacgcctgggctcttccccagtttggcctttcccgtcactgttttcctcacttgcttaagaggagaaggaggtaacgcacacaagtgcctttgtctcagggtccccacggtgcccatcttgagggttttgcgggcgccttgcattgcctaaggcctggctttagaagcagaacatggagagagaggtttgcagcctgcaggaagctggccagccagacctgccgggcagcgggacccgcgggcagtgcctctgactcacggcacgtccttgatgcgcagtgctcccctccccactttctctgccctcctgtggatcacgggtgtcctagggctgttgggagcctggattaaagttgctgagtggccggctgatgatcagatccagggagtcagaccagaggtggggacatcttttcaaaggcaagaagatgctgccagtgcgtgtatatacatatgagggtggaaggggtaaacccagggtgtgtctttaactgaagaatcaagaaagctgctttccttagtcacccgcctctgtggttcgtttgctaaacgttggcttgcgttagcctgattcacagtaatgtggctccctaggaagattcacgtggtatttgtgaaaatgtagcttcatcccctgcccttcattgaatgactgaattacagtcagcaccacataacgatgtttcggtcaactatggactccatatgtgacgagacagtgatcccatagattatagtggagctgaaaaattcctattacctaggggcatcacaacgcattgcatttcgcccgtgtttgggatgatgctggtgtaaacctactatgctgccagtcatgtagaagtatagcacacacaattagtaggtaatgcttgcaaataataatgaaagactctgctactggtttatgtatttactatgctatactttttgtcattactttagagtgtactcctacttttttttttttttttttgagatggagtttcactcttgtcctgtaagctggagcgaagtggcgcgatctcggctcactgcaacctccacctcctgggttcaagcgattctcctgcctcagcttcccagagtagctgagattacaggcatgcaccgccacgcacggctaattttgtatttttagtagagacagggtttcaccatgttggccaggctggtcaccaactcctgacctcaggtgacccgccctccttagcctcccagagtgttgggattacaggtgtgagccaccgcccctggcctttttttttttttttttttaagttaattgtaaaagagcctcaggcaggtccttcaggagggattccagaagaaggcattgcgatcacaggaggtgccagctgcattgggacaagatgtggaggtggaagacagtgatattgatgatcctgaccctctgtaagcctaggctaatgtgtatgtttaagaaaaaagtttaaaaagtaaaaaaataaaaaatgttaaaaggaaaagcttatagaataaggatatagagaaaaaatattttttgtagagctgtacaatgtgttttgtgttttaagccaagtgttattacaagagtcaaaaagtcaaaaaattgaaatttataaaacaaaaacattacagtaagctaaatgtaactaattaattttatttatttttttttttagagacagggtcttgccttgtcgcctaggctggagtgcagtgttgagatcatagtttactgcagcctcgaactcctgggtacaaggaatcctccctcctcagcctcctgagtagctgggattacaggtgcgcaccaccacacagctaatttttaaattggtgtagtgaaggagtttcgcaatgttggccaggtggtctcaagctcttggcctcaagcagtcctcctgcctcgacctcccaaagtgctaggattacaggtatgagtcaccacgcccaaccttgaaatttaatttattatggaagaaagcaaaagtttaaaaaataaatttagtgtagcctaagtgtacagtgtttttaaagtctatggtagtgcacaggaatgtcccaggccttcacatttactcaccaccactcactcaaactcacccagagcaacttccagttctgcaagctccattcgtggtaaatgccctacacaggtgtaccattaaaaaaaatcttttggctggttgtgatggctcatgcctgtaatcccatctcctggcttcatgccattgtccttccccagcttcccgagttgctgggactacaggcgcctgccaccacgcccagctaaattttgtatttttagtagagatggggtttcgctgtgttagccagtatggtctcgatctcctgaccttgttgtgatctgcttgcctcggcctcccaagatgctgggattacaggcgtgagccactacgcccagcaaaaaacaaacttttatgtggtattttcactgtactttttttttgttgttgagacggagtttcacttttgttgcccaggctggaatgcagtggcagaatctcggctcaccgcaacctctgcctaccgggttcaagcaattctcctgcctcagcctcccgagtagatgggattacaggtgtgtgccaccacgcctggctaattttgtatttttagtagagatggggtttcaccatgttggccaggctggtcttgaactcccaacctcaagtgatccacctgccctagcctcccaaagtgctgggattacagttgtgagtcaccgcgcccagccttcactgtacttttggtatatttagattcatttagataacaaataccatggtattccagttgcctgcagtattcagtacagtagcatgctgtacaggtttgtagcctaggagcaacacactatagcgtacagcctaggtgtgcggtagctatcccctctcaatttgtgtaagtacactctgtgatgttcacagaaggatgaagtcacctaacaatgcatatctcagaacatatccccgtcatttgcgatgcgtgactgtaattaaggaatggggcctatggggtatgactgtgggtgctgggcactaaggagacggaggcttgacacaacccaggcattccccatgggagcccctgtgtggcaggaaggacagatctccaatgaatcattcctttcaagagtgatgagctcagtcttcagggatcctgcacctcacggggaggagttgggaaaggccccccgaggaaggaatatctcagtatctctatctagacctgaaggagatgtggatgttacaactaaactgtatgattctctgtgtccctgagaacatcacagcctatttccaaggtgcctggccatccccagggtgcctgcatgccactgacactctaatctggggttctgctctgagctgagaaagtgtctgtggtttggggtcatcaggtggcagctcttctcctctctgttctgaaatcttaattccctgtttgactgcctggtggctttcagagaagcccagcctcctcccaggtgggaactttcactgtcgaactaaggacccgaggagggtggaaacaggaggaagggaggctaagcggtcacatcagaggcatttctgctcatcgttggctcataataggtggcagtaggggctggtggagcagtggccaggtaagttgctaaaaataaaacatgctcatgtgacgtgtgcaggtttagggtttgcctgagtgagctttcctggtccaggtcacaacttgtagggcaaagagagacttgaggatggtgtaggcgacaactgtgccttccaaaggtcagagatggacctgggatcttgtagtaccagggcctgctctggaggctcagattcgtgtgtcacttcttgtctcttttgaaaggtaactggagagctggacactttcctgtcctctctctttccttgtagccttcctctctcagagatggcctgctatcaaatgccaggggcacagtcagctgggcttggtaaagggcctgagatgagagcttggggactttcccactggagtccatgatagtccagggtgtagacagaagctcttggatctcacagctttggaaaccgagtcctgtttctccaacaggccagtgcggtgacgggcacagacctgctgtcctctctatttgtgtgtccactgattccctggcacagggggtctttgttacaaaatctctttgctgggtgctttgaaggagcacgtgtgtgggcctttttcagggtggttagacaatgccaagctgtcactcagaagaaatggtcaggatagaagcatagaaaatgccctgtggaaatgtagatgagtgttctggctcacacctgtaatcccagctactcaggaggctgaggcagggggattgctggcggacagcagttcgagaccagccttggcaacggagcaagaccctaactctaaaaataaaaataaaaaaataggccgggcgcagtggctcacgcctgtaattccagcactttgtgaggccaagacgggtggatcacgaggtcagaagtttgagaccagcctggccaacatggtgaaaccccgtctcaactaaaaatacaaaaattagctgggtgtggtagcagatgcctataatctcagctacttgagaggctgaggcgggagaatcacttgaacccgggaggcagaggttgcattgaactgagatcatgccattgcactccaggccgggcaacaagagcaagactctgtctcaagaaaaaaaaaaaaattggttttgtgtggtggtgcacacctgtagtcccagctactcaggaggctgaggtgggaagattgcttgagcccaggagtttgaggttgcagtgagccgtgatcatgctactgcactctagcctgggtgacagagcaagatcctgtctctaaaaatattaaaatgaataaataaaagaacagaaaatgacctgtgtggggagaagggttatctgtgaaaggagttagaaacctcaagtgtacataagtaagactggagatctctctgttaatgaaattgtgcttaaaaatttttttttcttgaaccttggcttctcaggcaataactgaattttaaggtgtgtgtgtatatatatatataggtatatatatatataggtgtatatatatatatatatatatagtgtatatatatatatatatatatatatagtgtatatatatatagtgtatgtgtgtgtgtgtgtgtgtatatatatatatatttgggccaggaagggtgaagtgttaaattgccttacttagaaaattaaggtagatttgtatttagcccttagagcttcaaaaatatcagctcagaaatgacttttaattgtgcaggtgataaaatcacaagaaaaaaattcatctacaagttggaatgactcttagctacttatttgtttttaaatttttttttcaaattttggaaggaagtagagaaggagttagaactgtaatttgctattatgggggttggggtgcagtgcgtattagtacaatgttaggtggtggcaggttccgtttatccttggaattagcactgctccccccacaggcttctgggagttgggagcaggctggttggtgacgctttgcctggccttggataagaactcttgttttcaaattcccttgaggtctcttccaagaatcttttgcattttttctgataaatcaatcataaggaagtttctgaaattctctttcagaccctacaacccacaagttactgcaaagctgggcttctaccagaagtgagtgatttgaaattgaaaacagatttcggatctcacctgagtagctcgagtgtaagggagggactgggagagccacagagaacatttgtcaatccagaaccaaccattcatggtgttgcttgactggagggcagggaaggaaaggactagaagcaaggcgaaagcagatctttctgtagatacacacatataagtcttggatttgcattttagggtgaattgtaattagcttgagatgaccaggggcccaccaatcaagcaactctgggaaaaacacttgtctacatcttaagtttctttgtctataaaatgtcaagattgaactaacactacatgattctctcgggaactcaccagttctaaaatttccactccttcttttcacagggcagtgtaactttaactccctgtttcaactttgggtgtaaaatacaggctcacaagcacttttgctttgcagcggaagctaggaagaccctgctgtggaattttgcagaggggctgagcagtggtgggaaggaccagcggcccatgtaccatgttgggcccctgcattccaaggtgtctgcctagaaataaatgatagtttatttaacatacttgtaacttccaacgacaacacttcaagactgcaaatcatccatccgggcaattacagaaatgctgaacggccacagccccgccctggaatcaagggaagaagtgtggcagatgcttctggaaggctctgtttacagctctctgactccttcctgccagaacctttcacaagttcactaccaggaagctgagtcatccaggggtcagccggcatggccaaggtcaccccgcactgccagcagcacagatggggttagcccatcattccagaggagcatccgtgggaatgatggggttggggagctggggagcctccctgcagcatctccctgccatggtgttttgcatttcctgtagatttcgcagtgagaaacggtctcctcttatattcacttcatttcttctctctttctttctttcttttttttgagatggagtctgtctctgtcaccaggctggactgcagtggcgcgatctcggttcactgcaacctctgcctcccgggttcaagcgattctcctgcttcagcctcctgagtagctgggactacaggcatgtgccaccacgcccagctaattttttgtattctcagtagagatgggatttcaccatgttggtcaggatggtctcaatctcctgaccttgtgatccacccgccttggcctcccaaagtgctgggattacaggcgtgagccaccacgtccgggctttttttttttttttttttagacttgttgcccccccaggatggagtgcagtggcgcaatgtcggctcactgtaacctccacctcctgggttcaagcgatgctactgcctcagcctcccaagtagctgggattacaggcatacaccaccacacccggctgattttatagttttagtagacactgggtttctccatgttggtcaggctggtctcaaattcccgacctcaggtgatctgctcacctcagcctcctaaagtgctgggattacaggcatgagtcactgcgcctggccaaaggcaagagatgaggaccatatagatggaaacacagcattaagggtaaaacactctctctctgctctgtctggtgttcagggcccagcatgggctgtatgtcctacacttcgtttcaggctcatcttcaggtgacaccagccttctcggagcctctgtccacatcccacctgtcactacctctgccctaacttcaccttcagtggtcactgccaggacccctccccaaatctaaatgaggtccccctgcatttgccctcattgcaccttctacttttgcttcatggcatttagagtttggaattttttatcgataggatttttagtactctctctctcctctactagactataaactccttgaaggcaaagacgacacctgctccctcagttccagcagcccctaacactgcgctgacatttaggtagtagcagcgttttcttgcagaacgatcctgtagttttaccagctgagacttctgtggtctggggagtcactcatctctggtccctgcctcctcctctcacttttggaaacccttctggccagacggctttggtttaaattgtatgccggagctcttggttccagggagagggttttagcgtaaaaatctcactcatgatggaaggttcctgctattaccttttgcatccaatacaacttaaattgactcctccaaaagcttcggaagtaatttgtacctattgtctagcataaattcagcaagtgggtcccggaggctgaaagtcgagtcttgcggttgtttcctctggtgtttctccctgagacccttagaacggcaagcctggtgcatctggtgtcctgtcatctttctctgtgattgtcatcagtgtgaaaggtgaaaggtgtgtggagaaagaacatcccttcgagctgtggcttagagctgtgacttggcaccacgtggttagtcactatcaagttagaagcctttgtgggaaatctggctttggtaggatctgggaaatttggacccctcatttgccccctggcatctctaaattccagagcccagctttgatggggcttacatccccagctgttaacctgtggggtgggccccagactgtggccaggtgcattgcgctaggggagacagatccacagcaggcagaatttgaggaggacttaaaatacctgctttgggaggccaaggcgggcagatcccctgaggtcgggagtttgagaccagcctgaccaacatggagaaaccctgtctctactaaaaatacaaaattagttgggtgcggtggcacatgcctgtaatcccagctacttgggaggctgaggcaggagaatcgcttgaacccgggaggcggaggttgtggtgagccgagatcaagccactgcactccagcctgggcaacaagagcgaaattccgtttcaaaaaaaaaaaaaaaaaaaacacaaaaaaacaaaaacccgctttgttacctgcctgtgggtggaattgagttcatctctgaatccgtggtagtcatttattgagcacgtgttttagtgagcatggcatggcgctggctccgagatcacagtgctgccgccctccttcacgtttctctgacctttcatgggagtcacatgcagacgcatcacttggtataattatacgtggaggaatgagcaagaggaggctggcgacgggactgctttaaaaatcccttcttctgtggataataggctaatagcggggtgtgctttagaaggtgtggcctccgccaagggcatgggaactgcatttgtagaagctgggaggaccacacctggcttgggagacggcatgggtttctgaggtgcctggctccctggcctgtccagtgtggacagcttacgcgcagctaggtgaaatgattgtgcagttgctgagggattgggtggcagagctggacagaatttaggtcttctaacttggaacagggctgtgtccatcttacctaggtgtacagtttggggagcactgctgtttggtctagtgagacacacttggtgtaaatatctgtgccctgtagtacccagattccaagggaccagagagcatgcccgcacccacgggctggcgggagcccaggtcctccagggctgctgtggagcatgggcttcttggtgcccagtcctatagctgaacttgggcggcctctggctgttgcccccagggctggtctccctatagttcagaggcgagccagctctcagcagcagggagggccttttccatagtatgaacttggccacaccagaccagtcagcagtgtcgggaatcttggccctcaaggtccctgcctagccctggcctggacttcagcactggtcaaaggtccccagagctgcccttggctctgagcaggtgagtgaacttcccagagcacttttgtctgggcctctgtgccagtgtaaactgataatagtgatttccctgccccacctctctgccagctatctaagttttctttgttacataatcaggattaatttaagcagcctaggccatccatttagaaatggttagtgaagaaaggtgaatggggaggggtcagagtcccttagggggccaccaggtgcgagtccccttgctctttggggccttggtttcccttctgtgagttggggcagctgaagggaagggctgctcaggtggtcctgccacatcccagtgttgtgtctagtgagtacaggtgagagtgctcccaaccagggcagatcctgctgctaggcagtgagtcaggaaggaattggtaaaaatgacgtcattgctaagaatgacgtcttttttgctgtttatccaaaggaaaaaaaaaaaagcagaaataaaagcagcaggcagctgtccaccagaccccatgcaaagggcttttccttgaatcctcacagagactttaggcagtaggtgccattaggagccccacttacagataagaaaacgggggcagagaactgaagtgagtcgcccaaggacacacattgaggaggaagcaacagagctaggatttagatacagaggggtctccaagcctgtccttccagctttgaggtcctgggcctatatattccatcagaaactgaaaggtgtgttggggggtacctagggtcaggatggggttttatttctgtcccttccttgtgatgctgcagggactgtgacctggagttcccaacaccagtgccctgtggctggtagcctcctcctgggactccaggatctattgtttgatttagccattttcttctgtagtccgatgggagggattcaattcaaacctgcaatactgttctttgggccatacaggccatttatcagcaagtagagaaaaacacccacaccttctagcaagattaagctagttctgtggttcttaatgataatttaagccattttgattaacctaggtggtggttttctccctaccaggtagggaatatactggagcctttctaaaaatagttccggtgaagataaacatttattgagtacctactgtactccactaggtgaatacaaggatttctcgttcatctcaggaagcatggttaggggattttacagacgagggaactgaagttcagggaagttaagttacttatccaagttcatatagctgaaaaatagaataggatttcgaccttgtggtaggtggaaaccggggttgtctttgtgctctcaggcatgtggctggcgtggggtagaagctctctatataatggttgagtgactggatgagcttcaaagctggtccctctggcttttcctgctaccccaggccacgtgcccagaaggaacgctgtcttacctgggaggtctttattgactgtttgacgcccttcccatcctatcccaaccccttccccatggcacctagtttccccaaccagaacgtacgttacttatgggcagagacggtctttgagcattgggtgggtggttgaacgcagtttctttgagattctgtgattgggattttcagcaaaatatggtagcaagttggtcagaggggcgagtctggcagtgggggagcccgggcaagtctaactgtttgctcactggcagaacaaagttggggaggttggaggggtaggggaactgaaagcaaaagaaagctcacagggagccccatcgtgcaaaaccgatgatggcagagctgccgggctgcagcgtggagcggggcgggagccttgtgtggagtctgtgaacatactctaggtgcctggatactcctcttatctccccacacatgggttgatgtgcatgtacggtgctttgatgtggactcttgtgttaaatttgttcttctgcgcagctttgtgacgcttcagtgagtgtgtctatatacaaaaggaaaacagttttggctgggtgcagtggctcacgcctgtaatcccagcactttgggaggccgaggtgggtggatcacctgaggtcaggagtttgagaccagcctggacaacatggtgaaacccagtctctaccaaaaaacacaaaaattagccatgtgtggtagcatgcgcctgtaatcccagctactcaggaggctgaggcaggagatggcttgaacccgggggctggaagttgcagtgagccaagttcacgccattgcactccagtctgggcaacagagtgagactccgtctcaaaaaagaaaaaaacaaaaaacaaaaaaaaaaccaacaattttgaggatgaggcatttcttccttacttatgagtgggatgtttatgggccggtgacattgacaaggctggcagagtcaaggggaggccctgggtagtctagcttactagcagtgaattcagttctctcttgaaagcaccgtgactgttggaatatttcagccttagcctttgaatactgacggagtgccaggctttcgtctgtcaagatgcccctctgtgacctcagctggttaatgtctcaagcgcttctttaggagacagaatgggttggtattgaaccaaccactattgcccagtcttgtgatgaccagggttgtggaacagataagttgtgtgacctccacgggtcagggctgttgactttgcctgtaagttacactcttgcagctgggcatagacacagtcctcaggggttttgtggacattaacaagtaaggatttaggtgactctgacatagggtcttccccaaggtcaggcacagaggaggtggcatccatgggacttagcatgttgtagaaacagagcatattgggacaaaagggaagttgaagatcacctgggatcctttagcgtccatccctttgtgagagataggatagcctagttgttaacagcatgactctggccgaccgcctggcttctttctagtcttccttctgtactttgtgaccttgaggcaagtcatttggtctctgtgcctcagtttcccaatttgtggaatggggataactggttgctaatattgctgtttttattgttataattattttgtaaatagaagggttgaagtttcagggaagcgagttgattgacctgaggccatacaatgtatcagtgccagatgcaggatgagaaagaactgtgactcaggccctgtccctcttaccagggcagggcagggcagggaagctgggcaggagagactggcagctcagttccctctccagtccagggtagtcccttccctttctgtctcgcagtgaggtcaccagttgcactcatgaaatcttagtcctgttatctggcatctttggaatttgccccacctgtagggcagagataacttaatcctttttggtgggccacatatgggatattctgggtgtgttctgggtacactgggcatgggccaggcacagacccttccatccattggaggcttttctagagaaggggtggagaccagattgggttcctagggtcgggggatgtgggaatggcaccctctgaactacaggcaaggctgggagctgctgccagtgggcggagagggaaatctaactggtatgtgatgttagtggtggcctggcaagcagctgtagctttggagagagcgaccagcctgtccaggggcctggtagggaaggcttctgttgcacggcctgttgctttctctcagatactggagagcccatctgtcttgcttactgcatggcttttcatagctcccatcatattgctgttgggtgcgattcatagccatggaagacacctgatcataaagtaaattccacacactccagcaaggtattcagggccttgcatggtctagccccaccctacctttcttccagcaaacaataattgatcatctaaggtggcagcttctctcctaagtctgaggctgcttctctaccctcacctgactgctgtcttctctgcacaccagaccttccggccacaggtcctcattccccagatgcaccagcatgttcacatcctcctgcagcgggaattgttttcttcctctccatgccaaatttgtctttttctttcccagtcaaagtaacatatgtacatagtcacaaaatgaaatagtgtagaagagattgtagtgacagctctaattcttacagcttgacatactcttcctttttctaggtggctgttcaaatggcttccttccagccaccttctccaggttggatgtgatctggactctggatctctaccctatagcacatcctgctgtgacctattccaaggagaaggggggtttggtgctggggcttctctcctaggaggctgaggaacttggttattgctatcttagcagaattgttattttctaccaaatgtgcaatgaaaactcttcactgagtcttttgcccctagcaatagcagtgcttcctgaagccccagtagaccctgaaggtttcaggactgtgtctggagagcatcagtgacaggtggcaggaatcctctgtggtccacttcagaggcggcagatgaccaggaggtcagactgtggctggtcttttcagaaggacaaacgtgacccttctgaaaactgggaccattcggggacattggtggaaagacagaggagcctttatggtttgttctcacacatatgaatccactttctcccccctccaacatcagggtgacctgaacgctgaaggaagtctaggccttcctgtaggtgaggcagggaaagccacgtagacctgatttagttgaagtgttttccaccaggtctcaactcttcattttgtcttggtatagcttttctggctgactttctagcaagctggttgggctctttgcttgttccaaaatggtagttttcaccagagacttttcagatgagcaggaagcttttttcagaatgtatgttcttctaactctgcttgagtcccccgccatgtattctgataggcatttgttttcccaccccatcccccacttttttgaagtgggggcaatgactacttttaggggaatcatttttctgttgctggtttcaaaacattaagagcaccaattttttttttttttttgcaacagagtctttctcaggctgaagtgcggtgacatgatcatagctcactgcagcctcagtctcctgggctcaagtgatcctctcaccttagcctcccaagtagctaagaccactggcacccaccatgcctggctaatttttttaaaaaattactttctgaagagatggggtcttgctatgttgtccagactgggcttgaattcctggcagcaagtgatccacctgccttggccttccaaagtgctgggattacaggtgtgagccactgcacccagctcaaattttccttttcattaaaaacatacatatatgtatatgtatgtatatacatatgtatatatgcatgtgtatatatatgtgtgtatatgtatatatgtgtgtatatatgtgtgtgtgtgtatgtatatgtattatatgtatattctctttgtgtatttatttttgccagtttgggagatgttagaaaaagacatgatttggaaacttcaacttagggataaagttagttatactctgagagctgcagttaaaggattatttgtgctgctctgctcttgcctgcgacgtgtgggaatgatgctgagtgatgtcctcctgcttattttgcatgatttttttttgagacagattctcgctctgtcacccaggctggagtgcaatggtgcgatcttggctcactgcaacctccacctcctgagttcgagcgactctcctgcctcagcctcctgagtagctgggattacaggcgtgtgccactacacctggctaatttttatatttttagtagagatgggattttgccatgttggccaggctggtctcgaacccctgacctcaggtaatctgcccgcctcggcctcccaaagtgctgggattacaggtgtgagccgccacacttggccaattttgcatgatttttacatggcttttcaaagggccagggtgggactatccaaagccctgttaagagtccctcttctgtcaaggagcctaggaagggagcaggtttgagtgaggaaggctggtggttttggacggggaacgggtggttttggacggggagtgccaacggtttttgtgtgcgtggtgctccttgatgtggtctgggtttctgcatttgtagtgtgtgccttctaaggatgctggaaggtgagacagggctttccaaggcctagatggggtttgtggctttacttaggaagacagtcctttccataaagcgtggtgccaaatgcttttcctcctgggcctcctgctgtgatttgtggcgtggagtttcagtgagggagggctctgcaggaaccagctccttggtctgatcctttctggacaattgtggatgggagttggcttcttggtgtcttgagagtgtcctcagcagaccccagtgaagcaggagcatagagctctggatgggctcatggtggacatgggagagctgctggccagggggctgcagggtgaggcttggaaaacagggagggggctgggcttggccccgcattttactgtggtttatttagtgaatgtcagtgctagctggggacagttgacagacaagagaaaacactggtttgattttgaattctgaagcagacattgggcagcagaggctaacatttggcatttatcctaaactttcgaggtgcccgagccttatttcctttctctgggagaaagtctggaacagagacggtgcggagcagcctctagggctcagccctgggcccccctggagttgtgctgctcatggtatcacagtgcttgtttgtttcctgtttgtatccccattgcacctggctcaaggtaggtgtaaggcaaatgctttagaatgagccagtgagtagatttcacatgatcgtctcctcagtcctagaaatgccacgtgaacttcgaacatggaaagttttttatttttgagagattggagaggtgggagttacaggctgtctccaggtcaggcagggagtcagtggctgagtttctgatgctacagatggctggcttgggtggcatgacctctgcaggacccctagaagggcctgaggcccactaccaggctcagcttgcccccttctcttttcttttttggtcctaggcctggatcagaggctccttacccacaggatcttggacaagtcattttccttcttgggcctcagtttcccatctgaaaaggcaggggctgggctggatgtggtctccctagggccattgttgcttctgttacatgatcccgccagctcacctgggacagaacgtgcattttccactctccctcctccccgcagtgagagaacgggccagtgagacaggcctttcctgttttgtcatcttaggggagaattggtgtcaggggctgacccttcactttgttctagctttgctaggagtttgtggagacagtggatgcagatacagacagagttcatatcactgggagtttcactgtcctggagcagatctggagctggaggggacttgctcaggtcacactgggagtggcagtgtcaggccagagacccttgtctcttgattccccgggcaggacacgtttctccatcctgcaggcaggtgcagaggaggaatgcttattcataggcagcacgtgagggctcctctcagctgcttatttggcaccctctttcccctccaggggccagccacacaaccacctgcctccggcctgctccccacacagttgccagaggggtctttctgactctctctgacacctggatgttcttggcacttgctgcttcaagggcataggttcccattggctacggctgtgttttcacacgtgtgtttggtcaggtgtctctggttattaaatgagacaaggcttgcattgctaaagacagaggtttaggaagtgccttggaaaaccaagtgaaacaggtttctttccggaaggatttcccagaggctttagtatggtaatgtgcttatgcatttccaagaggggagaactaaaatgcaaacgtggaaactgattttaccgaacaggaggagactagaagctaggtcttgggcaggaactgaaacctggacaggaaaagaaatttgtgaaattctctgtctccggttgtgtgtgtgtgtgtgcgtgtgtgtgcgcgcgcgcgcgtgtgtgtttatttttaatctctgccctgtctctgcatcctgattcattcatttcctttttcctcctctccaccctcacttccttttcttgtatttttaaaaattgtagtaaaatatacataacaaaatttctcatcttacccatttttaagcatacagtccagcggcattaagtacattcatactattacacaaccatcagtgtcatgcatccacagaactctcctcatcttgcaaaactcaaactcctgtacccataaaacaagaactctccgtcctgttccctcctcaccccagcccctggctacccccattccactttttgtctacaaatttgactactctaggcacctcatatcagtggaatcatacagtatttgtctttttgtgactggctcctttcacttagcatgctgttgtcaagaactatctatgttgtagcctgtgtcagaattttctttccttttttaaggctgaataatattccactgtatggatatattacatcgtgtttatcccttcatctggtgatggacacttgagttgcttccactcactcccagatgttttttcccctctctgatcctcaaggaatagaaaatgcccagccttcatttttacattttacaggtagtggagctttaaaaaagagagtactttgggaggcacagataggagcatcacttgagcccaagagtttgagaccagcctgagcaacatagtaagacccagtctctacaaaaatcagctgggtgtggtggtgcgcacctgtagtctgagctactcaggaggctgaggtgggaggattgcttgagcccaggaggctcaggctgcagtgagctatgatcgtgccactgcactctagcctaggtgataggtgagaccctgtcttaaaaaaataaaaataaaaaataaaaaagagactaaattgattattgtctctctggctgtggccacttctgcctgccttcctagccgcctgccttctgcctctcttgcctctcctgaggctgctgcagggttgatccctccttgcctcttccttacactccttcgaggcaccctggtggttcgtttcctcctcctgttatcatacactttccttgtttttccccattgttttttctcctctgtatcctggtgccaacctcagtgggtgctccctgcaggcaggtggaagaaatgatggtgctgcaggatgaatgaggctctggccccaaacttggctgctgtggctgcagtggtcccagcgggggcctgaccaggcccatctctgcgcttctgggccacttgcctctgtctggggcttgtgtcattaactaagacctgcccttgagtaaaccaccctgaggacagagaagtccactgaggtgcggtgactgaggcagaactcaatcttttagaggtttattctatcagggttgaggatgcaccggggaaaagaaacacaagttatagtaggatctgtgttctgtgctttttccaaagagggctctggtaacgtcagtatttaaaggggaaagagcaagcaggagggagagaagaaaaataaaagacggaagggtaggcattaggcaagtggtaccattcttgtgaggctctgattagcacttagtgaatctgcattttacatgtgaaaagaagggagttggggaaagtgaatcatggtcttgcactcagtaaatctacgttttacataagataaagtaagcttatgaaattagagctgtctgtttgggaacaaaaagaaggtcagtttttgcatgactcacttcccaagcttaactttctttttctttgacatagtgagtttagggccctgaggttttatttttctttcacagcacaaagatacccagttgacctttttttttcataacagaatgatgcattttggttcagtagtgtttcctccaactgctctacccctaatttaaaaaggggagggggtgagaaatcagtcccaaatgtccctgtaagttttggtgtgatgccagcctccaactggctgacatgagcagttttgtaaaggagagaccctcttgatggcttcacgtatatcatggggtgggatggggacagtcattattgacagccagcctgtgccaagtgtttcccagcagctctctgggcgattattccagccaaggatggccatgccctaaggttaaggaacctgcttgaggtcccagagctggaattgagattgacaacctcaggctgggtggctgtacagcctgggcactctctgtgccccctgccctcactcagccactccctccataggtcaccaggggtaattccctactgcccaggcagagggctggggctggaaggggtctagatggtcacttagtggttccccaagctgagtcctgatcaaaatcatctggggaattttaaaaagaaaaagaagacttgaatcagtgtgtgctagggtggtgtctatggatgggtattttcaaacatttcccgggtaactctgatcttcagcccctgctctgatcctccctttcattttccagtccaggacactggggaccggagagatgagatgccgtgaccaaggtcactgggttgtagccagagccagcatcaggtccaaagtgcgatctcagtagccagttctccatgctctgtgtttgttcagaatgccagccctgctcaatgggggtgtggaacttaaggaaggcctttgaccataggctgggcttgcaaaaccttggtaggaccctgcccttggctggaaacgtcagggctccagccagggctcatccccaagaagatacactgccattctccaaagtgtgggggcctctcccctgaagggcgctgcctggagccacctcttgttcacaggcccatgttaggccccctgggacaggttgccttggctccatatgtggttctgcagatcacacccaggcttgagaaatgcggtgacacgtgaactttgcattgatgtgaaaaggtccaaattaaaggtgatggcaagcacagctaagtccaagaaagtgtggctcctatttaggggtggtgggctaagagacaagacacagtaccctttcaccccggtgggtattctaagttgggttagtttgttcatcaattcattcattcaacaaatatttattgggttcccaataaatcatcttactggtccttggagatctgctgtgaacaagacaaacacaaccccacctctgtggcctgcacaaccctggaaggtcacacactagaaccctatcacttggcctctccatgaatcaccgtcatgtagcccctcgacaggggactcttgtgttattactgacaatattgatggttttagacacatattatcccatttaattttcccaaccattctctcaagtggggaaactcaaacttagagagtttaatgaccttgcccagggtcacaccatgagtgatggcatctgaattcagccccagttctctctgattccaaagctggggttcttgacagccacattgtaccacctggtacccttgctttttgtcaggggcaagtataagaagaaggcaggtgacacgcgaagctttatttgctctaaaacttgagcgatttcatatgtcctaaaggaggagttttgcctcttccttcccagcatgaacacttggcatggtgtgtacatcttcattcgtttggtctggccaacagccactcgggagctgaatgaggtgttgtgaccatgacctgggtattctcttggttcaaataccttcttggttggcacattcactttctcgtccttcccttggtctttcttgcttataatatatcccttttttaatttttaattttttttaagatagggttttgttctgtcacccaggctggagtgcagtggcacaaacatagctcactgcagcctcaaactcctgggctcaagggattctcccacctcagcctcccaaatagccaaggctacagaggtgtgccgccatgcctggctaatttcttatttttttgttgaaatgaggtctcagtatattgcccaggttggtctcaaactcctggcctcaagcaatcctcctgtcttggcctcccaaagcgccaggataacacgtgtgagccaccacacctaccccactgtatcatcctaagaaatcagatcaaatccgctttgaaaagacttaacattgaaatcactataaaaaacgagaggatgcagggctaccctccctgggaacctggggcccaagtgtcttggcagctgccttgggctgggccaaaaaatctttttgacagtctgtggtaggaaaaacggtgcatactaacgagtttttaataaagctaaactggccgggtgcactggctcacacctgtaatcccagcactttgggaagccgaaccaagtggatctcgaggtcacgagtttgagaccagcctggccaacatagtgaaacccaatctctactaaaaatataaaaaattagctgggcgtggtggagggcgcctgtaatcccagctactcaggaggctgaggcaggagaatcgcttgaacgtggcaggcggaggttgcagcgagccgagattgtgccactgcactccagcctgggcaacagtgtgagactccgtgtcaaagaaaaaaataaaaataaagctaaatctaatttaaagtaccattttataatcagaggtagtcttccttacttttttttaagcattaaaaatgccctttcttttacaaaatcatgtttgtggtggagggcagtggtgattgttgcttatattgttattgtttttgcgtcctttctgggcaaaataaaaagtttgccttggtgtgtccatttcctttgtggttttaatagctggtgaaatctgaactatgaaaatgaccactaattcaggtgattggttttcaccgttcctccaagccctggggtacctggggctctctgtcccggtgagtgagagggagccccagagagtcctttgcccatcttcaatcagagaagccctccttttttatatgtaggattagattttttttatgattttgtttggagataaaaggatacccctgccaaaagttgaaaagcttctcctctaggatgtgtgttgggggggagtgggggaaggaaggaatccgggaaggatgaaaggaatggtgggaagaaagaaacgaaggatgcacgaaaaaaagaagggaggaagaaagaaagacggattgtcttgactttggtgggactgaaccctggtggatcttctacttggcgagtattcctggcctatattctagtcagagttctccagagaaacaggtaatatgatgtgtccagtctagttgggtttgtaagaccagcctttggttgaagaccttccttgggtcctagcagacagaaaccaggagagacagagacatctatatccggctacatagagaggttatctgtctaactctctgcctgttctctatctatatctgtctgtctgtctgtctgtctacctacctacctgtctctgtctgtctgtctgtctacctacctacctatctaatctacctacctacctacctatctgtctgatctacctacctacgtacctacctacttagaaattgagagatttactttgaggattgacccacatgattgtggggactagccaagtccaaaatctgcaggctggagatttagggagagctgatgttacagtttgagtctgaaggcagtctggaggcagaatttcttccttgagagagacccagtttttttctcacgaggccttcagctgattaaatgaggtgtatgtacccacagtatacaggttaatctactttattcagagtctactgatttaaatgttaatctcatttagaaaatcccttcatacatacatctaaactagtgttagatcaaatatctgggtactgtggctcatccaggctgacccataaaattaaccatcacacctgtgcaagcgcttttccctcctggatggtgtcctagggatgacagaggaggggaaagccaggtctctgcttcaaggagacaaaattatgcatacgaagaaattaagaatgctgctgtgtctgtggagtagccattcttttattcctttactttcttaacaaacttgcttttacttaaaaaaaaaaaaagaaattaagaacaagaccatttatatttaagtgccaacttatgaaatgtaaaaagggatttagaggtgacaaggcaagtgagggctggaggatttggagagatttcatggtgtagggactgaataggagcttccagaacatggaggtttcagataagtgaggacacagaagtcttcacaaccagagtgggcaccacaggacaattctacatctatctaggactctgagtttttgaagggtttccatatgcattgtttggtttgctgcttgcaacaaccctgttgttttaactgaaggtcttagggcctagggattccccagaggccacacaacttgccagtggcaggggaaggtcttcctcttccacagccttctctgtctttctccctttatggagcataatgaaatgtacgtgcacacattcatgtagatttcattatgtccatgtagaattcattttgatttcaaatatgtttccttcccagagaaatcctgtgaaactatgacattgtttttctctctctccttctccaggtcttattttccttctttaccatcctgattaactctatttttgtttgttttctcttcttgcccgctcccagacacgaatgcagagtttgagtccagatcccaaagcccagtacacaagtgtctacggagccctcaagaaaatcatgcggaccgaaggcttctggaggcccttgcgaggcgtcaacgtcatgatcatgggtgcagggccagcccatgccatgtattttgcctgctatgaaaacatgaaaaggactttaaatgacgttttccaccaccaaggaaacagccacctagccaacggtattttgaaagcgtttgtctggagttagaaagttctcttcttcaacacgtccctccccagggtgttcctccctgtgacccagccgcctcgacttcggcccgcttgctcacgaataaagaactcagagttgtgtgtgcaatgcacacccagacacacgcacgcacacacacgcgcgcgcacacacatgcttttttctgttcccctccgctttctgaagcctggggagaaatcagtgacagaggtgttttggttttattgttatgtgggttttcttttgtattttttttgtttgttttgtttttaaacattcaaaagcaattaatgatcagacataggagaaaccctgaatagaaacaaaacttttgaatgctggattcaaaaaaaaaaaaaagttatctggacagcttctttgagactatttaaaaactggtacaacaggtctctacaacgccaagatctaactaagctttaaaaggtcaagaagttttatggctgacaaaggactcgcgcaacgcagaaggcctttcccaccttaagcttccggggatctgggaattttacccccattctcttctgtttgtctgagtctcatctctctgcaagcaagggctgaaatcattttgtttggttgttttgagggagagaggcggggtgggggggtgcaaatctgccagcagctcttacgtaaggcatgttttattggggagggctgagcttttattttctcctctccagtggggttggcttttattgtttcttgtttgggtttggaatggaaatatggatagcagcataaagtacttttattttgacaaaattcatttttttcaacaatggagacatagatttgacccacaataacttctccccctctctttttactctgctcaaaaagcatctctcctcccattacccaaccttggtcataagtgtgcctggctggtttgcagatatttgttctgctttgtaaaaattggccattagtgcatttattgagatgatctctaaagagctatgccctgacctacccctgattctatgacattggggcccttcttttgctgaaactgccttacgtaatggttttactccttgaaagagatttgacggaatccattttatgccaagtgctgccctgcactgtttctgcaatatgtggtgtatgctgtggtgatcttgctgggaatgattataagtgtgtgtgtggtgggggagtgggtattacatgcattgctgaagagtcatcctggtgttcctcattcctcccaccttcccgtggtcattttaattacggggcagtgtcaccgcaaagggaggaaactcaaagccgaaagcaaaattccaggcctgattctggcttttgaggttcctggttcttgaagccaggcctgacccgactctcagatggggtcagtcccgtcgctttgcagactgaccctggaaatctacaaaatgcagattttcctgatttcctcttctcttgcccagttttttttttttttttttttttttaaagcctggattgtaaccagattttcttttttcccccttctcagctgtagatatgatatctcctttcagggccccagcttaagggcaaagtgagttaatgtgtagacaaaggcgagggacaagagagagttaacatctagacagtggaaaaagccatggtgtgtggtttctgggaaccaccaacacttgcaggtttagctttttcccagggttgactacaagaaagaaaaccatgtttttgcaagattaaaatgtggttgagtgtgcctaaattaaccatccccatttttatcatatttccaccatcacttcagggttttaagagtcagtgctcacctgggcggagctggtagtacattttgcttcttagaaagctaagtcctgggttccgtctgattttaggttccaggaacttcctgagaacacccgatcgcagagggtaattttctggagtttgttttgcagggatagctgggagtatggccaccctgctccacgatgcggtaatgaatccagcagaaggtaatgtttcatggtcccagggaggggcagtaggggatgtgcaaaggggcacaaaaaatggttgtgggagagtggagaggactgaaggtgggcagagcggctcctagtctccagtcagagcagacaggagaattgaattttttactacgttatcaaaggcctcaagaaaggacgtgaacataagagtttttggtattcctgtgctcggagctactcaaagtgtgttctacagaccagcagcatcagacatcttgaggggtgttggaaatgctaattctgaggctgggtgcagtggctcatgcctgtaatcccagcattttttgggaggccgaggtgggcagatcacttgaggtcaggagttcgagaccagcctggccaacatggagagacccccatctctactaaaaatacaaaaattagcctagtgcggtgtgtgcacctgtaatcccagctactggggtggccgaggtgggagaatcgcttgaacccagcaggcagaggttgcagtgcaccgagagtacgccactgtactccagcctgggccacagagccagactccatctcaaaaggaaaaaaaaaaaaaaaaagggaaatgctaattctggccggcatggtggtttaaaactgtaatcccagcactttgggaggccaaggcaggcagatctcttgaacccaggagttcaagaccagcgtgggcagcataatgagaccccgtctctatgaaaaatacaaaaattagccaggtgtggtggtgcgtgcctgtagtcccagctgttcggaaggctgaggtggaagaattgcttgagtttgggaggttgaggctgcagtgagtcgtgattgcaccactgcactcagccagggcgacagagcaagactgcctcaaaacagaaaagaaaacaaaggctaattctcaggctctacaccgaacctactggatcagaatccctggagctagggaccagaatctgtttattggtgattctgttgcatgcttttgcactattctaaaacctatgtgtgcatacacacacacacacacacacactcactctcttagcccttgttaacccttatcgatcctagacaaatgtatggggaacccatcagaggctattctttagggctagtgttcaatttgactgtttttaatatgaaagattatggatcacatttcaaacagatgtgaacgtggagagaataatacgatgtaccgcagtgtgtccatcactgttcttcagaaattcacattgggtcattttgttttagccatctctttccacattatcttctttttgttcttttaaatttcgggggtaatatgaagcaagcctcagctgggcagaccagagtctgttccctttttatatatcccggcgtcttagccgggtactcgtgtctgaatagtgagtaccttttgggcctggcactgggcaggccttcagctgggtcattctctacctggcgatggctttaggtgagttgtggagctcttttcacctttttgcctcatctgaaaatagttcctggccagaagggagaattggtgagaaaagtttcaacattttaagtctcatgctataagtttgcctgtcttttgtctttcaaggtgaagctattaaatttgttctcagctaccctccatgtcctagcagatagaggacttggtctgaccttcagggttgtgatggggcaggttgggaggtgggcggggagtctctgtggtctgggtgctgaggttgacccgatgggcaggtgaagaaaatcaccttctccattccccttgatttctttatcgtgtgccgcacgaggcatgctgaagggacacacacctttccccctttttatttacaaagtagagagctgagaaagacagctcatgttctgttttgttttgtacacattatctttctcaagagatgtgatgtccttaagtaaactgacctgccttcatggcttgtcctgtaatgaatgcgttcaagacagtgttttggggacaggaaagaggcattcttaggtaagcggcggtgggggatggggtggggtggagaggaaacccttctaggaagtagttcaatgaaaaacctaaaaatgcccaaataaacattcgcttacatattatatatcttgggcttctttttatgacagttcattcagggacccagtcagtaaacaggtagttaacttcgtgtaaccaagcaagggttttgtttatcttttttaaagtagaaaaaagtgaggctcaaactctctctttctccttgtcataactattggtttacagtctttatttgtttaaaagtaaagcacattgtatgtatttatttggcaatacatgaggccattaaaaccctgagcctaaggtaccacagttagtctcatttgcctcttgtcctgtgaactccacttagaatgtcattgaacttgggcagacataattctagtgtctgttccaaacgcactgtgtcacagaagctagaattaccattagaggcacaaacccctgagaatacacaagggggcacgcttccagtagatgtgttggggaaggaggagggcagaggggacaggggacaggattcagctttgtggtgggtcctgagggttcctaccaggggtagccaggatctgggaaacagatcagcgactctagtctgaagtggctgcctggttcgggggctgccttcagcaagattcaggcaggagagacggaaatagccaccttccaggcgtgagtcctggagataaaaatggattttaacctaggactgccgggagctggccctccgcggctgctcagactagggctgtgtgtgctggctctcgcctgtttccggtgtctaactggcttgtttctctttatggcttggcttcattccgacctggggtggggccacatccaacccactgcccactggctgtccgtctggcctgccccgcggttccaaccacagtggtgaagcagcgcttgcagatgtacaactcgcagcaccggtcagcaatcagctgcatccggacggtgtggaggaccgaggggttgggggccttctaccggagctacaccacgcagctgaccatgaacatccccttccagtccatccacttcatcacctatgagttcctgcaggagcaggtcaacccccaccggacctacaacccgcagtcccacatcatctcaggcgggctggccggggccctcgccgcggccgccacgacccccctggacgtctgtaagacccttctgaacactcaggagaacgtggccctctcgctggccaacatcagcggccggctgtcgggtatggccaatgccttccggacggtgtaccagctcaacggcctggccggctacttcaaaggcatccaggcgcgtgtcatctaccagatgccctccaccgccatttcttggtctgtctatgagttcttcaagtactttctcaccaagcgccagctggaaaatcgagctccatactaaaggaagggatcatagaatcttttcttaaagtcattctctgcctgcatccagccccttgccctctcctcacacgtagatcattttttttttgcagggtgctgcctatgggccctctgctccccaatgccttagagagaggaggggacggcacggccgctcaccggaaggctgtgtgcggggacatccgaggtggtggtggacaggaaggacttgggaaggggagcgagaaattgctttttctcttcctccctgggcagaatgtagcttttctgcttcactgtggcagcctcctccctggatccttagatcccagaggagggaagaaaatttgcagtgactgaaaacagtaaaaaaaaaaaaatttatgtatataaaagttgcattacacagtacaaaatagatggataatgtttatcctttatttttctatgtagaagtttttgaatttgtgtgtgtgcttgtgcgtgtctacacctagtattacggctgggactctccagctgtttttgttgttgttatgtttttaagagggttgaattcttccatcaggtgaacgaaaaaggcaacaaagtaataaatcagtgaatgtggccggcagctgtgtttagcccctccagatggaagtttcacttgaatgtaaaataataaagtttatattttgaatttctcttttcatgggggaaaaaaggtacgttaaaaaaatcaaaataatgatatgtcacttgcagctacctttttttttcttttaaattcaatcagccaccttcatgtgcctttttcctttgtctttccccaaaattccaggaccagagatctggccctggcctattttctcttgctgtgtacacacacgcacacatgctgggtggcaggatctcgcccgctggagggtggtggagcccagtagaattggggtgactgggcataaacctgctgagactgcttccttccctggttgtgagtgatgtgaatgcctgccttccccggtcagcacttagaagcccttgataggcagcatttggcgacttgtggggcaggtgtttgggataaatcctaccttcatcctaggacttatttctgcatcagccttttaactcaggcacttcaggtaacgtgatctatgtgtgttttgactgaatctcatctcctgtgtttccctgtgcagtctagggaagcatgtctccagtctttgtccctgtcttgtcccaaccattaattctcatgtcacagcttctcactgcatgtgacaagagccaggcctatctgctagggccctgcggctgaggtctgacctggaccctcatgcccgagtcggaagacccctctccagaagccattctgcatccttgtctgctctgcgtcacccgagaacacaggcttcgcagcctcgctttctgaaatggtgtgtgccgagtcagattgccgctcagagaaaatacaagcccgttttccctagctgtgccatttggtgctctgccaggctgccgtgcaagggaataccgacgagacgagctgcactgtctctgatttggagccctcaccggagcttgtctttaaaaatgagcaggaagctcatgtatgtttgcatttcagtgagccgggtcctgacctgccgccacccatcacggtcagcgtggtgcatcttaccgaggaggcgcaggcctggattcttttgagtggtgctactgcctaggaagtaacacgtggagaatttccatcttgggaccatgcacacagtgccttggggagtagattttgccctaatagcgatgaagaattttatcagtcagtggagttcctttttcagatcagggatgggaaagagccaaactgggtacctcccacgtgtgccccgtgaacagccctttgcagctgggctgtggggcttggctgctgccctgtcccatctggcagttaacgccttctccctgctctgccccccactccccaaaaccagttgcagcctcaacccacatggggatgtagaaagccgtaaagtccacgctactgttgaaaatgtttacatctccgctctcaacctgccttgggttcgtgttaaatggtgttaaattctgcaaatggaggggaaaaaaatcaaattctaaatttcaaagtagaatttaaagcaaatttgtaaaaaaattatcctaccaccccttttggtccacttaagatatgccacgctgaagcaaggtatttcctactggattttgctttcactggtgtttagaaaataaacttgatttctctaggagcactcctttggttagagggatgcaagaaggagaggtgaaggtggcgtgtggtggctcatgcctgtaatcccagcactttggggaggccgaggcaggcggatcacttgaggccagcagtttgagaccagcctggccaacatgatgaaaccccatctctactaaaaatacaaaaaattagctgggcatggtggcaggcacctgtaatcccagttacttgggaggctgaggcaggagaattgcttgaacccaggaggtggaggttgcagtgagctgagattgtgccactgcacttcagcctgggcgacagagtgactctgtcaaaaaggaaaggcaaaaaccggaccctggagctctgtgggccctgattgcaggcccctccctgtgtgatgagggatgagtcagcttggggagccacttggccagcctgcatgcctggtcatcaggaggttgagaaaagccttgaaagttgtgaagcactgagcagatacaagtgtttgttaattttgtagaaattaactttcccatctggcctttatctccaaagttggtattgttgctccacgcagactgcagtccggtttcttattgtgactttgacaatgcaaagtgcaaaataggaagaggcctccccaccccactatcccaccctggtgaccaattcagtgtaaccattgcacgtactcagtcattggtgtctttggagtgacatctgcagccagttagtgccacctgagtacagcactcgtacttttacatgatgtgtgtgtgagtagctcttctgtccaaaccatgatttgaggttcaactacctgtagatcaaagctttattttagaacgataaactgattttttccaaatgggtgaaatcttctccccatgactatgttttcttaactttgcattgaatctatttactgggttacattctatgtgtagtttgctttcttcatttttttttcttttaaaatgctcatgtcttattccaagcaccttcctccaaagtccccataaagctgcatctccaacacattgttatgccaataaggttttatttaactttatttaaggatgattgtgtctttgaatgacaaatgtactgctgcttcctacctgcaagacgcacaatgtatgtttcaagggtgagcaagtgttatttcttaaatttctcaaatgcctgtagtaactattgtttctgcctctcaattgttgccagctctttgaagaaggggagaattgtgtgtttttgtgtggggatgtttctgatatgctgctacagttgcaaaacactggagctagagaaaataaagtactgatcttcgaagtgttgtgggctctgtggtgggaatcctgaaatgagaagggagtggatggcaagaggggacgtccttcacggggcctatgcttgttcctcttgagcactaaggaccaaggtctgcagctttgataggaacagcccctgcaaccccatttccccagggcaagcagattgatggtggtgtttgcattgtcttgctgggcaggagcgggagccctcccactggcttggctcaccatgctggcgagggtggcacttttctttctcattgtgagagcctggctgtgtgtggcaggctacaagtggttctttggaacgtgctgtgctcatgcctgttttctctgtcttacacctcagcttaagcaagagaacgtgacctcttttggaggtgggaggagggaaggtttggacccctttgagaagccagggatgactctgatgcttcccacaagtttgaaagtctgagcacccaccttcagtatgaccactgaagcccttggcctgccatggtcagggtcagaattgaggtcaggcctgagaactggccaatgcaggggtgcccggaggtggaaaggggtggtggttagcggatggggagcgttgggataaactccctgttttgtaatttacctatggccaatgctgtgctactccaacttgtggttgcttcccctcctctggggtgggcggcacagctggtctgcttccagtagatatggattcattcaacagatatcccccctctccctccaccatggaatcagtcagccaacaaattggctgtgcctcccatgagcagagcctcattcaggtgctggggacagaatgaagtatatgatgtggtccctgtcctcgaaggccttacagcctagtagaagagtacaaggggagatgcaaactccttaagacaatcagatcttgacccatcaagatggtagcaaagtcagccatggaagcaaaacagtagctttgtgcccattagaccaagcttcatgagacagtggccttgtctgtcctatttgctgctttattcccagccagtggtgtgctggggctggccctgcaccagctctctaggttgtacagcgcacattccttcccagcttcacattccatattaccatgttggtagcttgaaatcagcaacagtgggaatatttacaccacagaaatcgtcaagcgctacttatcaaggcctttgcttttccaatagctggttcatcagcacaccactgctggcacatagcatagtgcttggtatgtgctaggtgttcagtgaagatttgctgagaggaaaatatgaaaagtagaacccagtgtcaacctagggggcccttctgtggtgcccctcttagtttgccaccagcctcctcatggaggcatctttctatcactcaagagccctctccagcacgaccacattcaaattccagccctaaaaaggccatgaaaggaaggtatacctttcctctaggggcaaggtctccttactgagttgcatgttttctagttatcagctacctcttccaggagagacctctgctcctacccaaggaggggacttaatgtgacaaacatttcagagaagaagtaatgagcctagtcttgtacaagagaaagacacagccaactgggcagatgtggaggtgggttatgattgcttgcaagggaacaaagcattgcctctggtctaagtctgaatgcagtgagtagcctaagagaaataagagcaatttgggagaaaagagcttggtttgcatccataagggctttgtaggagacaccctcatggtaagtaagctgcacataagagctttgactgccattgtaagaagtttgacctttaagcagtaggtaatggggagtcttatgaagagtatttgagcaggggacaccatgattggagcttggttctagggaaactcatctggctaaagtgtacaggaccaagtgaagaagaaatacggaggaggccaggagatggtcagttccatgtcacagtgaaattgtccagaagagggatgactaagagaaaggtgaaggagactgaaacagaatgagtgggactggatcgatgagagtgtagaggtgaagtcaacagaggcctgggggcgcaggactctagggcatgctgagaacaggctgggctgtctgagaggagtaggaagacctggcggtgaggactaatacatggcggcagagaagatccctcatctctaagtccatgggtctctccttagtcctcctcttctttgggcatggaaaactcatctcaagtccatgggtctctccttagtcctcctcttctttgggcatggaaaactcatctcaagtccatgggtttctccttagtcctgctccttcttggcatagatgcctgatctccaagtccatgagtctgtctttagtcctcctcctccctgggcatagactccacatctctaagtccatgggtccctccctagtctttctccttgaacatgcacaacacttgagggctctctctttagctcccctacttgacttccatttccctgctttctgctggcctcccacctctatgactaccttctctggcccttcaccagcttcagctcctttccgggccacctaagtatggctgcttggaaaggttctgccgctggggatcctgtctctccacacccccttggtgctgatctgccctcctctggaagatgattcttagatatggggctgtagcaccccgattcttctcctgaactccagatttcaatgtccagtggcctgctggagatctcttggatctcaacttgtcctccattcttaagagactatccccccttgctgccagaggcttaccgtgttactcagttgcttaagaccttcaagggctcttcattgttgattgaatttaataggctttcctgcatatggcagttcccagtttagcttcgtgtgtaaggaaatgactagagagaaacagaataggtcagcaggatggttgtgtaagaccctgaggtcttaatcttcttaacagggtggtgctgtgctctttgcagaactttgttcccattggaatgtcttcctttcctgccacctcctctctgctcattcaagtccccttttcaggctgccttgaagatagcatttactaccacattgtggagctcctcctaatttgcctgtctatgtgatctttctttcctctttgtcagtatctacagcctctttgacaggcctccaacctgccatggctgacctcactttgcatttttgctgccttctgcccaaaattatgtgcccagtgagggcagggactgtggtttattcactcctgttttctccatagccctccagcctactgtttcccgcattctgcataagagtgacagttattgttcgttgtatgtaacaaacttctgatgtcctgttaagcttgaaactcctgtgggacatccaggtggagacccccagaaggaaatgcaatattggtggtcaggagaaaggctggaactggaacaaaggacctggcatataggccaagggatgtggtggccaaagccatgggcagaggagagtccctagggagaaaaacaatctcgtggaaggcttacatttaatagtgaagagagaaatgggaaccaggagaggctggagtggtcagagagttatgaagtaaccaagaggtgaggcttttacagaggaggggtagtaatcagttctacaagcttaggagtgaaatataagcaaccaaagctattaaaaaaaaaaaaaaacaaaaacctacattgtctctccctgctcttgtcttctttgttcccggtttgtttttccctgcacttactctcttgcctttttggattcccttttaaatgtcaccttcaccaagttcagctgcttccacacctccccctcccctgaccccctgcacccagcaccattcctactgtatctagcataatatttcagaggctacctaaaggcaataattagacaaacactcaaaactgcacatcccaggcttgttcatgaaagtgaaaagctggaaaacaaacgatatctatcaagaaattaaatggtttatagacaatcctggctgtcctggtatttttgtaggaaagaaatttctttaagggtccccagcaacataccataagatctttattcccaatacatttatcaaatttaggatacttctgagcttccccatttctctggccttgcctcctaaaggtaatgttattttggtaaacatgtgacctctcttttatgaagccatggatattacacaattccagacttccaggttcctgttgccatagcttctttaagaagctcttctttccttatgctcatacttacctatggtagctttgatgtttcattttccatagtaagtgagactctgggcagagcacccagcactactgctaagaggacacaagggccactttagcagagacagacagcccaacccctgtccactgtcagcagaaactcgtctgtgacaaaaagtataaatcaaaatcataccagtgatgttttagtcttcaacctgaagcagttgaagcttgggtgtcgccttggagtcctggtgtatttctattgttgtgaagtgctctcagtgttgaatgggcacccgactgcaacctcatgaagcccagagctgcagaaagagggactgtggacatctggcttcttcattattgtcatgctgccccttggggtggctgcctttaagggaagagggggtttaaaaagaacaaagggagatatgtaccaagggtgtttgtcctcatcagtatgtgagttcgtggaaggagttcttgctgcctgctgaacagtgaaaatattctcttgatggacacctttagcttggattgacaggtgataaatatatatcccaagatttctacgttgagcctaatgcaagcagctggtgaaatataccagcacatcctcaatctttccctgattgtgtctgcataaagtttagaaataaataatgtgtgtattagttcattcttgcaatgatgctataaagaaatacctgagactggtaacttataaagaaaggaggtttaattggctcacggttccacaggctgtacagggagcatagccagggaggcctcaggaaagctacaattgtggcgaaaggtaaaggggaagcaggcttgtcttacatggccagagcaggtggaagaaagaacgaggtgggaggcactacacacttttaatcaaccagatcttgtgatagctcactatcatgagaacaacaccaaaggggaaatctgcccctatgatccagtcacctaccaccaggccccacttccaacattgaggattacaatttaacatgatatttgggtgggaacacaaatccaaaccatatatatatatatatatatatatttttttttttttttttttgagatggagtctaactctgttgcccaggcgggagtgcagtggcatgatctcagctcactgcaacctctgtctcctgggttcaagtgattctcctgcctcagcctcccaagtagatgggactacaggtgtgtgccaccacgcctggctaacttttgtatttttagtagagatggggtttcaccatgttggtcaggctggtctcaaactcctgacctcaaatgatccacccgcctcggcctcccaaagtgctgggattataggtgtgagccaccccgcccagtcccaaaccatatcaatgtgcaaattttaatgtaaatagttatggatattcataatgtcttctgtctgtagctctgggcttcatgagactttaatgggcgctgctttctattagcactttcaacattgagagtccttgaccgcaacagaaaaacctgaggactcaaggccaatgcccaagcttcagcggctttggtctaagactacaaaaacatcaccagcctggaaactggtaatacctaagtgctaggagcttccttgggtttttgcatagtctctagcacatccagtgatccattcagggtttcgtgtgtatccataacaatggaactccatggtcatttcacaatctttaggtagggtccaacgtctgagggcaaattgtcctgcatgactccctctcacatttcccctcaagctcacaaatgagtaaaatctggataaattacacatgaagggggttatggttaacgagactgagaggcagtcatactgggaagagcagccaggagaaaagaatgttctagatgggaagaatgaactaaaccctgggcctattactcatcatggtagaaaaacttcctttacacagaatggaacatgaagttctaagcctcctggtgttccaatgagcttgggttgtcaagagcactcatttaacaaacgtccttagactcttactgtcacacttaatctgatccagcttcctatcttgaagagattatttttgctgattttgacttccatcaaaatctttgtttcttgatgctctcttgaatgtccaccttggcttctataattcttttgtttttaagatcagcaagtttctcaaagccacatttgaaaagcatacaattacctttgagaggattccaatgcaaggataattttcttattggttcatataatgaagtgatttgtttgctctggtccattttagccattgagcatataacagatgggtcagaggcctagatgctagtcctgcaggtcactaaactggttgagtgatcttgggtgatgttgggtatatcacttaatctctctggtctgcagtttcctcagctgcgaaatgaaaggattgggccagatgatgtgtaataataactcctctagcttctctagcctgtaataatgtccacagagtacaggctctatctagcctctaagtctatgattaaaatatgattacatgctttttagatgaaattagaaggaaaatctcacaggccttttaacttacctaccataaagaatcattcattaccattttgctttacttcttctcacttccctcttcctaaactactctacaaataaagactaaaatccaggaacttgatataggagaatgatggatgtgactatttcacatccttttctttaatatgtttttaattacttgcaagtaaataatttatttgcctatatatctttctgaactctgtgtggggactgttggtctctggtac

SEQ ID NO: 515 - DNA, 1779 bp, Homo sapiens
cctcctgcgccccgccgagctggcggatggagctgcgcagcgggagcgtgggcagccaggcggtggcgcggaggatggatggggacagccgagatggcggcggcggcaaggacgccaccgggtcggaggactacgagaacctgccgactagcgcctccgtgtccacccacatgacagcaggagcgatggccgggatcctggagcactcggtcatgtacccggtggactcggtgaagacacgaatgcagagtttgagtccagatcccaaagcccagtacacaagtgtctacggagccctcaagaaaatcatgcggaccgaaggcttctggaggcccttgcgaggcgtcaacgtcatgatcatgggtgcagggccagcccatgccatgtattttgcctgctatgaaaacatgaaaaggactttaaatgacgttttccaccaccaaggaaacagccacctagccaacgggatagctgggagtatggccaccctgctccacgatgcggtaatgaatccagcagaagtggtgaagcagcgcttgcagatgtacaactcgcagcaccggtcagcaatcagctgcatccggacggtgtggaggaccgaggggttgggggccttctaccggagctacaccacgcagctgaccatgaacatccccttccagtccatccacttcatcacctatgagttcctgcaggagcaggtcaacccccaccggacctacaacccgcagtcccacatcatctcaggcgggctggccggggccctcgccgcggccgccacgacccccctggacgtctgtaagacccttctgaacactcaggagaacgtggccctctcgctggccaacatcagcggccggctgtcgggtatggccaatgccttccggacggtgtaccagctcaacggcctggccggctacttcaaaggcatccaggcgcgtgtcatctaccagatgccctccaccgccatttcttggtctgtctatgagttcttcaagtactttctcaccaagcgccagctggaaaatcgagctccatactaaaggaagggatcatagaatcttttcttaaagtcattctctgcctgcatccagccccttgccctctcctcacacgtagatcattttttttttgcagggtgctgcctatgggccctctgctccccaatgccttagagagaggaggggacggcacggccgctcaccggaaggctgtgtgcggggacatccgaggtggtggtggacaggaaggacttgggaaggggagcgagaaattgctttttctcttcctccctgggcagaatgtagcttttctgcttcactgtggcagcctcctccctggatccttagatcccagaggagggaagaaaatttgcagtgactgaaaacagtaaaaaaaaaaaaatttatgtatataaaagttgcattacacagtacaaaatagatggataatgtttatcctttatttttctatgtagaagtttttgaatttgtgtgtgtgcttgtgcgtgtctacacctagtattacggctgggactctccagctgtttttgttgttgttatgtttttaagagggttgaattcttccatcaggtgaacgaaaaaggcaacaaagtaataaatcagtgaatgtggccggcagctgtgtttagcccctccagatggaagtttcacttgaatgtaaaataataaagtttatattttgaatttctcttttcatgggggaaaaaaggtacgttaaaaaaatcaaaataatgatatgtcacttgcagctaccttt

SEQ ID NO: 516 - protein, 332 aa, Homo sapiens
MELRSGSVGSQAVARRMDGDSRDGGGGKDATGSEDYENLPTSASVSTHMTAGAMAGIHSVMYPVDSVKTRMQSLSPDPKAQYTSVYGALKKIMRTEGFWRPLRGVNVMIMGAGPAHAMYFACYENMKRTLNDVFHHQGNSHLANGIAGSMATLLHDAVMNPAEVVKQRLQMYNSQHRSAISCIRTVWRTEGLGAFYRSYTTQLTMNIPFQSIHFITYEFLQEQVNPHRTYNPQSHIISGGLAGAAAATTPLDVCKTLLNTQENVSLANISGRLSGMANAFRTVYQLNGLAGYFKGIQARVIYQMPSTAISWSVYEFFKYFLTKRQLENRAPY

SEQ ID NO: 517 - DNA, 40611 bp, Mus musculus
  misc_feature (1)...(40611): n = A,T,C or G
tccagcactgctctggctcggtcacccagtgccatcactgacaggaggcaggctcatttctcctgctctcctgccctcagacaggttcatctctgtcccatcaaccagggacagccctactgtgctgcccaggtgaggttcagggcctgatctcccgagtgctgcagccatcaaggaacaggacccagggctctcagacaccagggctggctcacccacacctcatcatcaggtccagctccactgcctggatgaggtataggctccgagtgctgccaagggtgagagatgggccaaccttccagagtgctgcagcaagtgaggggcaggaccagttctgccgagcccctggacacccactggtccccagcagctgccatgaacaggatgtctccatgttttctagtggtaatatgagctgtggacattgacactgaaacctgctgttgtggagccaaggacccagacatggcacttagtggggcagcttgtgctaggacttcaccaatggccccaggtggcagggatggctactcacaactggctactcctctccaccctcaagtctccagtttcatctctcttcatgatgctcaatgtactcttcctccctttctctctcatctggccaccacatactcacacattgtggtggctcctgctgcaggctgcccacgggctggcgtgacatcctttgtgctgcttggtgtggtggcaagcggatgtctacagcccgcctgggcctcgtgctggagggcaggccttcgggtggcatgcaggtctgcaggtctctgtctgtcttcctcttctcacgctgcactgtgtggtggtaggtggggtgtgtgctatggcccgtctgagaggtctgtgggaacacacactgcgtggcatagcagaatgcaatacaagtatctgtctgtcttcctccttctctactatgctgcctggatttgatttgatttggttttttttttgttttgttttgttttttgttttttttcttaggtgttctaggcataaaacagcttaggccaccaagccagacatcaagttaggagaacaaaggactgccacctgctctgcccctgtctgatataagagcaaccccacaaagtgtctctttgcccattgtcaggggtcctgatacaacttatgactgagaattgtcttttgtgtctgacttctatttcttggctcattcatgatggcattcatttctaattatggctaagctctattttacagtatggttacaggaccctttgtttatgtattcattggttggtagacatttggaatatttccacttttttgtctgtgatgactctcaagtgcaagttttgttgaacaccctatctcctttttttaaaaaatgagttttttttttctcctggcccaaggtctcagaaaaacaattctgaaactcaaaaagtatttgcaaacacctatgccataagctttggttgtttcccaattagatcatagcgtaatatcctatctagtctaagttctgccatgtggctgcttacctctgctcagctcccatgtttctgaccttctccatgttcccaggctaattctctgcacttgactctagcccagaatcctttctgcctaccacatgtcctgccttctattccaccctttcctataggccataggtttttttttttaattgacaagtgatgcaaccatacagcacaaagattttctctatacatttcttataggtatatgtacctataagaatttctagatcaaatgtacctataagaatttctagatcaaatgataggtttgtgttacctttggtgatacgccaaacatttttccaacatggaaagtttttattttattttgctcatgtatgaaaatctagattatctttcaagtatcaactcagatgtttctgggttagtaaatattttttaatgtcttatttagtttttgattatgttcaggtatctttcttgtttcatgttgattggtttgtatggtttggttttgttcgtttttttgagatgtgctatgagtcttgctacctggtatatagctcaggctggcctcaggcttcatattctcctcctgcttctgtctcttgaccattagagccccagactgtttattattgttttccatctataacatctaaaaatggaacattacttctgcagtggtctcccaaatgcaggctgtttttaaggtaaaagaatattcattgaaaagcaaaaataatgtgtttgttttgacatgtgctttataattatgtagtatattaaagtagctgaaaaagtatgaggcgtataaatgaaactcctttcttgaggggaagggcagaatgaacctgagctacacccacagcccctttaaattttattctgaaacagaatcttgacacatttcccagactgttcattaccttggaaatcatcagcctcttgagaacctggggttacatatgccaccacgatcagtgagtgcttcagttcttgatcctgcttgttttgttttgttttgttttgttttgttttgttttgttttgtttttcgagacagggtttctctgtgtagccctggctgtcctggaactcactctgtagaccaggctggcctcgaactcagaaatccgcctgcctctgcctcccgtgtgctgggattttgattctgcttttattgttgctgcttgagaaagggtctcacagtgtatgtaacctggagctcactaaatagagcaaattatcctgtaattgaagatcctcctgcttcagcctcccaagtgctgaatttctaggcatgaggcacaaatttcagcctgcattaaaattctgtatcttaaagtaaatctggtaggaaagttcttaagattgcattgcccagaaactgagggttccttgttaactgagggtttcctgtttggctcagatgtcagcctttcctcttggtctacttctgctgattaccagagtaaaacttggggcaagtcccttctccacccatttatttcacttctcaaattgatacattagcacctgaactcatgtgagttttcactactgagcaacgatgggaaagagaatgtgcaacggccataggaagttggtcacttgagaatcttgggcaactctatgctctttagagcatctggtgttctctgatcctcagggtcatttgtcaatgtgccaccatgcctattactttaacagctgtcaatcattgctctttatgtttctgacagaaaaccttcagagctattagcaaatctctattactaaacatttgaaccgagaggagtacctatgacatcacccagcagcctctgcagcgagacactatgttcttcctgctgaccttgttacaggataacattgtaaaactttgaccttttaaaatctctgtttattttgatcctggatgctacatagaagcttggactttatgttgctgggcatcttaatgtttccagtttgacaagatggattcagtctgctgcatgtgagggatgtgaatcgttgtttgagtcagtgtctgaagggaagtagacgcggagagagacttaaaaggttatagggaaatgtccctaaatttgatcacatgctacatttgaagatttactcatttttaaccacatttgcctactacttcgtgtgtttagtaaacaacaggaaatcagtaataataaattttctttgtgagaagatgggaaagggggaccttgtatgtttttgatgctaatgaaacagcactgcccttatgggaacactatggagggtcagccaacgttgtaaacagaaccgccaaatgagggagatgtcttatttatgggtaaatatccaaaagaagtgaaatcatcatgctggagacagctgcactcctctttattacggctgctcaatgtaaccaaggtttgtaatcaatttaaatgtccatcaatagatgactaaatctttaaaaaaatacagtatatatacacagcagaatgtagtcaacctgagagaggatgaaaatcttgtcatttttgacaacatgcatacatttaggggcactgaatgtaccaagtgaaataaaccactcagcaagacaaacactaaacagcttgctcatatgtagaatagtccagcacacaaaagcagggaggcaaatggtggttggcagggcctggagaatagacaataattggggagatgtccagtttcgcttagacaggaacaataagttcaagagatttgctctacaacattataactaatgactgtatgtttcaagtgtcctcaccacgtgtcttagttactttctattgctgttatcaaacaccatgaccaaggcaacttataaaagaaagcatttaatccagcatatggttcagaggattagacgatgatatcagaacaaaagaacacccaagagctcacatcctgatctgcaaccataaggcagagagtgaatgctgggaatcacaagaaacctaaaaacctcagtaacgtcctttccaacaaggtcacacctcccgatccttcccaaacagttctacccactgggagttgagtgttaaaatatatgagtctgtagggctcatgctaccataccatgaacacaaaatataagtgagaatgcactctggttaatttttcttcaatctaacaaaagctagagccatctgggaagaaacttcacttgagaagattcctccatcagattggcctgtaggcaaatctgtgaggacattttcttaatgattggtgtaagaggacctagcttgctgtgggtggtgccatacctgggaatgtggtttggggtttataagaaagaaaactgagcaatccacagaagaagccagtaggtagcaatcctccatgctctcttgcttcaatctctgcttccaggttcctgccttgagttcctgccctgacttgttttcatgatgggctataagccgaaacatctttccttcctgtgttagtcagggttctctaaaagagcataattgatggaatgaaacatatatatttcagtgaaaaaaaaatgtgattacctagtttacaggctgtggaacagctagttcaactctggtgatctcctgatggaaaggccaagaatacagtagttgttcaatacatggatgtctttggtatgtagctggtctttggtatatgatgaagttctgaagaattgggttctaataccagtgagaaaatacctcagcagcaggatagatgaacttgccattgggaatgagggaaagcaggcaaaaaataaaagctttctactttcatgttattttatgtaggctggtaccagaaggcatggttcaaatttagagtgggtcccctgtctgtaagtaattcagatatatagtgggtcttcccaactcaaatgatccaatcaagaaaatccatcactggtgtgcttgggttttagttggttccagatatagtcaagttgacaagcaagattagccatcagactcctcaagttgtctttagtcatggtgtttatcacagaagtctaaaacaaactagaaaagaatatccattggctctctcaatttagctattccataatgcagacattttcaaacatcctgtagtcttctataaatacatacatagtccttttagatttatttatttagttttatgtacatgcatgttttgcatacatgtatgtgcaccgtgtgtatatctgatgaatcctcaggagctggggtcgtggatgggtgtgagctgggaattgagtctgcatgctctgcaatagtgacaagtactcttactgctgagccatttctccactttgtatttttgtttcagttaaagatagataataaataaagaatagataaaaatagaaagattatctttcaccagcaggtcttttatttgtgatttctgctccccaacacctttattctaagaaaatggttagcaggcatttaggctgtgataggatttcttctaaagggtattctattctttttaaaaaaaatttactcttctttcatataatatatcccaaccagttttacctcccttctctcctcccagtccttccttcctacctcccctcccctcaggatccacttctcttcaatttcccttcagaaaggagtaggcatcccagggacatcaaacaaacatggcataaccagttacagtaagactaggcaacaccctcacatcaaggctggatgagacaacccagtaggagggaaagagtcccaagaacaggcaaaagagtcagagacacctccactgttaggagacttggcaggtctggcatggccttggtagggataaaatgacatggttcctgcccctgggacagggccagcaggagtgggctttcactagtgtcaaaggctgctgtgggtataaagcttgtttgtataataatgcacatattttatattcctcagtcatagaaagtcctctctgttaacattaatgactccatgataatcagagacagcctgagtccaggaggtaaaggtgtggcagatgtcacaacatagtaagcgctgggatcctcaggctgtggaaaagaactctaaaaaataggttcacaggaagctcaagaagaagaccaaagtgtgggtgcttcatttccttcttagaaggcagaacaaagtactcacgggagcaaatacggagaaaaagtgtggagcagagattgaaggaaaggccatccagagactgccccacctgggtatccattcccatatacaatcaccaaacccagacactattgcagatgccaagaagtgcttgctgacaggagcctgatatagctgtctcctgagaggctctgccagagcctgacaaatacagaggcagatgctcacagccaatcattggactgagctcaggaatcccaatggaggagctagagaaaggactgaaggagctgaaggcgtttgcaaccccataggaagaataacaatatcaactagccagacccttcagagctcccaggaactaaaccaccaaccaaagagtacacatggctccagctgcatatgtagcagaggatggccttgttggacatcaataagaggagaggtcattggtccaatgaaggctcaatagatgccccagtgtaggggaatgccagggctgggaggtgggagtgggtaggcggatgggggagctccctcatagaagcagggtgggggatgggatatgggggtttccagatgtaaagccaggaaaggggataacatttgaaatgtaagtaaacaaataaaatatccaataaaaaagaaaaaaatatgggttcaaaaacataatttctcaaaaaatcaggatgcaatatgaattttatgaggggcttcatgaaggtaaaggaacaaaagtagctgtgctgtaagccaactgtcaggagatactaaggaaggagataaagagatttaggaatggtgattacaggagatcccacccagctaattttttttagtttatacttacaaaggcaggcagattcctgagttcaaggacagcctggaacacagcaaggttaggcccaggtgtggtagaaatggtaatttcaggatggggtcccacccagcacagaggcaggcagatttatgaattcttttgcaatgttaaaaaaaagtgtgtttgctgtctcctaagaattaaggatctggtgtcactggatgctgattcataggataatcaaaaggaagctcctctctcatgagtgtccctgtgtcactgcttgcctgtgactttaggtatactgagattctatggacctgttcagttctaatatgatccagttctataatcgagcggagccagcacttgctggccatttgtgtgaagtggaaaatataaggctctgaaaatccctagagagaaagtctgtgtgcttgttgatctatggtcacttctctgtacagaaggcttacaagtaaggctgacctgtcttaacttcaaacttgcatctgaaaataaaatgtatagaaaacaccatgagttggtcgtggtgcacacgcctgtcctcccagtccctagggaggctgaggaagaagtaacaagttcagcatcaatctaggtgctcacttagcacgaccctgttcaaaatgcaagagagcaacaaacggatgggtaacgttaccgtttggaactgtacatgtttcatgtactccacccatgtaatcatcgctaccccacatcataaacaaacatgacgtacagagaattaagggagcaaagcatgacttccttacatagctctattctccggggaataatggactcattttgaaatttggactcaaatttgcctggtattgtggatgagtaagggtaagagagaaacttgctttctactgtgaagttaaatgtatccaagaggaagaagacagtggcttagaagaatgtgctggctctgaatttgtagactaaagatggagatctagggaagagcataggtcacccatggctcctagattttaggctcaagtgatttagacatagtcttcctgggatggagaaagtaggagaagggctgatttgggtgtgtgtgttagggtctgatttaggcatattaaactgagagtctctgggaaatgtcaaataggtaatctgatagacttacctggagtctggagttgtggggaagtcaggtagaaatgtgcatgttggggtcagctccccacaaagcaatgctgttcagagctctagagtcaattctcatagtcacaggcacatggcatgatactcttgcctgtcaaccggactggacagaacaaacccctaggactgtctgtgacacagtcttctgagaggattagatcttgagggttttcacctaacccatggattcaccttcagatgatctaaaatttgagtcgactatgggaaggcagggctggttgggagaagcaggggactaaggtttgcctgtgaagggcgtgtcttacccaggctcttgtctctgactttgccacacactgccacagccatgaggtactgggtgactccacccagtaacacgaatcatgtgaccaaggactgaacgtgctgaagccaggaaccaagtaaaaccttaagtagcttttctctcaggtattttggtcatggaaagctaaccccacgtgctgtggcactcttcatctgggataaccttgctcagatggagtgcgtctgtgtgaaggctgacttggatagactctctcacgctttgctctcaaagatggacagtaaaaagacatgtttgctgggcctggagagattgtgacaaagggcttcttggtgtgcagatcagcatttcagccatcatcccattcactacagctgaaaccagtcagaatcatttaaaagatggagtcccagcatcatttaggaaatattagcagctaatgctaagttcttagaggtgtagggaatgtttgagttaatgtgagtggcttgccacaaaggttttagtggctgtctcctttcattctgatgcttgctgacttccctgtaatgctagaataaactcccaatacaggggtgtaaatgagtctcttatttttatgtggcatgcccatttttgatttgacagataatcttatcataatacttttgatatattaccatttgcattttgaggttggtcttttgtggccttttcaattaagttcacacttaattgaaaaatgtttcttactcttgcatcaaactcttttaggcttgctgctagtggtttgttttgttttgtttctggtctgatttagtagtcatttatttatttttgcttgcacatacaaggagaagttaatatgaggcataaagaaatgatgtgatttttgttgttgttttgttttgttttcttcttgacaataatttttaaccaaaaacatgacagggctctttatttacctggaatgattcttgctcactacagataaactcttcagacctccagctggctatgtgatgaattcaagagtcacgcccagtggtacaacggccattggagagctgtgttttgagcacgttcactccatacctggaaaaatggtgtcccagtccataggctggggagactctcctgtggacctctgtgaagggagcaaccgtgccttccaggacactgaccaacctgcttgccaattggatgtgaggctcctaagacacaaagcttcctggatcaacccgctgtgtgtgcagcagccacttcaagaattatgcccccaaagaccaaccgtgcagagcagtgagaaccacgtggtgctggacactccctctcccttgcgcctttcgatattgtcctacagggactccctggctgagatgccactgtctgagaatactgctgatgtcatctgcagcaactctgctcattgctccgggggaaaggagggtgacttcttcctggctacagaagagcaagaggttcatcttcagcaggaatctctgctcaaaaaccccaagactgtggccacttccccctcccctaaggagggcagtgcccgttctgagtctcctcatttgacagcttctacagatgatggtaaccctaatgacttcctctattctccatctctgtgtttgtctgggccggcttgaaaatttgcctattgtctttgccatgagaaacaaagttcatggccttctaccttgaccagaaagcaatgcgtgagctcatttaatattagcactatcccacactctgtgagagtcacaataggaggttcagctgtcatcttcttacactgagaagaagaaggtcatcattttagcttagcatggttaataatcagttccaggagccatctttgggatcattattagtttgtctgcaggtagaaccattaggagcatccaacctactgtggatgggaatgctattacagattccaaaggaacttgctgtatagtagtgctcaggcgggaggacatgcctcatctcttctaattctagcacagacagctgaggaaatagcaaatttgaaagcagtcaccacaatactccccaaaggccaaaacctcttggtgtgaaaacaagggcgcctgctgtgaggtcatgcatatattcttaaaactgaaaaacttctgaatggcttagtccactcggagtaagagtcaggtagctggctttattttattttaaaggattcttatgttatattcatgctgtgagtttcgagccctgcttcaagtagtttggaaaatattttgtagttttcaggataaagaggagctttcagatacagaggttgctgatggaaaggtgaggttgctgctagattggcctttctccacataaacaaaccatcatgataacaagttattacaagccactgattgataatgactctgagcccaaacccacttgtcatagccttgtgcaacaagaagttctttaacttagtgttattttgcctctttgtctttctcctagaaaagcaatggtacaaagtgagcccccaagccaagtcttgccttttgtctgaaggcagcgtttccccacaatccttatcggtacctttaaaagctgtccagtgtttttttgaggtgttcttctgtttgcttttaagccagactctcactctgtgtagcagactggtcttagactgccagaaagactggtctttcttagacggaaggaagttctcacttcacgtcctgagtgacaagatcataggagtgagccatcatacctgacaagactctcgagagtcattctatggaattaagaaacaaaagtccagagttacaggttttctcttcctttatgtagagcagcataagggggggggagcaaatattggtcactaaggcacgggatttcctatgacacccacatctctaatggcagctgtgggaccttcttgtgtggatggaagcatttcctgaggctgtaggaacaatatcctgggttctactgcttgaacagaatctacatgtttacaaaataccctctctctctctctctctctctctctctctctctctctctctctctctctctctctctctctctctctctgtctccttatggaataacaggtaataatcccaactcaaggcaggagagatttcgtgaccaaggcctaacaggtctgggcaccctctcttgctttttcctctgcactcaggtctttacgtgtagcttaggggtcaaaattctgccagcttcatgtttttgttgaaaaagacaaaccagcaatttagtttcatcaccccttctagttacagtggcaggatgcttggcagagatggtgaacgattcccacatccaagcctctgaaatatttacctcagtgaagaggtctctctagtcttccatttctgactgactttgttcaacaggaagtattggggtgacacttcctgcatttgtctggcatctgagaacccacagttccccaaacattggcagcatctcttaatttatcaggtcaggacagcatagctcttttgactgtccggaaatctcacttccgtcccaggctgcagttagcagttatgtgataggaacaacttgcattggtgttgcctgttgccagtaaggagtgggtgagggtgtaagattggatgacacagcacagtggtccgagcttgactgaagccctgtttgctgtcagatgacattgtgtgtgcaacaggaagtttggggcaggttgccaccagctaaggaagtgctggggaagtgatcctgtagtcatttttgtaaagaattgtttgtttatttatttcatgtatatgagtacactgtagctgtcttcagacataccagaagagggcatcatatcccattacagatggttgtnnnnnnnnnnnnnnnnnnnnnnnnnnnnnnnnnnnnnnnnnnnnnnnnnnnnnnnnnnnnnnnnnnnnnnnnnnnnnnnnnnnnnnnnnnnnnnnnnnnnnnnnnnnnnnnnnnnnnnnnnnnnnnnnnnnnnnnnnnnnnnnnnnnnnnnnnnnnnnnnnnnnnnnnnnnnnnnnnnnnnnnnnnnnnnnnnnnnnnnnnnnnnnnnnnnnnnnnnnnnnnnnnnnnnnnnnnnnnnnnnnnnnnnnnnnnnnnnnnnnnnngaggaggaggaggcaagccaccctttttatagtgagttaggtagcctggctattgccaggtaactgtggggcagggcctacaaggaaaccccacaattttccccatatttgttctttgtgtgtgtttttcttttgtattgtgggagttcacctgtgcgcatgtatatgtggaggccagaagtcaaagtcacgtgtcttcctctgcgcttctctcagttctccccccccccacccccccccaacacacacacttttggagacagagcctctcactgaatctgcagctcactaattttctaacccagcaggctacgaagccccagggttcctcctgtctccaccgctacactactgggttaaccagtgcctgatgcaataggagcttgaactcaggtcctcagtgttgcctagcaagcactttattgacggagccatctcatttctccatgtttaatggctcgctgtgttggcaggtgatgctcggagcagcagcagaagccatgcttggaatttcttcccactagagacgttcatgctgcccgctgatgtagaaaaggtgagcgcctctcagccacagagggcctgagtctgtcagtagtggtgcgcgatgtgatcatggaaaccaccctgacgcagtacagcctaagaggttcttttcaatatttgatggaggccgccaggggcgctaaactgaagtcttcaggcacggtgtgctcagttgtgcatgactaaggagctaagtcaggttctgggctctatccaccgagggtgttctatcataagacatgcaacttggtggttgggatggggctcagtagtagagcgcttactttgcatatatgatgttgtgttttaatctccagtcctgagaaataaatcaatttagtttggtatatctgtgtctctggatgtatttttcatcatctagttagatcaagttatttttatccttatttgtagtcacttaagttaagtggcgtttcttcaattttgaaatcttatccatactccaaagaaaagttgattatgttcctatttgaattgacttttttgcccccctgcaggaaaatctccacttttatgctgcagacatcattatctcagtaatagagaatatgaagtgcaacctcccgaatcaacagcagccagagagatgggacacagaagacgccagcaggttacgtgggactggagcggaaatgaccttttatacccatataaagcaggagccaggctcctcggcttcttcacacactggctgtgaaggtaagttgggcagatgcttgaatgctgagtgctgtgatctcagctcaagctgtgtcctctgtccgttcccgaaagagggacattttccccatcctttgaagatgtgctcaacccacggtccactggccacatgcatcctaggatcgccatgaatgtgactcagttcagaatgagaaactaacttagaacattatgaggtgtgtgtgtgtgtgtgtgtgtgtgtgtgttattttcagtgactcaattttgagggtctttggtatgtactagtgataactaacgtcactttgcaggtgaaaagttgagcacatgggagcgatctcccgcaaggctgccattttgccttgtgatgtctgcgcatgctccgtcctgggccagtgctccagttctggctttgctcttccttggattttattcttcctttttgaggttgctgctgtcttccatcttgcttcatttcccatcacagagcgttttcccccgtctccttccacattgctttccttgtccacggagtccaccttcattcctttagtaaatagtggacctacctgctcttggtgatggctgggtcttggtgatggtaagatactcactttccccagagcagaagccctggagctggggccaaggaagtgagagggaaaacgccatgcagaggtgtgggtccagcccagtcactaagcaagggcagctgggagcccagggagttccttctggaggaaaggccaccaaagcaggcaagaaatgttagctttcttaaagcaagtcctgtattcagccccaacacccaggttcactttctggcggattttatctccatcagttgcttcctctaggctgatacttaccctcctcctctgagaaacctgggttttctagccctgagcctctcctccaagtgtctttctatgtggctggcacccttcaaacttgcccacctgctgggttcccagatcctctggcttaacactcactattcccatatggcttaaagacactctatttctacattgctggtaaactcatgtctccagcttctgggtgggcggggctagcctctatcttcactcttcatctaatagttcttcacaaccccatggggtgtgtgtgtgtgtgtgtgtgtgtgtgtgtgtgtgtgtgtgcagcttgactttctttcccttttgtctgtagagattctatcgacaaataaggctgcattcacgttctaggtggacatgaactttggagggatatgacttaaccccatagaaccatgtgctctgtactatgtgtctgggaaggttggctttttcttttttcttttctcttcttagccttctttaattttattttaaactttgtattataatgggaaaatatcaaacaaatcgcattagcctatttgactaaattatagtgaatgagagaccctaaactagcttccttcagttgttagtccttgaagctgcacctttagccccctccccaataactgtcagttgggagctatgccattcccttcccttgctcctattttttctctttcttctctctaccttcctcttcttcattgtcttcctcctcctcctcttctgcagaccggtctgaacataccgttttgcttattgtgggattcatgcatatgtgtttaaacaggtgtgtgcttgttcatgtatgaacgagggtacaaatgtgtgggcatgtgtgcatgtgtgtgttcctgtgtgcatccatgtgttcctatgtgcatgtgtgtgtgagggggggagagggaggggaaggaggannnnnnnnnnnnnnnnnnnnagggagagagagggagagagagagggagagggaagaggaagagggagagagagagagaattttggttgtcaagaactgccccgtttttaattttgttttttggaataaattctcccacatggcttggaactctggctagaataggctgactccagtgagttcccagagctcttcctgtgttgggattattacaagcacaaactaccaggagtagctgtttctgtcggatctgggaattgaactcaggtcctcacgcttgcacagcagatgctctactgcctgacccatttctccagccccagtcttgcttctcgatcatgaaatctgtctcccttctctcttcaggttgtgctgcactccaggtcagcccagtggctgagaccctttcttactgccctgtggcaggagaggcctgcaaacatgacttgaacaagttggtcatgttaggtgagactccgaacctcctcatacccacctcctcaccacaccacacacacaccagcagataccacagccaaggctatgtcagggacttttgaggaaacctcttccaggaagaggttttccctgctactcacaggaaaagctgttttccttgtctctgatgtctgctaattgttcatctcacctgtgaagctgaacaaaaacgcagacatacattagttctgctgtgtggtttcgatgtgctattttgatgaggtctatataaactcccatctccggtggttacatggagtctcatactgttgtttgtaggtatccagccattgctggttccctgaatgctgcagggacttcgtatatctttgtattcttataaaattaactgggtgaggcgtgctaaaacaccctaccaccctttctttccttttccacagaacttgggaaatataatgacatcacgaaaggctgcagatgctcctataactcttcaaagaggtatgtgtcttcttgtgtttagacccctggactcctgggctttctatgaagccactgtgccattgacagcacgtattgtgccatgtagccgcagatggggatccttgatggccagtgttcacagtcagcttgatagaatcctgcctgcctgtattatcttgactatgttaactgatgtggaaagatccatctttattgtggatgagaccatcctctgggtggggaaacctggaccagatgagtggagaaagagctgagcaccagcatgttgtatccattgctcttctgactgctgtgtaatgcaaccagctactgcaaattcctggtgcctcagcgtctccaccatgatgggcaatcccttgcacagtgagctgaagcaaatcctttctggtgttactagaagacaccatctcacagaaaacctcctgaccctctggttctaacaatctttcagccccatcttctgcaatgatccccaagtctaacacataggagtgtgttgtagatggatctatccattgagtctggcctccacaactctgcattctgtttggttgtggttttctgtggtggtctctgtctgctgcaaagagaaatgtctttgaggggtgaaaatgtttatagattgtttctaggaagtgtgctggtttaataactataatatcaaaaaatgtaaaagttagtaaaaagtaaaataaatcctttctcccttaggttttttttttgaggtttatttatttttattttttgtgtgcatgggtattttgcctcctaaactacttttatgacagacagcatcaggagaagaaactaagactcaccaggaagtcagccagtcacctctataatagcacttttctttactatgataaagtacccgagacaactaacttactgagagaaaaggtttatttgtctctctgtttcagaggttcaaagacatgatatatggtcattggtggtggaggcagcgtgccttggaatgcatggcaggatggaggataagaggggatgttttcactaccctttggagttactgtctccagtgacctacagacctcctgctaagctctacctcccaagtttccatcgtctctctgggagccaatcccttaaaccctgggtctttggaggacactgcctatattcaagacagagcacccccataatcagtgtgtgttacagtgcatgaaaggctagtgtatgaaggttaggcaagttttacaaatgtatttatgcatttatttaaaatttagatttattttgagtgttttacctgtgtatgtatatgtaccatatgcacaccaggtgcccatgggggtcagaagaagagctctgatcccccagaactggaatcatggatgattgtaacctaccatgtagatgttggaaccaaaccctggtcttctgcaagagcaatgagtgctcttaactgctgagccaactctccagcccctgtgcatttatttttgaaccctgttttatatacaagggaactaaggcttataaaatgatgtcacaatgcgttcccccaactccttttgacagtcttgctatgcagctatagctctcttggaacttgctagagagactaggctggtcttgaactcacagagatcccctgcctctgccatcccagtgctcagattaaaggatgagccatccttgaaatttgactaagcttcagaagaaggatttgaactctgcttttctgactttaaatgcagtactgtttacaccttaccccaggtctcagtactcttgataaatgagaaactctgtttgctgatcacgggtcgactctatcacatcagatgctcagctttgcaacgtgtgcatagttctccagcttctgtttctcatgtttcagtgcgacctgcgagtcaaacctcagtcctgctgggtgcttagccagagagttgttccgagggttctgtaagtgctggatgctgtcagaagttaattgccagctgccaggctcaccgaccacagctagctcaggagtaagtacggaagtcacttgagatggaatgaaatgttcttgatttctcactggcctgctccattcaaatatttatcttcccctgtcgggcttataggtgtttaggaagtctcaaaatggatatgagcagtcattcagcatcaggggatgtcctgaacaattcacaccatattactgttttgaggaaaggtctcgctgtggtgtgcaggctggtctctaacttacagagtcctcttgctctggcctgcctagtgttgggattgcaggcttcttaaaagtgccgtactctcaagtatcctgaggtgacatctcatttttccctcttattactacttactatgttaatgtactgggcccagatcttatcagggcaagtcaatggtaaagcagatatcatacctagctgacagctatgaaaacatacaagactttgcttgcaggaaatgctgttctccaagaaaactaaaccctggtggtagcaaatgctaagagttgaaaaagtaaatcactacggaagggccagggtgggcaggcatctaattctatcagaggaaagctaactctccagcttagcccccgagccaggtgttagttagccaggcagttctggggcagatacagtctgtggggaactgttcttagcaagagctattggaacacagatggtggaggtctggaacccagatgagcagggaaataaatttagctgtggttggataaagggagtgtgtgtgtgtgtttgggggggggtcagaattcatgggaacaggcttgaatgatagtagtcaaactgtggaggttttcaggatgctgattggaagagtttggatgttcaatgacaataggaaaatgtaagatttcactgtaagttgttgagttttgtaagccggggttctacagcaagaccaagcaaagctctggtaggctgccgctttaggcagcggatgctgcctgtttcatagagtgtctctggtcaaagagcccttcccattacatgggaagtctagaaagaaatgagctaaaactattaaaaaaaaaaaaaaaggcaggctcaggcatagtagttaaagggtgctactgttctttcagagtgtagagttctcactacatcagacagttcacaactgcatgtaactccagctctaggggatctgacaccctcttctcagacacctcttcatgtacacggtcattcaaaaataaaaataaaaataaaaataaaaataaggagtaggctcagtgggaagtagggcacctgtgccaagaccgttagttcagctgaaaacagtttcagtttctggtggtaaatttgaatgggaagcacacttaggagtccttcttaattcaacctctagattgtgccttctgaggttagccctgaatcctctcatgtgtcctgcaggtcggggatgaagaatatgctgaggaagactttgactccagtgtggatgctgctcgggaagtcatgcttaagtctagggtcccaggaactgaagactgggtgctccctcgatgccaaatcatacttactgttcacccaccaatcaagtaagtaaggggtactgcctggaaacccaggttccacttgggatatgctgtgatgggtcccacctggttcctatggaaacagatgaggagaaaacaatgtgcggagggaccaaggcaaatgtatttctggcttagttttctttgcactctgttgtgggctttggtggggggggggggcggggcagcaaagtactcaagttaaaaatgtaactctgtgtcttagggtttgtattcctgcacaaacatcatgaccaagaagcaagttggggaggaaagggtttattcagcttacacttccacattgctcttcatcacgaaaggaagtcaggacagaaacttacacagggcaggaacttggaagcaggagctggtgcagaagccatggaggggtggtgcttactggcttgcttcccctgccttgctcagcttactttcttctagaacccaggactaccagcccagagatggcaccacccaccatgggttgggccctctccgcttgatcagtaattgagaaaatgccttacagctggatctcatggaggcagttcctcaaggaaggttcctttctctgggatagctccaacttgtgtcaagttgacacacaaaaccagccagtacactctgcctcctcagttatgagcattacatagcactggtagattaaaaaggcctaagaggatttttaagtggctaatactgaaacagaaatcaaatgcaacaatttaaaaacgatgagaccactctaattctattttccaaaccagttagtgtgcaataaaaataagtgcgatgcataaaagttttaaaagaagaatttactttcaaggagattaactgtcattgagaaatgttaacaggatgcaaatataatctttattctatgaagccatagaagctgggagacagctaaaattccgtaagagagaactaaacttctacagtgtgtgtgtatggggccacacttatcgcatgtgcataatagtttgttggcaatttgttctgaggatgtgtaatggattacaagtagagattataggcaacatagtttaactatctgcagtctttctattctcttggtctctcatgcaaacttgagggttatgaagccatgctccccatgctccccgtgctcccgtgctccccgtgctccccgtgctccctgtgctccacggaggtctcttacttatctttatctggtgtctttgctctctggcttagctgatgccaggaaggatgttgtgactgcttgggcagaatttgtcctctatagacactgagccatgctagtctcgttgtataggatatcttttccctcctttcccagaatcctctgtaagacatgggcagagatctcacatgttttttttgtttgtttgtttttttttttttttaaaccttggcaatttttgttgaccttgagataaaaatgcaaatttaccactttacccataactctaggtccccgttgaaatcaggacacagctgtttccagagcactcctcttcaagaggactttataactttgtcacatcgccttattctaatgtttttattacatctattcacgtgtgtcctttccaagcatgttagactgttgtctcctcggctgtcttgtgtaccctggtttctgtgccaggtagtgggaagccccaaggattctataatagaagagttatatgtgatactgacttctaatttgggcacaattgagatgtttaaagaatcctagctttagaaggccaacagattccaaccagaaaaacatattggataagtataaacttttcttaaaatgaaaagatgacaaaattaaagcccctaaactgagaaacggaccacgatgtccactgcttttccatcagtgaaaaacgctgtactgaccagctctgaaaacgtgtaacagttgccattttctgtcctcaggagggacatagcagtggtggcccagaacttcttctgtgctggatgtgggactccaatacagcccagtaagtacaggtcctgcgctgtttgcttgttccatgataacagtgaggatctgcagggctggactatgtgttgctttagagtgagactgacttcttggtgtgagcgtgttgtgaaggagtcgtggaggtggccctgtcttttgctaggaggagactgtgacctacaaagctgcatgactagccaggtacaaggagggccagcatcctggctgctcctcaattgggcactcagacaacccagccgtacctgtcttagggggttgaaactattgtttcctcttcccagaatgaacccctcacccccatagacttccttccccatgactcttggttttcttcatatctttatgctctttttctacccactccactccccctctccttttcctgggatcttccatggttgccttgtggatcgtgtggtcgcagacagtcgcgtgtgtgcttcataggatcttcctctgcaatgcttattcagcatttatctgtctccatcaccaaaccataaattccaggaaggcagaagccttgttgcttttgctcattgttcatctccagcctctatagctatgcttgcttataagacggtcctctaggcatacctgcagagtaatcaaatggctcctggcaagacttctctgagagctgaggatatggtaactcatttatgggatggccaaggtcctgcaaactagtcttccccaagtgacaccatgcaagactttcagcacaacctggggattgcttgttctccagagaagatgtctgtttcaagacattaaaattgaaagcagaaccagccagggcttcctctatctcactacacgttaatgacaatcacagtgtgtcctctttaaatgactcattttcccagctagcctagcaagaggcgggtctgtgagttgatctgtacaccctaatgccacaccaaatgccaaatgcatgagtcagaaaccacatagacgcgagactccatcaatccgtttaagtaccttcctgagtccattctttcctgccagaacggcaggggatcttgcaggtcctgcccccatgggatctgcttccatttttgtctgtcctcgtggtctaaggaagaaggatgggcatgatttattctgtactgatgatagcacagtgggcatttgatgaagtttggtgaatgagtgagtggatcctgagatggtagagactttgaggctgggaaaggtgagttatatcagtgtcttagttaaggttttactgctatgaacagacaccatgactaaggcaactcctataggcacaacatttaattggatctggcttacagattcagaggttcagtccattatcatcaaggcaggaagcatggcagcttccaggcagtcatagtgcaggagaagctgatatagttctacatcttcatctgaaggctgctagtggaagactcgcttccaggcagctaggatgggggtcttaaagcccacgcccacagtgacacacctactccaacagggctatatcttctaataatgctgctccctggccgagcatatacaaaccatcacaaatggcatgctcagtattatactttttgatcctttagtctgttggtgatttgactgtacacgcagattatacctctacacgcaggataatccattaggcagagacaccttctccttcatcacccgaaggagtgggatatgctggctacactagattcaaactgagctcgcctgctctctgcctgtgtgtccagctctctgcctgtgtgtccagctctctgcctgtgtgtccccactatgatgcttcacctcgctgacctgttttcctcaatgaaagagggaaatataagttcctaagtcatggaattagaagcttagaataacatacattaaccattcaccagattgggaaacagactaagtgcccagtgaagacttagtcctgtctactcttcaaggcattagttggaaaaatgttatctgtatctacagtgtgccagggaatggagttgccgccttcccacacaggtccttcaggtcctgccaggcactaatgctgagggatggttgcacaggagattttagctgggttgtttttcttcgtagaccagataatacacagtattaccaccttcatccctacatcttttgtccatcagaatattttattagagaaacctcagaagcaccatgtgttaatttccccatgctacagagatgtgtatcattagctctttgggggtctagggtctaggtttctctctctctctctctctcattctctctctctctctctctctcccaggtattgtttcctttctctctttggtgtatatgtgtatgtatacacacatatacatacatatatagtatgtacatatacacacatgtatgtgtgtatgtgtgtatgcatgtatgtgtgtgtgtgtatgtatgtatgtatgtatgtatgtatgcatgtgtgtgtgtatgtatgtataacctcttttgtaagctacatcctgacactgtgcatgcactgctttagaatatgctcttcctatgtgggccatttcctgcacccagttgtgtgctgcattttattagcctgagattctgagttgttgctggagttcctgtgagtagcaggtagcatcttcaaagccaactagattcccaggccctacatggaatggtcttagaggctgcactgaagtttgtggtgcccgtctttgacgtccaagagcattagggaggattctgtttctctgggatctggcttactgtggcgaaccacaaatggccacaggtgacatcctcaagtcaatgccagagctgcgctgcctggcagttgaatctggcttgagcacggtggacattcatcagactctgaaccttgcataggaatggggaggtggcctagggcagatcttagcatcatgaatatggtgttaccctcctgccctctgcagagtttgtgaagaggctccggtactgtgagtatctcgggaagtacttctgtgccagctgccactcatctgcagagtcttgtatccctgcgcggatcctgacgatgtgggacttcaggaagtaccaagtcagcgatttctctaaatggctcttggacagcgtatggcatcaacctgtcttcaaactgttaggtggccatcacagcctctatgcaaaagctaaggaactggatagggtgaaggtgagctgaggcctccatggaggaagtaggtccaggaggttagatgtcccatggtaggaaatgcatgccactctggcttcaggctgtccccagacccttcacaaggcagatagactgaggggtgaatgatcccagggcctctcgcctgtggagcccaaggcccaactaaactgtgcctgttcaggactcaagtatcaaataattcagctatgagtccttgctgaaggggctgttttcttggaagttgggttgcttgccaacacagtatttcaaatatcatttaaaaaaagatttgtttatttaatgtatatgagtgctctatcttcatgtacacctgcataccagaagagggcgtcggattacatttatggtagtgagccaccctgtggttgctgggaattgatctcaggtcctctggaagagcagccactgctcttaacctctgagcaatctctctctagcccctgtttcgaataactttaaggtttgttgtacacactgtcagtggccaggcatctcattcccaatggttggcttcttgctttaggaccttcaggagcaactttttcatatcaagaagctattgaagacttgcaggtttgctgacaggtatgatttccagggggaatgctctgtgctcctgcctggcatattcttcctgatcttggttcctccagtatctctggcttcttagaaccttttattcttgacccccaacactgaaaggaacaaaggtgagctaataagagggattggacaagataaaagtctacctctgccagtggctacagtatagatacaatgtaaatatagtaaatatgatacctctgccagtggctacagtatggatacaatgcaaatgtagtaaatacaatagattgtgatgaacacgcacaacaaggttgtcttctcccacccactacaagctcatggacatagaaagtggttttctgctaccactattcatctgcagaacctccatctcttgcaggatgcaatctctggctatcctcctttcccttttcttcctgtatcctggcccctgacaacctgctttctctctccatggatttgaccactctaagtacctcatggatgtaaatcatagactatgtgtcttttatcactgaattgttttacttaatttcctaaggtctatccacattgcagcatgtgtcagggtccccttccttctggcggctgaatagtatttgctgtgtgtgcatattgatttttttatctgcccattgagggaaggggctgcctctgtcacttgtgagtggtgctgctgtgaggattcccatggcctcacagagacaggatgagggtcacactaagtgagaggatggcttccagaaatgacgtctcaaagcttaccctagggatgttcttatgggaagacatttacttaagatataagtttaggaattaacagagaaatctaccaggtgttcagtaatgggacaatagccaaatttacatcatatctacattatcaaatgcaagtttatagatagttttatatgtgtatttgtgtgcatgtgtgtgcactttgtttctgtgcatgtggaggccagaggttgatgttgatgtctcttaaccactctcctccttatttttttttcttgagacacagtctctcacttggcctagagttcactcaccaactggctagctccagtgagccctggggaccctcctgtctctccccagtgctggaactacaggcatgcactccaatgcccaactttttgtggggatgctgcagatctggacttgcatcctcttgcaccacaagcactttactaaccgaaccatcgccccatccccaagagagctttttaacccaggggtgggaggtgggggaccgggggaagcatatatgacctcaggaactgtctcctctctggcagtgtgctgaaggagtttgagcaagttcccagccacttgactgatgaatgccacatattctccatggacgacttcctcaggaccaagaaaggactgttggcacctttgcttaaagacatcctgagagcttctcttgcccacgtggacagctgtgaggtaagggttcacctgggagaggttcccttcctagtgccaggatccagggagggaggcgtttcttctccttgactcttgatcacatttaactttctcagccccaagcatggagagcattgacccacagccccgagttagctagccagagatatcccattgggactcaagtggaaccctgtagctgcttggtttgaaagcccataccctgtaaagcccattctgtcctgaagcagacattttgaagtgtggtttctgttattgttctgattcattcttctgaaggctaaaatcatagacatcgataagtagatgcttctacagttcccagtttccccaacacaagaagcagtgccaccttgtgaccatagatgccttcttttgcagctgtgccaggggaagggcttcatttgtgagttttgtcagagcacgacggtcatcttcccatttcagaccacgacttgtagaagatgtgcaggtactgaaattactttaataacatcagcttcattataatcacttcacttaattgcaaagttcacttaagtttaatagcttcatcataatgctagcttaaactgaagaatacctcagtgtctcagttagggttttgttgctgtacatagacactgtgaccactgcaactcttataaaggacagcatttaattgtgggtagcttacaggctagaggttgagtccattgtcattacgacttggtggtgtgcaggcggacatggtgtgggagaggtagctaagagatctataaccagatctaaaggcaacgggaaaagggcgatcctgggcctggcttgagcatctgaaacctccaagcccaccccagtgataggcttcttccaacaagaccacacttcctaatagtgccactccctatggaggggccattttcattcaaagcagcacagtctgtcacttgagtacagttagggctttaaagggcagtgaagccgtgtgtacttgaaggtagatgggaggcagtgcagtgtgggacccacagtgaggaatattttgcaggatggggataaagaatgaaatctcttggggtttcgggtaaagtggatggacccagtatggcctgttgccaacactggttttcaactatgttataatcccatccaacattgaagggttgtttctatttttaaaccatagtggagagtggacttgctgttacagagaccatatgattaccaaagtccaaaacttgtgcaactggctcttgtgtgtgtgcgcacgcggtgcgtgcacgtatgccagcatgcatgtgtgtagaggccagaggtctaccttgggtgtcatttctcttgtcacagtccatgttgatatttgagacagaatctcccactggcctagaactcaccaattaggctagactggcccacagtcgttgtgatcccagtccctgtctcctaacactgagttacaaacacacaccatcatatgtgtatgtcttatatgggttctgggggaattgaactcaggcccttgtgttcatgtggcaaacactttaccaactgagctctcccctagggccaattatttgtctctttacagctggggctgcagaaggaatcctatgctcgttggttgtgttgcatgggaaggatgtgggtggggaccctgccctcaactcttctgtgcacatgattcttcttaggatactctagtcttgcaggacagggtctccagaattgaaccagggaattccaggccagaagtaactgaataccaggcaacagacctaagagggaaagattccatggtggtgtgtctataagaagccccgagctatctcactgagctctgggcagcagtgtaggtagcatctcagcactgttccaagtccacagcaccaacctctggatacaggctggtgtcaaggaaagagcatgaccctggatgaggcagctttgcccatttagacccatttccagagaagcaatgccaccttgcaagagccatcagccaccaagttaagattaggtggactgccccccagtacttgggctgatctggaaggatgcagtattgaccacctccattgggctcctgagctcatagccaagagctgctgactaactgatagtcctgagagttttggcatggttggtttctttctgtaagattccgggttctgggtcaggtttcctctctccccgggatgggagtgagtatctatatgtatgtgagaaattaaggagtgcatttgctgacaaccaatctcctcacttgcagcgtgcagggcctgctttcacaaacagtgtttccagtcttcgagatgcccgcgctgtgccaggatcatagcccggagacaacatttggagagcttgcccactgcagcaacatgatggcccaaagttgttccaaacctctcatgatgttaccacattgtgtctgctcctggtaacattcattgtttcagatactaagtatttttgtagtaagaaaaagaggaccaaaattgccctcttgtacgcatttaatgctttcaaggagtatggaagttttgttattaggtatagggttgttgataagggtttgtttacaatgtttgacattgttttgctgctactggctgtttttttttttttttaaagaagtcttttttcatttaagttgcactgggataggttttttttttttttttgaagctaaatacagaacctatttttttatgaacttaactgacaaggtgatgtgttgtttgtgaaatggattggcgccacaaaggagggaagtggcacaagaattctgtttggccaagcttttgttaaagacgactgttgaatgttgctttgtgactatgtcagtttcctgtcttattcattccatggtttggcgtagagtacgtacatgacaacgctgccccaacattcctttctagatgatggtttcagtcgcccaccaaggtcctggtgaactgtcatttagaccagttgcctctagatggcaatgtttggtgagtgcatgctcgacaggtttgccatcccccaccccccaggccctactattcctgttagtccctactaaaaccaagggagccagaggagacaactccattctattccttcatgatctagctttgtggatatatatccagaacatagagactcggaaagctgagcgtggtggtgtccacctgtagtccctgcatttaggaagcaggggcagagattaagactttctatatgaacatagaacgtcacatgcaacctgtactttttttccaaatcttaaaaagactggaattttaaaaaaagatttatttattactatatctaagtacactgtagctgtcttcagacacaccagaagagggtgtcagatctcattacagatggttgtgagccaccatgcagttgctgggaattgaactcaggaccttcagaagagcagtcagtgctcttaactgctgagccatctctccagccccaagaatggaatttttaaaacaagtaaatttggataaaatattttttcttttgtttggtttttgtcttgtgggacagggtcttcttttgaagccctgcctgactgtgaacttgtctcccgtctctatgtcctgagtgttaggactagaggtgtatgtcactattcctagcaagaaagtgctcttaatagtatgctctcagttaccactttaacattgaggcatcccttaagatgcataggggtgccttttctcacaacggtgataaaatgcccatcagagccgatgtgagggaggaaaacctgactggaatctaacggtttcagctctgctggaacatggaaggaatggcagagttcaaggaggagagcatggtgcagactcctgcatacaaaacaggtaggaagcagagagctagctgggagtgaaggctgggatagacccccagaggcctgccccaatggtaagctgaccccaggtagagagcaagtgttgaaacacacgaatctgggttaacatggcggcactctgcacataaaccaagttcagtggattataaaactggtgaaattttctttctaatgattcttatacatacatcttcctagaacatgggtaagcccgtgtttcccccttctctcctgcatagctgctcctacttgaggagaattagggtcaaatcccttcctggaatatcttcaggctgaccagttctcaataatacttgggtatcatgttgcctggcgctgatgcttagattgagcttctcaaacagcaaaggcagtcaacagtgtgctacagatatccccagccccacccgccagggtctcctactgtctgtgttggggcaggagaggaggaggaggaggaggaggaggaggaggaggaggaggaggaggaggttgactttcagtgagagaatactaagcagactgaaacatcagcgtctcctctgtctggatattctgtcaactatttctgttacacgcttccagggggagggtggcatgactgtcaagcctggtgtggcctgagtggggaccaagtgacatgaggaaatgtgcacacagcagacacacagagaaaaagactctgaaagcagaaaacctaatctcttctcaaagcctggggctttcctaaagcgtctcatgagttgttctcctgtccttagggttagtcagtttgaaaacagataggatgggtgatcaggccttgaacttgccaagacagtccatcagcagggagcctgctctgctagtgggagacagaagctcccaggcatttgtctcaagtcaagatggtaaggaagaagggggccatcttgggaattcgccagatttcttagctctatccgtgtcctctccctatcggtttacctaccagagagtctacctaacttcatccctctccgtagaataagtccctccctgaagcagagatcccatgacttaaatgcctctcagaggtcctcagagattcacttacgaaaaaccagttccacaattttgagccacatttgaaacaagctttagttaaatattagccaagaagatggactgaccacgtcccctgggtttccagggaatggtaatgagtcacattttgtagaagacgaaacccataattcactcgttttcaatcgggtccaatcgggggcaagcatatgtcctgacattcttcctgccctgcctacgtgtgatcaagcacatctggtgtagttagttcaaacaaaccatttagggagggaaaacatgtgacttatctcccaagaactgtcgctcccagcgttccaggaaattatcttgtccttgggcaagtgggcttacaggctaacactggctcttccagtccttcctcagcactgtccacaacagcagctaaacttccacagaagttctggagaaggcattaaaagccaagaaggttcctggactgcctcatagtgaactctggagggcagtctgtgagaccacacctcccttcctggcctcccatgggtgggggaggaggacagaccagaagtctgcagcagatcactgcccatcaacagtactgagcaggccactctatcaatgtgggatagggatagagccatgaggtttgttttgggtggccctgggaaataagtccgttgaaaagaaaactcttgttttccaatcaagtctgaggcatcactgggatatccaacaaatggaaggagaggcagaacacttccggtgaaggcagatctgaggcagaggctggggagtgaaccagatgtcagagagggacaggagaagggctgaaggctaggttggagctagcacaatgctgctgcccagtcctgggtgacagtaaagtacaggctctgctccagggcccttaggttttctagtgtattgatgggaggcaggtgaggggtctgcagattcactaacaccgaggtgctgtcaaaatacaaaatggcttcctcttgcagcaggagggagatccccaaaggctaatcagactccatattgaagaaaagggaagagggcagcttcttgagaggactgacagcccagatgcattgacgtgggaagccaggtggctttgacaaagggaaaggggagtgtgtgtgtgtgtggggggggggatagaaggatttagtggggaacggagctgcaaggtagagcccacagtgcccagcccagtgaccggaggatgtttgcagtcctcacagcgcaatgctaagcagggttccaggggacacagctgggcttctgtttcaggaagacagcagggattgggtgctgggtgcactgaggacaaaacagaggcttagtagttgacataggaagacctacatacactagggcagctacagagaaggggaggggaggggacctgggagaggcaggaagaaccaggtccagagagtgtaaaatagaagggacttcccaaggctcagccaaaaaggcaaagcaaagttcaatagtgtcttcaaatgtgatgttaggggcccgggagatagcccagtcactaaactcctcgtgtacgcgtacagtataatcactggggaggcaggagcaaactgccttgcttatatgaatgtaagagttccatgttcacatttggtgcatcgggtccctaggattgcagttaaaggatagttgtgagccacccaagtgggtgctgagaactaaacatgcaagaacagcaagtgttcttaagtgctgagccatctctccaagcccccataaatataaacctttttttaaaagcacaaacatcggctcgcaaactgtatgtctgagatggaatcgttcccctcctactttatgaagataccttcacgggctcctgagagagcggttctgcctcctgttcttctcaggagtgtgacttgtccctcccgatgacactttggctctctcacaatcccccttggtaccatattccagaaaattctaggttcccaggtatccacagcttcattctaaagaggagtggagttgtgggtaatcgtggcccccatagcctctgtctcccacctgtgtggagagagatagcagaagaaaggccatagcaaagagctcagcttcctggctctcaggaaaagcctggtcactacctaacatggacagatgtgcagacgttagcagcaggaaactagtgggctggggtaggatcacaagaccttggaatgagaggaggctagaggcaggcagagaggcctgagaaggagtcagtgctacctcacacacttcagttatgtgattgatccccgatggctaggattgcggctcacacactcaaggatgtgagaccattgtttcctccgcatgctgggagttccaatttctgtttgagtctgcttgtcagagcatcattcagaaaagaaccatgtggttctgttagaggcatgagaaaggggaaccaggatttcccctttcaaaccagttaagacattacttcttaagacaggtcctcaaatgttggttttaaggaagcagccttcacaagggatgttgccagtgagaaagggtttctctgccttgtccccctctggcagtgagctgaatagggcttgttcatcagcagcagtccctggacagtgtcggatcgattggtgtcaaacaggacaggtttagacctaagggcggggactaacatcctatatgcctgcagatgtgtctacaatgatctcctgagccggaacaggaagctggggcccagggcgaggctaaaagggatacattgaatcactaaccttacagataagtctttcaccatgtaacttccccgccgccacattcctggaccaaggcagagaaattttcagccgccacattgtttgcttgtttgtttgtttttgaaagagaaagtatcccttccgccattctgtctctattcattgtcatttattatcattttctggccccggccccattcacccgaagaacattttaacattaagaagaaactaatgggtggatatgggggacttttggtatagcattggaaatataaatgagctaaatacctaataaaaaatggaaaaaaaagagaagaaactaacaaagtttattgagcaagtactatttcctgggcacttaaagacccctttggggaagggcttgatagtagccaccagttaccagttctccttgctcattatggtccccagaacagtgacattagagcacacccccttacctctgaaggctctaaggaaatcacttctgttgtggtttgaaagtgaaatattcctgtaggcacagtgtttgaacacttagttggtggtgctgctatagatgtggataaggtgagatttagccagatgaattagggcaccgggggcgggtgcttagcactctgacatccctggcttcttctgtcctattccctgctccacacctctcacaccagtcacgctagaatctattgcacacacaatgggactatactctgacaccagtcatactaggatacattgtgcacacaatggggccacattctgacactggtcacactaggatacattgtgcacacaatggaactacactctttatggcacatctcctctcactgaacacaaattattttgtgtgtgtttgtgtgtgtagtttatgactgtgtgtaatatgttcatgtgatgcgtgcctctgtatgtagtagatgtgtatgtacacatatgtgtttgcatgtagaggaccgaggttgacatcaggtgtcttcccaaatgctttctatcttgctttgtaagagaggcactgccacagaacccggagcttatgaattaactagactggccggccagtcagaccaagcggttctcttctgtgtgggattacaggtgcacacctctgtgcactcctcatgtgtgtgccggggtctgaagttgagtcttcatgctagtgcagcaagcacttcaccaccatgtctaaattggtaactggttataccaaagaaaacaccatttcccacaagtgaagctggagtccctctaacagtagtattaatattttttagcacaatgctgagaagacaaatgaaacctgagttaagtcaattcagacctctagcccacatgctggaaggagagaacaggctcccacaggttgtcctctgaactccacgtgtgtgccagcgtctttcctttagagtggttctaagtgtgagggagacagacagaaatcaaagagtacagatgactcttcgtgaagaccatcattgactaaagcaaagctttgtggacctggttgtttctagatccattccagcctccagctacagtatggcaaaggaagctgaggcagggtcaaaggccaaaggccagagttgatttggaagcacggctcacatcactcaggatcgagtctttcacttcagtgggctgccatttcctgaggcacagtcggtctgtgaagatgtgagtcccctgtgactttcattggtcagttggctcaggaagagcagagctctatgatggaaatcaggggtttcaacaatggaggctgctgctggtgtctggtgagtggaggacagagatgctattaaatgctcccaggacaaataatctgactcaaaatattagcatgctaaccaatagggcctggagagatgctcacctctaataagtttcgggaatagagatctattaaaaattttaggaaaataagtatgttatttgattcagagtctgaagagcttcagtgcccactgggcagtgtgagcagccagctctaggctggccacagcctcaaaggaaagaaatgacctgactggttctagctctacacttgccttatttatcatggtctcatctatgggattcctgtgattggctgtagcttacagcttatgactggctgacctactaatatatgtactatatatgtgtgttataataaatatatatatatatatattataacgtataacatatactatatataacatacgtacataacatattacatatacatttaatatacagcatactattatatattagtaaatacatttaggatgtttatatattgaggttgaggagtctcagccttagaccaatggcctcctgcttctttgaatactctttcttagttcacagtagcatagtgaatagcaatcataagtaaatttttgtttactcaagcatctctccaacttcttgcatcacagaacccctccctggtacataatcttgacatcatgtgtgtatgtgcatgtgtgtacatgtgtatgtgtgtgtgtggcatgtgtatgtgtggactagtgtgtgtatgcgtgcatatgcttgtgtgtgtacatgtgtatacctgcgtgtgcttacacatgtatgggtatttctgtgtgtgcatatatgtatatttatatatttgcacatgtgtgcatgtctgtgtgtgtgtgcatgtgtatatgtttgcacatatgtgtgcatgtctgtgtgtgtgcatgtgtatgtgtttgcacatatgtgtgcatgtctgtgtgtgtgtgtacatgtgtatgtgtttgcacatgtgcacatagaagccagaggatgacacagtgtcaggagtcacgcagtcacaatcacttttcactttccattttgcgatagggtctatcactgattccacagctcatgggtttgcttaggctgactggccagcaggcttctggaatccttcactttctgcctccccagggctaggattacagaccacagtggctttcatgtggctgaactcaggtccttttatcaagtgagtcagctccccagcctcttgatagtgagctgtagttggaaaacactggccggataatctgtgtttcacctttggaaagtatgctttctccatggccgacttcaggctcactcagtgacctcagacctgtgactgtggacgtgtcattggtctctggtccctcagcagcctcagttttgctggtgagagtaacaccatctacacacgggggtcttctgagggtcaaatattcaatgtcggcatgtcagcagccacccctagcaatcctcaatccaaatttagcctccaagtgtggttttgtctctgtaatttccctttgggtttaccgtaatactagatatgaccagcagagggaactggtgacacggccttgccctgaatgttatttaatgtcctttgcaaggcttagcgagtgaccttttgctgatttcctgtaaactggagttttagagctgaggaagactctggcaatgacaacatagattctgagtggtccatgcacaaggtcagatgcggacttgaccttcatggctctcaacccagctccaggaatggccgcacgatctttctgagggaaaagccaccaaatgtattagtattagcaagcagctgaaatgaaggggtggtggctggtgacacttgttgccacagaaaaatgggctcagcaggccacagaggaacaagcctgatcacagagagctacctgcttttgcctttcaagagctgggattaaaagtttgtgtcacactatcctggttgagcatggttttgttttgcattttgcaacaacgtctcactttgaatttgcaacccacctgactcaggctccaaatcttgggattgcaggcctgtgtctaccagtttatggtagttttttagaagctttctgtctgtagtttgtacaaacgggcatctgatttccagggcctacaactttcaagtggctctcatgaattctaggagtccctgggcttggctcccacctctatgtttccacacatgattcagccttataccaaattacaggcataaagttcaactctttcaacactgaaaacattcacaccaccgtgttgttgctgatggttggttagatttttgtttgcttttttgtgttggctgtgtttgaaacaaggtcttacctacttagcccaggctagccttaatttcatgattcttctgtttcggcttactgatgactggcattgtaggggtgagccaccgtttttgagtttaggaagtgcatttcccatttgagggcctctgggagataccatataaccccttacctaccatctaagctgctggccttgtgtttcctctcaaagctatgtatgctgccactcaggctgacagctccttgtaacctggacagtgggcatcagagctgcacctcagggacagaggtatagggagtgctgcggaagggagccctgtagttggccgacatggttgccgtgggagcagcttccctgtccagaccctgcatctgcagctctgcctcaccctcttcttactctaccctcttgcttctgctattttctttcctgatggtactccgtctccatgccactcccaaatcatccctgtgacgtcctcaccagtggccacatcttttctgaagctgtatctccatccctcctggccacttgctctgctctccttatccagtatcagccctagtcctagtttcttcctctgccccagctcgccatacttatttctctgcctgcctcnnnnnnnnnnnnnnnnnnnntccctcccttccttcccgagaagcatccagttgccttcagtttcacctctgcccttgaaatcttttctgcctggagtattctcctgtatttttgtttaaaaagactttaaaacaatgaatcaataactaattgacaaatcaattaatcactaatgattatggatggattgttgaacttttacttcaccaggttcgtacttacagagtctaggccatgtttagagaacaatgtatcttgtacttaaggagcaggtagctgtgcaagccactatgaaggaccttcagcgattcctaagttattttcattgctacttcataataattttgctactcttatgaattgcaatataaatattttgtatgtaggatatctgctatgtggcctctgtgaaa

SEQ ID NO: 518 - DNA, 2005 bp, Mus musculus
atggtgtcccagtccataggctggggagactctcctgtggacctctgtgaagggagcaaccgtgccttccaggacactgaccaacctgcttgccaattggatgtgaggctcctaagacacaaagcttcctggatcaacccgctgtgtgtgcagcagccacttcaagaattatgcccccaaagaccaaccgtgcagagcagtgagaaccacgtggtgctggacactccctctcccttgcgcctttcgatattgtcctacagggactccctggctgagatgccactgtctgagaatactgctgatgtcatctgcagcaactctgctcattgctccgggggaaaggagggtgacttcttcctggctacagaagagcaagaggttcatcttcagcaggaatctctgctcaaaaaccccaagactgtggccacttccccctcccctaaggagggcagtgcccgttctgagtctcctcatttgacagcttctacagatgatgacatcattatctcagtaatagagaatatgaagtgcaacctcccgaatcaacagcagccagagagatgggacacagaagacgccagcaggttacgtgggactggagcggaaatgaccttttatacccatataaagcaggagccaggctcctcggcttcttcacacactggctgtgaaggttgtgctgcactccaggtcggggatgaagaatatgctgaggaagactttgactccagtgtggatgctgctcgggaagtcatgcttaagtctagggtcccaggaactgaagactgggtgctccctcgatgccaaatcatacttactgttcacccaccaatcaagagggacatagcagtggtggcccagaacttcttctgtgctggatgtgggactccaatacagcccaagtttgtgaagaggctccggtactgtgagtatctcgggaagtacttctgtgccagctgccactcatctgcagagtcttgtatccctgcgcggatcctgacgatgtgggacttcaggaagtaccaagtcagcgatttctctaaatggctcttggacagcgtatggcatcaacctgtcttcaaactgttaggtggccatcacagcctctatgcaaaagctaaggaactggatagggtgaaggaccttcaggagcaactttttcatatcaagaagctattgaagacttgcaggtttgctgacagtgtgctgaaggagtttgagcaagttcccagccacttgactgatgaatgccacatattctccatggacgacttcctcaggaccaagaaaggactgttggcacctttgcttaaagacatcctgagagcttctcttgcccacgtggacagctgtgagctgtgccaggggaagggcttcatttgtgagttttgtcagagcacgacggtcatcttcccatttcagaccacgacttgtagaagatgtgcagcgtgcagggcctgctttcacaaacagtgtttccagtcttcgagatgcccgcgctgtgccaggatcatagcccggagacaacatttggagagcttgcccactgcagcaacatgatggcccaaagttgttccaaacctctcatgatgttaccacattgtgtctgctcctggtaacattcattgtttcagatactaagtatttttgtagtaagaaaaagaggaccaaaattgccctcttgtacgcatttaatgctttcaaggagtatggaagttttgttattaggtatagggttgttgataagggtttgtttacaatgtttgacattgttttgctgctactggctgtttttttttttttttaaagaagtcttttttcatttaagttgcactgggataggttttttttttttttttgaagctaaatacagaacctatttttttatgaacttaactgacaaggtgatgtgttgtttgtgaaatggattggcgccacaaaggagggaagtggcacaagaattctgtttggccaagcttttgttaaagacgactgttgaatgttg

SEQ ID NO: 519 - protein, 519 aa, Mus musculus
MVSQSIGWGDSPVDLCEGSNRAFQDTDQPACQLDVRLLRHKASWINPLCVQQPLQELCPQRPTVQSSENHVVLDTPSPLRLSILSYRDSLAEMPLSENTADVICSNSAHCSGGKEGDFFLATEEQEVHLQQESLLKNPKTVATSPSPKEGSARSESPHLTASTDDDIIISVIENMKCNLPNQQQPERWDTEDASRLRGTGAEMTFYTHIKQEPGSSASSHTGCEGCAALQVGDEEYAEEDFDSSVDAAREVMLKSRVPGTEDWVLPRCQIILTVHPPIKRDIAVVAQNFFCAGCGTPIQPKFVKRLRYCEYLGKYFCASCHSSAESCIPARILTMWDFRKYQVSDFSKWLLDSVWHQPVFKLLGGHHSLYAKAKELDRVKDLQEQLFHIKKLLKTCRFADSVLKEFEQVPSHLTDECHIFSMDDFLRTKKGLLAPLLKDILRASLAHVDSCELCQGKGFICEFCQSTTVIFPFQTTTCRRCAACRACFHKQCFQSSRCPRCARIIARRQHLESLPTAAT

SEQ ID NO: 520 - DNA, 65590 bp, Homo sapiens
  misc_feature (1)...(65590): n = A,T,C or G
ttatgttcaaagcatttggataattagggaaagaaaaaaactgagatatttccaggtgagtccaggaaaccacttggcaggtatacgaaatccagaaactgtatttcatcagtgcaaccaaaataattcaggctctcagggtcctattagtttcctcttgctgctgtaacaagtaactataaatttagtgcttaaaacaatagaaatggctggggacggtggctcacgcctgtaatcccagcactttgggaggccgaggcaggctgatcacttgaggtcaggagtttgaggctagcctggccaacatggtgaaaccctgtctgtactaaaaatacaaaaagtagccaggcatcatggcatgtgcctgtaatcccagctacttggaagctgaggcaggagaatcagttgaacccaggaggcggaggttgcagtgagctgagatcacaccactgcactccagcctgagtgacagagtgagactctgcctcaaaaaaatcaaacaaacaaaaccaatagaaatgtattatcatatagctctggaggccagaagtctgaaatgagcctagcagggctaaaatcaaggtgtcagtggggctctgttccttttggaaagctctgggaggatctgattcccagtctcttcctgtttatagaggctgcccatattctttgcctcatggatggcctccttccatttttttcaaaggcagcaatggctggtcaaaattttgtcacaatgaatcactctgactctgactctcctgtctccccctcttttactataaggatctttgtgatgacattgagctcatatggataacccaggataatctcttcattttaaagccagctgattaactagcaatcttaattctttttaaaatttttaaaaatattttattttaaatttttgtttatttatttttaagactgcattatgagactggccaatttttgtatttttggtagagacaaggtttcctcatattgcccaggctggtctcgaactcctggcctcaagtgattcacccaccttggcctcccaaagtgctgggattacaggcatgaaccactgtgcccagcctagcaatcttaattctatctgcggttttaattcccccttaccgtgtaacataatttcaggctcctggcattaaaatgtggacatctttgggggaccattattccacttattacagggtctgatgtaatcggaccaaactcactagagattaatatataagcaagaatgataatttattactatgtactataaaaatataacattaggggagtggagtaggtgggaatgtccatactggttggtaaatggcttctctctctcttttttttttttttcagtgtattttctcttttattccaacgctatatttactttttttttttttttttttttaagatggagtagcactcttgttgcccaggctggagcacaatggcacgatctcagctcactgcaacctccgcctcctgggttcaagcgatgctcctgcctcagcctcctgagtagctgagattatagatgcccaccaccacccccggctactttactaatattttatttagggtctttgcaaacatgtgaatgagttaaattgttttatttattaattatactgtaagttctgtgatacatatgcagaacatgcaggtttgttacattggtatacatgtaccatggtggtatgctgcagccatcaacccctcatctaggttttttttgtttggttttgttttgtttttttgagacggagtcttactctgtcacccaggctggagtgcagtggcgcagtctcgattcactgcaacctccaccccctgggttcaagcaattctctgcctcagcctcctgagtagctgggattacaggcacttgccaccatgcccaactaatttttgtatttttagtagagacagggtttcaccatcttggccaggctggtcctgaactcctgacctcgtgatccacccgccttggcctcccaaagtgctgggattaaaggcgtgagccaccgtgtctggcctgtcatctaggttttaagcccagcatgcattaggtatttgtcctagtgctctccctccccttgccccccaccccttgacaggccctggtgtgtgatattcccctccctgtgtccatgtgttctcattgttcagctcccactttgcacgcatgtttattgcagcactattcacaatagcaaagacttggaaccaacccaaatgcccatcaatgatagcctggataaagaaaatgtggcacatatacaccatggaatactatgcagccatacaaaagaatgagttaatgtcctttgcagggacatggatgaagctggaaaccatcattctctgcaaactaacacaagaacagaaaaccaaacaccacacatgttctcactcataaatgccttctctttctataagcaaatttacatagaaagtccacttttaagtagatggcttggtgagcataaaatcagagcatcacattaagctgaatgactttaatggctggtgaagttaattgatgcaagagaagctggatctataaactttatagagatgcaacctctgttcaggtcacagaccagtatccgttggtattcattgtaccagtgcattagaatttatgaaccactgtggcaggataatttattgaggaattcatttgtattttgcggctgctgataattaataaattgctttgttttgttcttactgctttgtggaaaaatctgaatcaatgagacctcttttctctcccctcctgaaagacggccagcagggctgggagtcccaaggggcagagttaaagatttttgtctttagtttttttgtctctaagatacggtatgcagagaggcaggagttgcctgactgggaggtagcttcttcaggtaggagataagggagagggattttttgtttgtttgttttgctgggaagtttgaagaaggtgtttgaatgaggaagagactctctgaaagggtagcatttggatgctgagccattaaacctctaggggcttggcaaaggatccctgtacctacactgggcatagagtgatagaacttcctaattaacacaggctttgaaaatgggaacttctgcagtgataatgatggaacaaaggccagaaatctttccccagatgttccataagtacctgagctctcaagaagctctaggggggtaagagtaaggctctccaacatgtggcagactccattgcttgtcatttactcaagtaggaaataccaggtcaatttcatttgagttagaagaaattttggaaaaataaggtaatgtcacttttttttgataccagagttatagaataaaattcatactagccacctaagattttatctaagtcttttagcctttccttatcaaacagtccatgtggaaatgacttggggattatctagactgggctacaaggctacccccaagacaaaggaaatgtcaggcacaaaacactgaagtatagggtcaacactaggaagtacatgtgaagaatataagatgtggtcaatgacttggggtacgagggtaggaaaatggagaatattcccagaacaattggtagctattgtggattttagggtatttgaggcaggcttgaaagaagagactgaaaattaggttgaaatttcagacaacactataaatgttagacgaagactttgaactttggacatattaactgtttccaagcatgggataatcttagtttaacgtctttctgttttgcaggatggcattcaaatcataccgcacaagccatgagagcagttaaaaacatttacaaaacacctaaaatatataaagtacatggctaggttctggatgggggatggggaagaaattcaagaatgagtaaggttttcctggctccacaacccagtgggcaagacagaatacaaacaacttaatgtttttagttctaacggtagattgccattgcactcatgtggaaccatggattttatctataccacattgttagtcataaaagtagaccacaagacaggtgcagcttctagttctactagtccagctaagagcatcttcaaagaggaaaagtggcaactgtgtactgaagacaccggaggaaggactaaaagtcaaaggttacttcttgttatctgtcagaccaagagcacatcccctcatacagtcattttcaggaacaggcttaccctggggataatggtcagcctgaagctatgggatggtcctaactggtcatcttggctgctggaagcaaatagtcagttgggtctataatccttttaatttcttcaatttctctctctctctctctctctctctctctctctctctctctctcattccctccctttccttctccctctctctttgtaaatagtgcatagatttaatatcaaaggtgtcgacgaaaagagtcaaactctataaaatatttgaagagatttattctgagccaaatatgagtgaccatgaccagtgacacagccctcaggaggtcctgagaacatgtgtccaaggtggtcagggcccagcttggttttatacattttagagaggcatgagacatccatcaaatacactgaagaaatagttggtttggtccggaaaggcgggacaattcaaagccggcggtggtggggcttccaggttataggggaatttaaacattttctggttgacaattgattgagtttgtctaaaaacctgggattcataagaagggaatgttcaggttaagataaaaattgtggtgaccaaagttgttttgaagtcttatagtgtctgcccttagagacaatagatgacaaatgtttcctattcagatcctagttaatctctttagattgggagggtctggaagaaaaagatctagctattttaatagagatcttttacagatgtaaattttcccccacaaagaacagctttgcagggtcatttcaaaatatggcaaagaaacacgttttggggtaaaatattttgattttcttccttgtctcgtgatgttatgccagagtcagattggaaagtaagtcacgacatacagggttaaataaaacccatctgatgagaatttatgatttgtagggcatgactccccagaccgcttagataggaatttaggcaagaaaaaaaaatgagtttagtcctcaaaggtaaagagtcccttttagggccacatctctgactatgccaccacaaacccccagctacttaacaccagctggatcagagagtaaaatggcagaactactcttccttctgaataaggagctgcaacaacccaaaagctgggccctgggcacccctaaatggaaagaaaaataaattaagatttatttatttatttgattattttgagacagagtcttgctctgttgctcaggctggagtgtagtggcactatcctggctcactgcaacctctgcctcccgggttcaagcgattctcctgcctcagcctaccaagtagctgggattacaggcatctgccaccatgcccagctaatttttgtattttagtagaggtggagtttcaccatgttggccaggctggtctggaactcctgacctcaagagatccacccacctccacctcccaaagtgcttggattacaggtgtgagccaccatgcctggcaaagatttattaacattcatagagccaggcgtagtggttcatgcctgtaatcccagcactctgggaggccaaggtgggaggattgtttgagcccaggagttcaagaccagcctgagaaacatagggaaaccctcatctctacaaataacttaaaaaatttagctgggtgtggtgctgtttgcctgtagtcccaattattagggaggctgaggtgggaggatcacctgagcctgggaggttgaggctgcagtgagtcatgatcatgccactgcactcaggctgggcaacagagcaagaacctgtctcaaaaaaaaaaaattaaaagcaaaaaggctgggtgtggtggctcacacctgtaatcccagcactttgggagaccaaggcaggcagatcacctgtggtcaggagttcgagaccagcctggccaacatggtgaaaccccatctctactacaaatacaaaaattagctgggtgtggtggtgcatgcctgtaatcctagctagttgggaggctgaggcacaggaattgcttgaacctgggaggtagaggttgcactgagccgagatcatgccactgcactccagcctgggtgacagagtgagactccatctcaaaaataaataaataaaaattaaaaagagaaatgaacaaaaattcaagtgaagaatttccagatgtaggggccctgtcagctgattgctttcacctgggcttttactccaaagaagtattacatcatgataatacatttatattttttacatatatatgtatatgtaaaatatataaataatatatacatatatacatacaccatacacataaatatttgtggtaaaatataacaaaatgtattatcataaccatttttcagtgtacaattcagtggcattaagtacatttacagcattgtgcaactatcactacaatctctctccagaactttttcatcaaccagacagaaaatctgtgtccatcaagcaataactctgtattccccatcctgccaggccctgccaacttctgttctactttctgtctctatgaatttgtctcttctaggctcctcatgcaagtgggttcacacagatgtgtccttttgcagacagtggctgttaagtcaggcaaggaggaagagaaacagccaagccaaatgcagctttcctcggttctttccttccctggtgcttgtctgggcttctctcccatgcaaaatcatcagtctttcttcctgggacttctatgtggtgaagatgccattaggcaccctctggtagcttataatgcagttcatttcatctcatttccttcctgttttgtacagagactggtttcccctttgctgactgtcagctgagttcaaaactggggtcaaagctctgctcacagcacaaatcacttcttgtgaagcctggctgggttttggcaggcagctgctaggctttcggtcttttatgaggctatcctggccacaatggagctttgtgtgtgatcaatgggtgctgggcatgagcccggctgggctagctgacacagtgagttgtccctgacactcatgactttcaagccctgtgtcttggagggcactgtgatctggaagttcaccttccccatgaaaaaacccaaaccagcctctccttttcctgcatggtgatccgtctgtaatgatcagtgacattctcagaattaaccaatcaggaaattcttggaaagtccacgcctcagcatttagtgcttgggaaattctacttccagatcccagaggggacagagcagatttccagtgagcattcctaacttgaaaaacctgtccttgaatgtttctccttagtcctagagatgctctttcagaatgtgaacctcctgcgtctgtgacgagatgtagaaggtctatactcagagttagtaggatgtccacgtgatagtgcctaggcctgccttatggcagttttgagaaaggtgatttcagagtggcttcagaggggatgactaaagcccacaatcttggtccaaaatatcctaatctccctacaaaaacgattttcttgccttggactatgtccagtctgccaactagtacagctgtttctggtttttgactcactgatttacctggcatgacatttcctcttgtttcaagattctttctctaagttcctcctgactcctctttccctttaagtattcctgaaactggctcttgcctggtccctttatttcattattcttccatcttgctggtagtatggtggaaattggacatagggtttggtgtcagatacacctgccttcaaagcctaactgtgctacctattagctctgtgaccttgggcaagttatttgaacctaagtcatagatttcccccttgcgaaatgggaacaaatgatttgttattctcagggatgttcacagacttgcttaaaataataagaaaaagtacctggcacatagccgatactcaaaaaatgttagcacacacccacacctttttctttctgattcatttaaggtaagcccttcccaatcggccttcagctgacctgaattcctgggatactgtatttggaattttaaatattccaaatatccagagttcttgcaggtcaaagctggtctatgctccaaacaggctgcccccaagggaagcagggtaattggcagctagtattcatctgacttttgtcatattgattcaatattttatctgaagatggcagcaactagtacatggtgccaccgtttagccactccatgccagaggtaccaggcaagtaaaagccaaattaccagtgcctctgctccatcctggaaatgacaaaggacaaagccaaggaacccaggaaagtgcaacgggatttggttttatgcagcagggaatcttctaagaaagccaggaccggttcacctacgtgtcattaccagtgcaggcagctcagaggtccttccccgggagaagtcagggcaccgcgagagagagcttagcttccttccttcctccatccctccctcccttccttctgggacttaggttccttccttccttccttcctttctacttttctttccttccttccttccttggctttggttccttccttccttctaccttccttccttccttctttccttccttcctgggcttaggttccttccttccttggcttagattccttccttccttcgcccttccttccttcctttctttgctttccttccttccttccttccttggcttaggttccttccttccttccttccttcttccctccctccctcccttgggttccttcctgcctgcctgcctgccttcctccctccctccctccttcccttcttctcctttctgtttttttttttttttttttttgacagtcttgctctgtcgcccaggctggagtgcaatggcgcgatctcggcttactgcaacctccgcctcccgggttgctcctgcttcagcctccctagtagccggcataacaggcacccgccaccacgctcggctaatttttatatttttagtagagacaggctttcaccatgttggccaggctggtctcgaactcctaacctcaagtgatccatccgacttggcctcccaaagtaggtgctgggatcacaggcttgaaccaccgcacccggccagagcttaggtttctattcgtgacaactttctgtattggttggcaggttctcctagcaccaccatgatctcaggactaaccactgcacacccgtgatgggattccaaaccttcgctgcaagaggacaaggtgacgagttgctgacagtgaaggctaaactaacgcggacagtgaagtgctacatgagtcggactcagactccaggtgaagcagccagcagaggtcagagagagacagctcacgttccgggtaagttgcaggtcgatttcagggccgactcatccagattactcattcttcatttcaggcaattgtatgactgctaaatactgctgctgggggcatctggggttgggaagtcatttctgccaggtctttgacccctgaaagcgtcgttgcgtctcgcgccgcgggtaggcagggcgggatttctaggaggaccggcagaggcgcgcataggtgcgtggtgctgggcccgggcgccgcggcaccggtgtaggagcgcgcatctccagagtttcttccatctgggcgacgtctcggtgcctgcggcgggaacggcgctttgcttccctgaggagcttctagagagctacggtggcccccgtgtgggaggcggggggcgtggcggcgtcggggcgtcgctgtcccctcctcggtagctctcctccctcccctttctgctgttaccgggagcgcggtggccacggaacgctgcccggagccgcgcgagggaggacccgacgcgcggcgtttacccagcgcagcgttccaccgctcgggtttggctgggtgaggctggcggggccgggggcgagatgggagcggcgcggggtggagagggtggttggagaaagggaagggagggccgcgggagaggttggatggtggaagtggcgccagagaggtttgtgcccagcagagacacccaggtatcttagggtcgctcagagcagtgtcggggaccccttggagacagtaggaaggggctcctcgcggggtggcggatttctatccggttgactttgtagagtgaggttgaccctgtgttcggcttgggccgggaagggcgcagaagcgggacctcaggacacttttacgcagggcgattctcagagactacaaagcctgcgccctgcgtcctcccaggcgcagtgttctgggatcagtgtcttttctctgttttcgtcctcaacacagccaaagtcgtggatatgtggtgacagaaaaacatttggctacataactgagctaggctggagtgtgaaatcgcggcgtgttatttggtccgggcgccctacatagcaacccccactcttctcgcccccaaccccccgccacgccggacacggtcaggcgggcgttcccccaacccgccccttgtgaagtccacctgctgagactgatacagatcccctgcgaacttgatgctgtccgcttggaaaacgtggagaactttcagaggaggggttatttcgccttgagtgaaaattaagactcaaaggaaaaggtatactcaagagctgcccttactgggttatttctgtggaatttggaaggatctttgaattgaagatgtggtgggagcgcgcagagaacagagaatccgtaagcttgagtttcttagacccagtttcttaaagccaaagtagcggggagatcttggcaagtcaagaaaccttcttgaacttcagttcccttgcctcagggggagaatactccagccataccccactgtgtggtttagaaggttaatggcctggagggagggaagtgttttgaagcctataaagtatcctgtgaaggtatcaccacattgctgcccactgaaacactgccggccgccgacagaactttgtttggagccgagttaagacagcatctttatggcagtgctggggtttttgtgattaccggtccagagtgtcaggacacctctgtttctcaaaccccagtttctgcactgccacatgaaactgctcattactgagtgacagcagaggacaggaactttgccttcttcattaacttctttagggcctttacaaagtgggagatggtaggaactttgatgaaaattgagggtcatagccttggagcggggtgaggggttagatttgactggacatagtcttcatgcaaccgtttaacaacaaaaacattgttggctgagttcttgttttttgatacaaggaacattctgtcggagccaaggttaaacatccaagagtaaacgtttgttggttttttttttttttttgcatgatctttagaggataagtaaaaaactaaagaaaggctgcattgcttgctgacacattttttccccacccatctgaaggcacacaaataatagcactggcaaatttgaatagtttcccttgttaccaaatctacgttcttatttctaatatggaacgattatttctagtatggagagaaatatggaatttctaatatggaagatttagcatggtgtgtcattgtaaaaatttaggcagttcttggataagtatgtccagccttccagagactataagtgtagtaatattagtgcctgttagtcatattgtgtatcttcctgatacccaattagatctctgattgttttttctttttaattaaaaggagctgaaagatgactcagttaagaagctggaaaataaaaccaggtctctgtaactgtgctgtcttattctgaactgaaagtctttctgcaataataatgatggtgataataaagctaaccttcataggacattgtgtaccagactgatacacgtgctacaattctgttcgttctcacaccatccttcatgggggaggttaagagcattgctcaaaatcacacagctaataagtcatttttctcagattggcgttaaaattatatttaattgggtcctgtgtgtgcgagtgttttaacttttgcattgtcttttatcccacacacggaggcaacatggatggtgagactaggggctatggacaaggttccagggtttggacttgagcatgctgctgagtggctatgtggtcatcactttacttccttttctaacccgtaaaatgatgataataattctacattgaatgaatcctttgtttctactgagcccaaagtctgctccgtaaaggtaaaatacttctcagagtgtagaaagaaaagtttcagattcaagcctttttgtcatcagtaggctggaaaatgaatagaagttagaataaactatacacttaatgtgatttttccaacaattatgttgaaaaattgttcaaaaatgcattcattccaatgatccttagctttatatttattaaaagaagtaaatgtaaattagacctcaacgtttttttttaacaggtaacgttgaaaagcacccacagtaagcaggtactgtttgctggttgattttagatgatgaaaattgtagagtaagtacgtttgcagaaaactgtagagtaagtacaattatagagtaagtataagaagaattgtattcaaaggtattgtattattcttataaagaaatgtattcttcttatacttttttacgttcttttattccgacaagctagagttgatcagaaaagaactgaattccaaaaatatgtttagggcacttccctattctctctgtatttacttggaaatgattcttagaagtttttggcatgggacttttaagtttgttaagtgaagggactagcacttatctatatgcatattttgcaagtatttttaaaaatatggctcaattgttaaatcattttattcgtcccatgacttatataaaaatctgggggttttttggttgctcacttttagtttaggcttggttttatggtgatctgggctcagggaggtagacatgtcaatgtcattagcattgccaaggtataggcagtctgctgcatgctgtgtgaatattaatattctgaagagatatttgagtccacaagatttaaagatcttctgttcaccgctgtgcttgtagaattagggctaaattagtttagcctgggcctcctgggtcttggtcatttgaaaatagctcctcaagtaggctggctatgtgtcttagtatagcagaaacaattcattattcactccatgtgtcgtctattatactgtgaaattacagatgatagttttcttgctttctgtttttccaaacagtgccacctggacttgtgggtttggctcatatactgactgtttcttaatcaagatagctttaatagtcttcaccctacccccatcctccagctgccctttggatgttgctgtgtagaaaccaagagagttcatttttgttgggggctgggctaggttgctaataatctgaagcaccatgaaggattctgacctaatcaaggcataaggaaatgatgtgtgtgtgtgtgtagaaaatttggaactgtgccaggcacaaagtaaatgtcatataagcattagttatgaattgatgaggaggaaggtgtcagaagatgaatgctgtagagaaggctatggggcagtacatggagagagtggttatctgtagagatgtggttttgtcataggtgatgggaaaggtctcagtttgaaggtgatgggtaaggtcttcatttgaataaagatccacaagagagtatgggtagaggggcatagaggtgtccaggtagcagataaggaggtcagataggcaacctagggactcctggacagatgtagcaaattgaaggtttttagaaaacttaaacgggaattttttaatggaaaatttcaaacttaaacatagaatagtacaatgaacaaccttctcccttctcccagcttcggcagttatcaacatggccagttgtgcttcatccatgttgcccactggcattattttaaagcaaatttaagaaattctaccaattatttctatttatcgtccccactgacattctatcagttatttctaaatacttctgtatatatatttctaaaaaataggcacttaaaacataaccacaatacttaactttttttaccttgtttatcatctgtaaatcttggccttagagccttcttgcagcactggttgaaagataagcatggataggccaggcgcggtggctcatgcctgtaatcccagcactttgggaggctgaggcgggtggatcactaggtcaggagatcgagactagcctggccaacatagcgaaacccagtctctactaaaaatacaaaaaaaattagccgggcatggtggtgggcgcctgtaatcccagctacttgggaggttaaggcaaggagaatcgcctgaacctgggaggcagaggttgcagtgaactgagatcgtgccactgcactccagcctcggtgacaagagcgaaactttgtctcaaaaaagaagataatcttggatgtctggattccttagggtagggtctgacagtaggtgctcaattgctagtggtcatctgttgtctttaccagcccttgatttttttttttcttttccttttctagatagttctatcatgacaatttcacttttacttcctctttcttctccttacctatttttgacacatttattcagtatttcccgtatctactctctacttctccttttaactttctcctatcctttcagtatttttgttcacagcctggtgtgtagcttgtgctcttttgatccctgtagcccatgaaatacagctccctttagttctagatctttttgaagggagatgagcatttcctattcttattttttaaaaaatactgttactgagattgagatagaatttacatgccaaatgcttcactgatttaaagtgtacaagtctagccaggcatggtggctcttgcctataatcccagcactttgggaggctgaactgggaggattgcttgaggccaggagtttgagaccaacctgagcaacatagtgaggtctttcctctacaaaaataaaaaattggccagatatggtggcacacctgtggtcctagctgctctaaaggctgagacaataggatcactagagcccgggaggtcaaggctgcagtgagccatgatcatgccactgcactctagcctgagcaacagaggccgaggcgggcagatcacctgaggtcaggagttcgagaccagcctgacaaacatggagaaaccctgtctctactaaaaatacaaaaattgccgggcgtggtggcgcatgcctgtaatcccagctactctggaggctgaggcagaagaatcacttgaacccaggaggcagaggttgcagtgagccgagatcgcaccattgcgctccagcctgggcaacaagagcgaaactccgtctcgaaaaccgaaaaaagaaaaggaaaaaaagtgtacaagtcagtgattttcagtgtattcacaaatatatgccatcattaccacagttgattttataacattttcatcacctcaaaaagaaacctggtaccctttagctgttcccatcccaccaccctaagcaaccacgaatctcctttctatttcaatggatttgcctattctggacattttatatatatatatatatgaaatgtcttttgtttctggcttttttcacttagcatagtcatttcagtgctcatccatgtcagagcataaattagtacttcatttctaatgatggttgaataacatttcattgtacggatatagcacactttgttaattcatcaattgatggtcatttcatttgtttccactttttggctattatgaatagtgctgctagaaatattcgggcacaagtttttgtgtgaatgtgtgttctcatttctcttgggtatatatatccaggagtagaattattagattaaatggtaactgtatatttagtatttgaggaactgtcagaccatttttccaatatggctttccattttatttgcccaaacatggaaatctagccatttttcaagtgcagctgcctacctttactttgggtaaatttctgtattaatattttttcactgtcttagttatcaaattctgttgcatgtaaatctggttttttttaatatatgtaaagtttttaggtagaatgttaatttagtggtggtccccaaagtggagggcatttacctttaagtgtaagatgattcattggaaagaaagaacaaaattctatttttacatatgctgtatgtatcctaatgtattagcatagctgtacacatgtaaggtgtataaattaatattcttatattagatctgtgtggtgcaaagtttttttatacaagtatgaataataataaaattttgtgaacaattgtccagaggcatgaaatcaaatatacctatgtaggtcttaatcctatattttatgacatgtctgatgggaaagttcttaaaattactttgctaatgaaattgaaaatagcctgctaatttcagcccacacggaatgtgtgaaataccagtggaaacagctttggatcaggttcagacttttgtttttgtcctacttctgctaattactaatggcgagactttgggtaagtcccctaatggtctccatttcagttctcaacttggcataataacacctgaaattttgcaaattataactttgcagaatgagactgggaagggcgtcatatgcagcgaccagagggagttagtcatttgggtgttttgggcaaccctgcagttcttttaggtgaaatattcaattttccatgaactttgccttccccttcttacttacccatttctcttgattgctttctgtccttctgttgtgttcttctgacagcaaaccttcaaaattaatggtcattaccaaaggctaaatcagctggagtggagtcctttgtgataccacccagccagggaaacagtatagcactgtttcctttctgctgcttttattacaacatagtatagagtatatagatgaaataagaaaattgcagtttactgcaattcctggacactgttttggaagctgttgagttaaattattgggcatcttgatggtttctatttgatatgtgatagttttaggctctgttattctctttgggatgtgaatctttgcctaacgtcaaagcatgaagagaagtagatcctgagaaagaagggaagaagttctggggaactgtggtaaccaaacagctcacatgctacagttgaagatttattcatgctctactcagtatttgtttattactggctgtgcttagtaacgtaccataaaattgataaaaatgaattttacttttcactctagactcttatttatttgtgatttctattctctagtatcctttattctaaggaagtggttgatgaacatttaggtcatgatttctaatttcttctaaagggtgacatccattcttgacttcctttcttgggtgacaaggaaataaacaacataaccatatctaggtatcgtttgataatttgttcatgatttcattcataagtgcaaagaatatatttattgaacacctattattgccactggtctgggttctggggacaaagcagtgtccaaaatacgttattttaaaaagtgccctcggccgcctgcggtggctcatacctgtaatcccagcactttgggaggccgaggtgggtggatcacctgagatcaggagttcgagaccagcctggccaacatggtgaaaccctgtctctacagaatactaaaaattagccaggcatggtggcgggcacctgtaatcccagctacttgggagactgaggcaggagaattgcttgaacttgggaggcagaggtcacagtgagccgagattgtgcctgggcaacaagatggaaactctgtctcaaaaaaataaataaataaaaataaaagggccctcatagatttaacattctggggggtactagtcattgaggttagatacaatgagatttgtgctaaagagagaaatagagctaaagagagggataggaactgtttgggaggggcaattaccagtttttatagggtgaccaaggaagcattactgacaaggtaagatttaaggtgtgtctttactctgatgcccccagttgtgtattcaataggcagttagtattggggcatagaaaatcctaaaacctaaatctgatgtacttttgcctattcatgaaataacttgaagactgttatacatagtgggagctaaagctgctctgccctccaagtgctggctgcttatgatctgaaagacttctgtgaggtcaccgtaggcatcatggtggcactgaggcatctatccctcctgcagaagttgcatctttgctgttaatactgtgtctctggtggctctagtgatgcaatcattctcgatggggccactgactctgatgtcacaatgacttggctgaaagtgtcctgaagtctcttgtttgtccagggcctttgctgcagcttatatgttcactagtaatctggcctgtgcctaccttttaatcccagctggaaaatctcagtaagaatgatggtaagctttgagattggtatctcttcccttaaatgtttttggaaattgattttattgtttgtacctaagtatctctgattcaaaggaccccctttgtgacagtggcaggaagtatgttgagaagatgctaagtattgcttagacctgtattatctctgcttatcaatccttgaaatgattgtgtgtctgaatgtataaatgtatgtctattcactatctcccttcctccagaacataagctgaggaagggcaggaagcttattttagtcccgtctgttaccccagtgctaccaaaacaaaaacaatgccagacctgtagtagatgctcagtaaaaaaatatttcttaactgaataactaacacactacaaacaatatggcaacaagtaacatacctggcagtggtatcatagcatctggcaaattgttttttgccttacagataaaataaaaaatggggatattgacctcctgtcactactgcatggactttgatggtttccaatcattactttctcctctgtgtcaatctgcctcttcgagaaattcatactcctggtgagtgtccgacctggccttttgtcttctctctgccactgcccagctgtgaccttagacatggttgtgaatctattatgggcctattctaactctcaatgctttgattttataacctggcaaagcagcacctgctggttatttttgtgaagcaacaacacttttctagaaggaagtgaagaaagcacctgcttttgacggttgttttttatgaggacgttggtttttgctcaattcacttaggtcagtccatgtatgggaagttccaaataaggtcattctctttgaactattaactataacttgtttataaaaaacactgggatcagccaggcacagtggcccacacctgcaatccagcgctttggaaggccgagttgggtggatcacttgatgtcaggagtttgagaccaacctggccaacatggtgaaaccccatctctactaaaaatacaaaaattaggcaggcgtggtggtgcccacctgtaatcccagctgctagggaggctgaggcatgagaattgcttgaatccacgaggcagaggttgcagcgagccgagatcgtgccactgcactccagcctgggcaacagatcgagacttgtctcaaagaaaacaaaatgaaaaacaaaaccacctggaatcactactgctttaccatttgagactgcatgtttttcatgtgatttcacatctatagtcatctccccccaccaaacacacaaaagatatgtgtagaaaattgaggataaaccataacttacttatatagttttattctcttggaaataatgaggctatcatgaactatggactcagactaagagtggaactagtaagagaaaggaactaaaaaaagtcaaccaaaaaatgacatgaacaaggatgttcattgttataaactgtataactgcaaaaagctaaaaataaatttctatcagtagggtctggctaagtaagtatgatatatttatactatagaaagtgataacacagtttaggagaatcacatagaccctcaagacataatgttgagtgaaaaagaagataagttgtaaaatatctccagtatgatcccatggatgtgtatacaaaagaaaacatatcttctggtctgaaatatgtacgttaattcatagataaaggtctagaaagaatagaatggttaacaatgttatttctgagaataaagtaggattgtggggcttggggtgatgagcgctgttcactttttactctaggcttctgtgtttgggcattttataaaaatgtagtcatggtttccttttgtaattataaaatccagaattattggagacgaaaagatgtgtgacaaagagaaattggtgcacaaggtgggatttgaggtcaggagaaggaagataggcattttgggctggtgagttctggcggttaacacaaccagctgtactctgtgatattttgtgaatggtgatttggggcttttgtagtgttttcaagatgcatgtatatgtttatatatgtatgttacatacaaaagatgcatttatatattaatatatgttatatacaaaggtatatatatatctatatgcctccagaaacaatatatgtcatatgcaaaagatatatatatacacacacacatagagttgacccttcacaatgcaggggttagggacactaacaccctgtgcagttgaaaatctgcacacaacttttgactcccccaaaacttaacactacttataacctactgttaactgcagccttactgataacataaacagttgattaacacatatgttgtatgttagtgtataatactatataagcattcttacaataaagcagaggaaagaaaatgtcattaagaaaaccataaggaagagagaatatatttactgttcattaagtggaaatagatcattataaaggtcttcatcctcatcctctcatgctgagtagactgaagagaggaaaaagaggcgttagtcttgctgcctcatggtgacagatatggaagaaaatccacatgttagtggacccacaaagttcaaatccatgttgttcaagggtcaactgtgtgggtgtgtgtgtataaattataatccttattactccagaaggtataaactaaaatatagggccctcaaatcaagaagtctccaaaactcttgagacttaaagtctcaagaacagttttcatatgtaccttattttggtctactgaacttttattattgggtgagaacaatttcatgttttaggaaatgtggattcacttctattcctacatgagtaattctgccccattaatagaacagttatatctgccacagaggtcttttctctagctctttttttgttttgtttttgagacagagtctcgctgttgtctaggctggagtgcaatggcatgatcttgtctcactgcaacctccgcctgccaggttcaagcgattctcctgcctcagcctcctcagtagctgggattataggcgcccgccaccacgcccagctaatttttgtatttttagtagagatggggtttcgccatgttggtcaggctggtctcgaactcctgacttcaggttctccacccgccttggcctcccaaagtgctgggattataggcatgagccactgcgcccggtcttttctctagctcttaactttgtctccattttgttggatttgttctttccgttcataaacatttattgaaccctgatatgcagctctaggtatggggcatgctacccggcagggaacagacaaggcccctcctctcatgaagcttacagttaggtgggagtagggggagaatggcggtaatgaactaaaaaatagcaggaagtgagcacctctgtgacgaaaactaaatgtttatggtgatgtgagaggtaatgatgggggaactaccttaagcagaaaggtggttaggaaagatatctttgaggaagtaatttataaatcaaggcatttatgacaggaaggagccagatgtgtcatcatctgggggaggagcatttcagaaagaggaaacataaaacagcattcctagggttagaaggagcctatagggttcaataacttgcagtgtggttggggcttatggaggctggatgaagataagtgagagaggtttacagggacagcatcatgtcaggccttgagggcaaggtaaggagtctggattttattccagatttgatgggaagtctttgggggatttcgattagggcaatgacatgatctgatttaggtttataaaagatctcttgaatacctcttgattataaatgggcaagagtaatcgcttctcggccttttggctaagatcaagtgtagtatctgttcttatcagttaatatctgatatgtcctctatccgaggacaatatattaaatggatttttggagcagggacatggactaggagcttgctccgtccactccatgcatcaacttggtattgctgtacccctaggaacggcgcacccctctgggtgttaaaacacggtgttactggccgggcacggtggatcccacctgtaatcccagcactttgggagtctgaggcaggtggatcacaaggtcaggagttcaagatcagcctggccaacatggtgaaaccccgtctctgttaaaaatacaaaaattagctgggtgtggtggcatgcacctgtaatcccagctacttgggaggctgaggcagagaactgcttgaacctgggaggcagaggttggagtgagccgagattgtgccactgcactccagcctgggcaagagtaacagcagagaaatctattgggaagctatggctgcacgtccaggtgtgagaagacggtaactcagactaagacagcagctatagctataaacttgctgatggaatgaagttggagagctaaggaaagataggatcagaaatgactcctaagtttcaggcttgggcaattggaagagggaaaagcagggaaggagcaggtttcaggagaagtgagtgactgttttggatgtatcaggttgcagtgcccactggacagatgtcaaataggcaataagatttgctagccgggaaatcagaaatagagatacatgtgggagttgcctgcatgcacagcaatggtatttacagccctgtaattgactccaaagtctcctgttcaccactgtgcagggtgaatgtggcataggccacccttctatctctaggccttcccctgtctcttcttgctttttgctgttgaaagttgcttttagcttcacaatgcagagggcagtggaagaacagaaaagcaaaacatttcccgagcctgtaattacagtgacaagagtgcttcttgtttgtgtagctctcaacattttaatcattacgtcttcactaaagctaaaatctgagcttagaagtgagtgggttttaaagatgggttctagattcatactgtgttctttaaatgttatgaactgagaatacattgatactgatattataagtatgaaaggtaatataagttacatgaagcaaagttttcagtgctatggatcatccctctgttttatgtaccactttgcctactttgttgaaacacaagaacaaactaaatgaaaataagaacatatggaaatggctgggcgcagtggctcatgcatgtaatcccagcactttgagaggctgaggcgagtggatcacctgaggtcaggagtttgaaaccagcctggccaacatggtgaaaccccgtccctactaaaaatacagaaatcagccaggcgtggtggcacgtgcctgtaatcccagctgctcgggaggctgaggcaccagaatagcttgaacctgggaggcggaggttgcagtgagccgagatggccccactgcactccaggctgggtgacagagtgagactctgtgtttaaaaaaaaaaaaagaaagaaagaaaatgtggaaatgtgtctttacttccagatagtattcctgtcttggatttgacatttaattttattaaaataattttgatgcatggatgttttacatttttatgggatttatcagttgatcctttgtgatttcttaattttatgctttgaagaatgtttcctctcccaatgtcaagcctctgtaggtttactgctagttttatggctgatttatttattttttcacttataaatccaagcgggctttactatgttggatagagccaagtacagacttctaaattttttgggttttgccatctcaaaataatttgtagccaaaatacaattgaattcttacttattttgaatgattccttgctcattgcagaatagctctccagacccccagctggccatgtggtgagttcagggcccaaatcaagtagtaccagcaatcagggaactcctatctgttttgaatggattcacaccagccacaagcctggaaagatggtgtcacaatctacagtcaggcaggattctcctgtggagccctgggaagggatcagcgatcactctggcattattgatggttcgcccagactcctgaacactgaccatcctccttgccaattagacatcaggctcatgaggcacaaagctgtctggattaacccccaggatgtgcagcaacagccgcaggacttgcaatctcaggtgccagcagcagggaacagtgggacccattttgtgacagatgctgcctctccctcaggcccttcaccttcgtgcctcggggactccctggcagagacaacgttgtctgaggataccacagactccgttggcagcgcttctccccatggctcgagtgaaaagagtagcagcttctctctgtcctcaacagaggtacacatggtccgcccaggatactctcatcgggtgtctctgcccacaagccctaggattttggccacctccccatatcctgagactgacagtgctttttttgagccttcccatctgacatctgctgctgatgaaggtaattttagtaggtgacctccctcattcctctctgttcacacccttgcttcgccttgctctaaagcctgccttgttgtcttccccatgggacaatgcattgcctcatctaatattgtcagcagcccagccatctgggcggtcacaacaggtgaaatcaaatattggctttctccttagactgcagagaattgttatctttttagcttaatgtagttgataatcagtgccatgtgccatctttaagctggcgtctgccttcaggaacttagagctcattaaattgtctacaggggagagcatcggaagcactctcaagtcagtgtggaggttggaggtgtttccagacagccacggggtctgcatttcacaccagtacctagtaggtggtgaagtcacttcacttgttatatttacctgtatagaatctgacaggaaaatggtaagatttttaaacaataactacagtttcccccgaagactatacaaaacccctttttattaaaacaagggctctcactgctatgaagtaatgtacatattcctaagaccctaaaattcctaaaaattggataatccgtgcgaagtactactcaagagtcaataaattagctattattgttataatctgtgacatgtttatttcattttaaaatatttgttatagtcacacttgtcattattaatttacatttctattcaaaccctagtataaataatcaatgaagctttttctttcaaagcaatttaaaaagtcatcagtctgcctgctgcctgcctgtctatttctctgtatatttatttctcactagcaggagctcatcttcccccttacctaaaatatggagtttatgtgttcttttggaaatgtttgagcaatcaaagatgatgacagtctttaacacatttattcattgcttaagaagaacaaattttggacaatctttcaatggttaattttgagataaggaccaagtttgagcaaaatgacaagactgattacaggccttttttttttttttttcctatttttttgctcacttgcttggatagttctaaggattaagagtgacttgcaaatttagtagtggctaagtgagagattagtcttaatagattgtcttatagaggaaagccctctccccaacagagaaccaccataatgacaagttataataaactgaagatgatctttggggcctagcatacccttgcctgaaactttttattctatcatggtacaggaagtagttctacaatttaaaattatcctttagctttttcttttactcagaaagaaaacagataccccagccccttttgcccaaagacaaggactcccaacagctcctgtcagtgcctttagaaacaactcacggaatgttttgagaatatctcttaaactcagtaaggggattcattctttaagattaagaaaaagaagccttgagtgatctggttctttctttctctggtgcggaggcagcaatagggaaaacagccattggccactaagatgtggacattcctatgaccgctgcatctcagatggcggcaaaagggttttcttttttcagaaaatactttagggaaagactatcggcctctgtaagcatttcttaaggctgtaggaagggattccacagtttattttgttggcataggaactacacatttacaagcactttcaccttcctttatctccttagtgtcctgataaatatcccaatttaagggctgagagcgttttgatgcagaggcacagctggtgaacggacagctggaactggaatccactctgttccgattcttctctgtgctctttcctctatactcagagtctgcaaactatgacctgtggaccaaatcctgccagcttcctgtttttataaatgaatttctcttgtgtctatagctgctttctcactacagcggcagaagagagtggttgaaacagatactgtatggctctcagatcctccaatatataccagctagctgtttacaggaaaagtttgccagccatagcttctgaagctaagaagtccaaatttttccatgcaacaactactttcttgaacatgaagcaagggatttgaatgactctgcttgcaactccatcatgctgagagctgtgtcaccaccatgtgcagcattttgttctaatttagcaggttgggacatctcagctcttgacacagaaatttttgctttaaatgctgcagtaagaaatcacatgacagaaaaaatgtttgttttgatggtggtcattgccagtaatggagtggctaagggtgcaggaatggatgtgtcagcagaatgtaccttctgcagtttgttggttttgactggaagaagactaacttagagaagcaatgctgaccttttttggatggattttatttctctagacaggaggtttagggctgggtgcagtggctcaatctgcctgtaatctcagtgctttgagaggctgaggtggaaggatagcttgagcccagtgatttgagaccagcctgggcaagctaatgagacccccatctctgcaaaaataatttagaaaatcagctggtcatggtggcacctgtaatctcagctgctagggaggctgaggtagaagaatcgcttgagcccaggaggttgaagccgcactaaagtgtgatcacgccgctgcactctagcctgggtgacagagcgagatattgtctcaaaagaagaagaagaaaggaagtttaagatcaatcacaatgagctagagaagcgatctcataatccttaggaccctgcttttggactgtggcttctcactttaccccagcccctgttgggatttcccaggaccctattctctttctaccctcttttcctcattggtctcctccactccggtggctgaggatacctcccagttactccaacagcctctcctagaaatgatcatcattaaagcaatatctgtaagacctgccatcggaaagatctttcttttcctgtcatctgaatttattctagaattgtgcttatttttttacattatttaaaagccacttcctataattgttttattttattaggtaatctttaaactcccttttccccatttttaacaatttgctatattggcaggtgctgttcaagtcagtagaagaaccatttcttcgaattccttctcaccagaggtatttgtgctgcctgttgatgtagaaaaggtgaatgctatcttctttctttttaaccatagagtcttaatcctttagatagtgttgttctgatttaaatctggaaacttcaatttgatgaatcattacaaataggtttcctttcagcatttgattgatggagactgccagaaacactaagctaagaagggttccgaggccgtgcctgtgctcagctggaaagttttctgtgattgatgaatgatgtctggcattaggcttcccccaacctaaggttttgtataacaagaaatccaatttgagttgtccgttgattatagtaagtcgaatctatgtctctggacaatgtgtgctataagtcatagagtgacctatgataactcagttaaatgaatatttatactgatatgcattaattccacttaaatagagcatattgatttttcaaatctaatataccctccatgaaaaagttgattatgcttgtattttaattgatttctttttctgcaggaaaatgcccacttttatgttgcagatatgattatatcagcaatggagaaaatgaagtgtaacattctgagtcaacagcagacagagagctggagtaaagaagtcagtgggttacttgggagtgatcagcctgactctgaaatgacttttgataccaacataaagcaagagtctgggtcttctacttcttcatacagtggctatgaaggcaagttgggcaaatatgagaaagctgtatgttatgtgtttcacatatatctcctctataattaccccttatccacggggcatatattccaagacccccagtggaagcctgaaccttcagatagtaccaaactctatatacactactttttttttgttcttgtaaccaagagggttactaagtgactagtgggtgggtagtatatacagtgtggtatgctggacaaaggatgattcatgttccagaggggacatggcaagacgtgtgggagttcatcatcctactcaggatggtgcacaatttaaaacttaagaattgttcatttctggaacttttcattgaatatttttggaccagttgacagcaggtaactaaaaccacgggaagtaaaactgcagataaagcaggacaaatgtatgtctttaaatcctttgtctaaaaacttcttgagtaacctctgtaatcctcaccctttctgccatcttgggtcaggattggttatcatgctccgttcagttgtcaaatcctatgttttgttttgttttgttcttttaatcttggacttcatcctacttttctttttcactggaaataaacgtggctgatgtctcctcgtcctttgttttctgtcacatggcattctcctagctgttcttacaccatctttccttttccaatgaatcttctttttttcgttcagtaatgggcctgtgctgtgctaggtgctgaacatcaacagtatgcagggtgtgctccttccctcaaggagtctgcgtgctggagcatgggaccgggaagccctgtggggtaacctgtagaacagaggtggggacccagcacagtgcgtcactgtcactgaggaggagtgcctcggctcactctgggacctgggggctcttccccgagggacgagtgcctaagccgatagctcatgttagggtttgctactttcttaccatttcttaagtcctgcctccagtcctatattctttttttaatctgtatttgcttcctggcagatttaacctactatacaccttcaattattccttctcagctattatctcctgaatctatgttttcagtcctggacatctcttctaagtgcttgctctctaaggctggaggcttgtccgtctggctggccccccaggacctgtgacttaatacttcatttctgggtgacttaaaatgcttcattttattcattgttgatatatgttcactgcaacataaaggtgggtgtagttaacctataacttaatatgtctaaactagtcatctctccatcactctctcacaatccccttctttccaaagaaaaccactgaagcttgcttttcttcttgacttcctttactacacgttaatcaggaatactcaataacaaaggaagaactcactccatatggtgtatagcataatgcctggcacagaataggtatatgatcaaatacctgttgaatgcactaactggctcaaattaaaagggttgttttgtcttaagatatagaacattctcactgaacccagtggtgggaaatatatctgggacacatatgaccagtgtagacaaagctccagtgtctatcttttcggggactttgggcctctcatctcttcttttctagcaattgcttcattctttttctgtagcctacctacttctacccacccctggcatctagtttcagctctgcagtcttcctgaccactcagccaggtcacatctcaacaactcagttttgcaggaccctcagtccagatcccaggacagagcacctgatgggccttaccttggttagatgtccataactggttggtcagatgcagccagggggcggggaaatctgatatggacgatcgtgccctctgaggctaccagtagggagaaaatgaatgtgggtggagaagaagtaattcctatttagtatactggactcttccttcttctgtggtcttgtgctcctgtcccgtttctagttagtaaacaaatcaatcctgacttctcagtcgtaatcacttctcttccatccatttcccatttctatcccttacctggcccgctgcagtagccttctggctagtcattttgtaaggactacaatttagttctttaataccgatttggtttaattttctctctttactttcaacttgtttcccctagttgatcctgcatgtatctgtcttcctggatcacaactttttgtcctctataatggcttgctgagcttttgccacattttattctggaatttttagccttgtggcatccagctgcttcctgccttttaaacaggaatctcgtgccattccccttggctggatggtgggctgtagttgaactagactgtgtatagttgctggcagacatttccccccatggctttgggaaggatgtcctgaaatgtgggttcccccagtaaccacacatcaggtctttcatccttcgcatccttcagaagcaatgtcctgccactgtcactgtgacatgctccctggtttgtatcccaggggaggagcaccatccatgtggaatgaaacacaggttgtgctccagaatgctccagtgccatctgcatgctcgtctttccctggagttgtgtagtgcagaaccttgcctcagaacttctcaaggcccatgcaatgcaactgtgttttttgtgtgtgtacgtggtttaggtctgttcgtatctcagctccttcatgagatttttttttttttttttttttttttgagatggagtctttctctgttgcccaggccggagtagagtggtgcgatctcggctcacagcaacctctacctcccatgttcaaaccattcttctgcctcagcctcccaaatagctgggattacagccgcacaccatcacgcccagctaatttttgtatttttagtagagacgagctttcaccatgttggccaggctggtctcaaactcctgacctcaggtgatccgcttgcctcggcctcccaaattgctgggattacaggcacgagccaccacacccagcctttcatgagattttaaactcttagatggctgagaaattgtcttctttgtatttgtgtttagtataatgccttgtctgaaataggtatttttataaatagtggttgggtgtaaattgatggtagctgaaactttaagaaaacatgaataaatatgaatatgttaaatgaaaattaagaatatttctatcctccaaatataaatatttatcttttattaagtacttcttttgtgacatttgtggcaatagatgttcctccatgaggtgggttggtattactcaaactgccagttggtcctgagaacattaaaaaaaaaaaaaaaacaagggtagaaaatagcagagtgcatctcactgagggtgagcaatgtttcctgaaagttttttttttttttatcagttaaacatattattgtgtctgtactaagtcacaatgtaaattgtacgttactatggatgatgggcaaaagacagtgaaaaacacagatgggtgctcttacccccattctatccatgaggaaactgcagctggaagtggtggttgtccatcgtcacccagctagaatgggttctgtcttaaagtcagccagcctactgtaaaacccttcacataacttctttttttttttgagatggagtctgtctgtgttgcctaggctggagtgcaatggtgtggttttagcttactgcaacctctgcctcccaggttcaagcgattctccggcctcagcctcccaagtagctgggactacaggcacctgccaccacacctggctaattttttttgtatttttagtagagatggggtttcaccttgttggacagtctggtctcaaactcctgaccttgtgatccgcctgcctcagcctcccaaagtgctgggattacaggcatgagccaccgcgcccagcccacataacttctatgtaaactatgggctaggctatttccttaaacaactgtattcctttttctgtgtttctctcctatgtttattcaaatgaagacagttttacaaatttatatttacaatgattatataattatattaataatataataatgattattaatgctattatcagtattattaatagtattaatactattcatactactagtattaataatcatgttgctatagttttcacttttttttttttttgagacagggtcttactctgtcacccaggctggagtgcagtggcatgatctcagctcactacaatctccgcctcccaggctcaagtgattctcccacctcagtcttttgagcagctgggactacaggtgctggccgggccaccacactgggctaatttttttgtattttttgtagagacgggggttctgccatgttgcccaggctggacttgaactcctgggctcaagtgattctcctccctcagcctcctgagtagctgggactacaagtgcacgcccctgcccctggcagatttacatttttaaatgatagtatttaatcgtgtgatttgcaaaatcaatttcctattattaaacgtttagatgctttcagtgtttcaatattttaaaacattggatggactgcagatagcttctttgtgatgaaagccttccgaatagctgggactacaggcacttaatcatagtgagtgcaaaaagaacacacaaatagttccccagttttttaattctttaagttgaaatgtttaattctcttaaacttttagccctcttcatttcccaatttctatttagttgggtgttgcaggttgtacagtttttctttttcttcttattggtaaaaacctccttcctttctttgtctaggttgtgctgtgttacaggtcagcccagtgactgaaacacgtacttaccatgatgtgaaagagatttgcaaatgcgatgttgatgaatttgttattttaggtaagatttggaaactgtttggatgtgactggctgcctccccaatcccatccgcatgcacacactaacatgcatcacacacaacattacgttacagtggcattcaaaccaacttcttccaaaatcagattatggccctgatatatatatatatatatgatgttcttgtttcaaatgtctggatagctaatctctcatctcacttgtagagttgaatgaaaaagcagatattcattatggtcggatatctctttggcctctcagttatattttggtgaaatttcagatgaaatcccatctttgatcattatctgtcctctcattatctgttctgtccatttctcagaacctgaagcatggagatgctgaataatttgctctttctgagatgcagggagtgattttagtgttcttataaaatggactgcgattaaatgaaacagactaaaagacctcaccactctttcttttattttcccacagagcttggagattttaatgatatcacagaaacctgtagctgttcctgcagctcctctaagaggtatctgtcttctgtgcacagtgcacatagacccttgggctgtcacctctgaggcagtgtgaaacctaggcctctgacattctgggcccactttagctagttccagtgatttgttcccatgaatctaggagagtatcacctagaaatgaaacaatcacccccaaagtttctatagtgttttacaatatataaaaggcttttgtatgcattttcatttaatcctcatttcagttaaacaggttgggtgaattttatgtatgcatgtgtgtgtatatttatgtttttgttgttgttgtttttgagaccgagttttgctcttgtcacccagggtagagtgcaatggcccaatctcggctcactgcaacctccgcctcctgggttcaagcaattctcctgcctcagcctcctgaatagctgggattataggcacccgccaccacacctggttaattttttttttttttttgtatttttagtagagatggggtttcactatgttgaccaggctggtcttgaactcctgacctcaggtgatccgcctgcctcagcctcccaaaattctgggattacaggtgtgagccaccatgcccgaccatatatttatgtatttttaaacctcattttatagacataaaaattgagactcatatataggatgtgcttcgggacacgaaggctgtgaggtagaagtagggcttgaatgcaggtcttctgactctaaagccagtgctctttcaccacacctctaagtcttagcgccctcagtaaataaaagatgctttatttattgaacatgcaggagccatgttgagtaagatgcctggtgagtgattcatgcgtcatctcatatgacagcctcttctgagttttgggggctgggaagaacagttgaaaacctcaggaagaccctgaacatactcctcatgaatatagttttccagtatttgcatctcttacatttcagtgtcacttatgagccagacttcaattctgcagaactattagccaaagagctgtaccgcgtgttccagaagtgctggatactgtcagtagttaattctcagctggcaggttccctgagtgcagctggctcgatagtaagtatcaaaaaaaattgaccttgaattgaaagttcctaaatcctcattttgcctgccctgttcactttaaacatttgtctttccttgtatggtcactggatattaggggagactcaaaatgaatgaggaaactggcatgtgttgagtacttattgtgtaccagagactgtgctcagcagtccacattattttattttatttattaatttttttgagacggattcttgctctgtcacccaggctggagtgcagtggcgcaatctcagctcactgcaacctccgcttcctgggttcaagcgattctcctgcctcagcctcccaagtagctgggactacaggcgcacgccaccacgcccagctaacttttttgtatttttagtagagacagggtttcaccatgctggccagctggtttccaactcctgacctcaagtgatctgcccaccttggcctctcaaagtgctaggattataggcctgagccaccgtgcccggccagcagtccacattttaatcctcataagtatcctgttaggtagaggctgtccttatttttatttttaagtggtgggcccagcctcccagcagggctggtcagctgtgaagcaggagtcatgcccaggctgcctcattggaaagtacatgttggttccctcatggaacacactgctcactgctgtcagagagcaagcagccttctgagggtagagaacattatgacaaaggctaaaacaggggtagggaaaatgccctcgaagtgcagaggaaggagtgtttaattttaccaggggaacttaggaaggctgactgcagatttcagaacttgagctaagtattgggctggccagaactgtggcaggtagaaaggttgggggaggacgttcttggcaaaggggagctgcagcaaaagtggaggggcatgctatgccgttgagcagagtgattcggtgcggttggataatacccgtttgtgagtatttgtgtctgagaggttgttctttatggaaataaggtttgaatgatagtagccaaattgtggaggatgtagaatgctaatttgagaagtttggattttattttattttattttatttattttttaagatggagtctcactctgttgcccagggtggagtgcagtggcacaagctcgactcactgcaacctccacctcctgggttcaagcaatttctggctaacttttgtacttttagtagagacagggtttcactatgttggccaggctggtctcaaactcctgacctcaagtgatccacccacctcggcctcccaaagtgctaggaaaacaagcatgagccactgcacccagctgagaagtttggattttaaatgacagtaggaaagtccagtggtccagcggggaggcactgaacatttgtaagcaaggggaaaggtcttaatagagctgtttctggggaagactaataatgataggggttctgattggtagcatttgtcagtctgttgactaagaggggtgaggcttctgctattcataaatgcattccaggtcaaaatgacctacttacagtaaatttgaagtctggaaataaatgaactaaaaatactaagaaaagtgatctcatctgggtggtgtttaaagcaattctcttgcagatggctttagagatgtggagggctcttggtatgccctttagttcagttaaaagcactgttaatttttcatggtaaattttaatgttggaaatacatttagatgtttctttaatttaaattctttgaaatatgcttaagttgttcctaaatcattttatgtcttatgcaggtcgtaaatgaagagtgtgtccgaaaagactttgaatccagtatgaatgtagtacaggaaattaaatttaagtctaggatcagagggactgaagactgggctcctcctagatttcaaatcatatttaatattcatccaccactcaagtaagtatgggctgttgcttgggcctccaatccatttaaatcacattgtgacagatcccacctgactctatggcagtaggtgaaaaaaatacatatgctaaagaacacaggaaaatttgttttagggaaaggaaagttggctgtattttctggcttaggttttttttttttttcctcttgtttaccatggacttttgggggctctgtaagttttgacaagttgagaattcagctatgcaaccctaattgtcaatattgcgtagcaactgaaaattaaataggcttaaaggggatttttaaaagtggctaatatcaaaacttaaaaattatatacaataattttttaaaatgtgtttcctttttaaaaaaattagagatggggtttcaccatgttgcccaggctggtgttggactcctgggctcaagtgatctgcccacctcagcctcccaaagtgctgggattacaggtgtgagccacctcgctcagcctatgataattttaaaagactggaccactttatcttccagaacaatcagtgtgaaataaaaatgaatgaataaacttctaaaaaaggaacatttaatcttagggaaagcacttatagttaagaaatgttacagaggccgggtacggtggctcacacctgtctataatcccagcactttgggaggcctaggctggggtcagggatcacctgatgtcaggagtttggggtcagcctgggcaacatggtgaaaccctctctctactaaaaatacaaaaataaactaggtgtggtgggtgcagccctctaatcccagctactcgggaggctgaggagcaagaattgctttaacccaggaggcagaggttgcagtgagctgagattgcaccagtgcactccagcttgggtgacagagcgagactcgatctcaaaaccaacaaaagaaatgtaacaaaatgtaaataaaaatatgtttgttctctaagaagtaacaaaagttctaaaagacaaaacaactaagattatgcaaaaaaggaaataaacctataaatttaaagtaatagtttaattgtaatttgttccgagactataggacagattatgatcaaagattatacacaaaacattttaaccaagtataatttttccatccctcttggtttgtattcaatttggtgtgcaaactgccaagcgttacaaagggaccggtgagggttgttgactgtgcccaagggactggagagaggttgactctgccccacggaggtgccttatagactagatctttcttttgtttttcttcttttgagagaatgccaagaaagtctgtggggctgcttgggcagaactccctgtctaggcatcgtgagaggttgctttccttagcctggggtatcttttctttaggggtttcctaggtcctcactatggcacctgggcagagatttagcatatttttaccttggccatcttttgctgatcctgaactgtaaacaaattttacaatctccttggtatttccaagtcacatgtaaaactatgggataaacagttcaatagaaaatccctcaggccgggcacagtggccaatgcctgtaatctcagcactttgggaggccgaggtgggcgggatcacctgaggtcaggagttcaagaccagcctggctaacatggcagaaccctgtctctactaaaaatacaaaaattagccgggcatggtggtgcatgcctgtggtcctagctacttgggaggctgaggcaggagaactgcttgaacctgggaggtgaaggttgcagtgagctgagattgcaccactgcactccagcctgggcaacagaataagactccatctcaaaaaaaaaaaaaaaagaaagaaaattcctcaatggaatggaatatctcttaccagaaatgatttgatttctttgtcttacgttacctcttattcgtctaaatttctttagatccatttgtgaatttcccaagtgcatcatcttttggtgtatggcctccctgagctgtcttccttgtataacatgtctctggttctctctggagctggaaccctgtacacgggcatcgagacctccctaaaaaccccttggagttatcagtgacgctgacttctgctttggttttagcagaagcttttttttttttttttttttgagacggagtctcactctatcgcccaggctggagtgcagtggcgcgatcttggctcactgcaagctccgtctcccgggttcacgccattctcctgcctcagcctccgaagtagctgggaccacaggtgtccaccaccacgcccggctaattttttgtatttttagtagagacagggtttggccaggatggtctccatctcctgacctcgtgatccgcctgcctcagcctcccaannnnnnnnnnnnnnnnnnnncagagtcaacctctctccagtcccttgggcacagtcaacaaccctcaccggtccctttgtaatgcttggcagtttgcacaccaaattgaatacaaaccaagagggatggaaaaattatacttggttataatgttttgtgtataatctttgatcataatctgtcctatagtctcggaacaaattacaattaaactattactttaaatttataggtttatttccttttttgcataatcttagttgttttgtcttttagaacttttgttactttttagagaacaaacacagtttcatttcccctggcctcaagtcatccccctacttcggcctcccaaagtgctgggattacaggcgtgagccaccgtgcccagcctagcagaagcttttaaagagatgtagctttaaggctgggcacggcggctcatgcctgtaattccagcactttgggaggccgaagtagggggatgacttgaggccaggagttcgaaaccagtgtgggcaacatagagagaccctatctctaccaaaaaaaaaaaaaaaagtaaataaagccaaaaaaagctagctgggcatggtggcgtgtacatgtagtcctagctacctacacaggaggctgaggattgcttgagctgagccgaggagtttgaggcagtagtgaactatgatcatgccagtgccctccagcctgcgtgacagagcaagaccctgtctcaggaaaaaaaatgaaaaataaaaaaaattagtcatagctttaaaagacccagggatttcaactagaaaattgtattgaataaatctatttctttcccaaatgaaaagtgacaaagttaaggcccttagttagaaaagtatcacgatggcaatttcttttctaattagtgaaaaatgtgccattggccttctctgaaatgtaactagtattatttttcgtattcaggagggaccttgtggtggcagcccagaattttttctgtgccggctgtggaactccagtagagcctagtaagtacggataatggatcgcctgcttattatgtgatgacaaggtccagaatagcaaagtagggcagcgcattgcttgtgtgagagatgcctttgatgagaagttgttataagagcttcagagaagttgccctccttttcatgaggagtccatcatgactgacaaggctgtgtgatcaactaggaccgaggacaccaggaccagcctcctagttctctccctgttgggcatcagctccagccacgtggcctcctgctgccccttgaaaatgccaggctcacttctgacatatttgcgtttgtggttttctctcccccaaatgctctctctgcagacacccccatgactaattcctttgcttctttcacattttcactccaaagtcacgaggtcttcccttgctgccctatctaaaatacctgtcttgccccactgctggccacagacaatcccatgaacgctttatattacccatccttattttttttctttattttcttgcacaatattttcttagaagttccttcttattttgtattcttagcacagtctttctaaaatagtctcttatattttactaatatgtcttattattatctgtcttcaacactagattataagttctgtgaggccacatgtgttgtctgttgtatttattactttatttccagcttctagaagagtgcctggcacatagtaggtcttcaaaagatatttgttgagtaaaggaatggcttaacaaggagctagccaaacttctctgagagtttgaggaggtagcctgagaggatcattcctgggccaactgaggcctagaagattaggctttcctgggccaggcacggtgtctcccacctgtaatcccagcactttgggaggctaaggtgggtggatcacctgaggtcaggagtttgagaccagcctggccaacattgtgaaaccacatctctactaaaaatacaaaaaaattagccaggcatgggtggcaggctcctgtaatcccagctactcgggaggctgagacaggaaaattccttgaaaccaggaggcagaggttgcagtgagccgagatcacactattgtactccagcctgcatgacaaagtgagactccgtctcaaaaaaaaaaaaaaaaagctcgggctttcctcagtcacaaatgcaagtttcccccttgagactgggaatcacttgttctgctctgatggtacctgtatgtctgacctgcaaaaggctggaaagaggagctttgtggaaagagttcccttagcctttgatagtcggtttttgaaggaaaaagactatgaggagctcctacttcaagagataaaaatagcaagcaggaatcgatctgggcttcctctcctacactggatgataatgcctgacgggcatcaccattgttgctgattttctttgaatgagtcattttcccagcacatctagtggggaacatgtctctttggttaaccactgtatcctggcgcttctgtaaatattgaatgcatgagtcagaaactgtacacatatgactatcgctccaccaactttttgttatttccctaagcttgttcaggtatggagatgtgtgtctgcacttttgtacagtggccttgccctcagggagcttgcttatcatcttttagggaagatacactcatcagccaagtaagtgtatgtaacacaaagtgatgtacgtaacaaaagagtcaagagtgccgtgggatttacagcaagggaacttcatctgagcttgagaagctgggagtaagaggtttcattggaaagtgattgcccacagaagtaggggtgttcgtcatgtgcaaagggcctgtggcaagtaaaagaaaccctgtgtggccagagagtaagaataggaggagaaaacatgctgcagatgtaggcggggcccagattgtagacagcatagaaataattttgggcttttcctgttaaattcctctagcttctaggatacattttttttaacttttgtctttgagataattttagatttacagaagagttgcaaaaagagtagagagagttcctgtacacccttcacccagcttcctctactgctaacatcttacataatcatagtttcaacctgagaaattagcatggggtacagtcctattaatgaaaccccaggctttattcagatttcaccaggttttcagtaacatcctttatctgtttcagaatttagttgtcatgttttccttagtctccttcaatttccacacactgaacatgacattttaccctttactagttcagtatatcccaaaaataaggataagaaacaagttatcacaccaaaaaaattaaaaacaattctctatattgtctacttcctagtcctttttgttcttaaggtatcatttatggctattttttccatcaaggttgcaatcaaatttcatacattgcatttagttattgattctctttagttagctttattctagaactgcactatgcagtatggtagcactagtccacctggctatttaaaattaaattaattgaaattaagaattcagttcctcagtcacactaactacatttcaagtactcaatagccacatgtaactcatggctactgtattggacagcacagatatagaacacttttatccccatggaaagttataccggacatctctgttctagaatatttctcttccacccaaccccctgatgctgacttttcataaaatgaggacaattgtgttttggagcaggatttctcaacttcagtaccatggactttgtcgtggggggtcctgtgcactgtaggatgtttagcagcatcagtaggtgccagaagcagctcccagtggccactgaaaatggcgccagacatttgcaaatgccccttgggaggcaaaatcacccttggccaagaaccactggtttaggtcactttgtattctgttttagttaaaggacttaggaaattaaaaaagatggacattagtgtattctgtattgatagtataacagcatgtattcaatgaagtttgatgaatgagtgaatggatattgagtgtgtgttgaggagtagatgaaactgttgctaccagaagctcacaggtgcctaaccctgaatttcccccaggagcagtggttcagtattgactaattcagtgttcatggcgactctagagaacataactatcatgaataacaaaaaacaactctttatttgtttgcttttaaacatcaactcagagtgtgacctgggtctgagggacaatttgggcaagtgcaaaggcgttagctccctctccctttcccaccatcgaatgcagcggaggaggagtgggacatgatggctgtgggctggagctttcgcagtccaggcttgggttggaatcctgcctgcctacatactgttcgtgtggccctgcgtgttgcctaacttcagtgtcttgtgctttcatcagtgaaataggggaaataactgtccctctctcacagactttcgagcacagaatgacatagtaaatgtaaaacatttaactgatctgtggcacagagtaagtactcagcaagattcatttctgtggtcgctcccagccaggccttgtttattttttatttttatttttttgagatggagtttcacgcttgttgcccacccaggctggagcgcaatggcgcaatcttggctcactgcaacctctgcctcccgggttcaagcaattctcctgcctcagcctcccaagtagcagggattacaagcatgcaccgccactccaatctaattttgtatttttagtggagatggggtttctccgtgttggtcaggctggtctcaaattcccaacctcaggtgatctgcccacctcggcctcccaaagtgctgcgattacaggtgtgagccaccgcacccggccaggccttgtttatttttaaagccattatttggaaatgatcttcagaatctacagtgtacgggttctacagcagctgctttcccatccatgatttcattaatcctcccagtatatggcaactaagatttctgttatgctgtatggtattttagttacaaagacgtacatgactcaaactatgaatgataaatatcaaacttggttcatgtcagaacctagtgttgagggaggggcacatagaagacttcaactgaattgttttctttctgaagctgggtggtgagtgcacaggtannnnnnnnnnnnnnnnnnnnnnnnnnnnnnnnnnnnnnnnnnnnnnnnnnnnnnnnnnnnnnnnnnnnnnnnnnnnnnnnnnnnnnnnnnnnnnnnnnnnnnnnnnnnnnnnnnnnnnnnnnnnnnnnnnnnnnnnnnnnnnnnnnnnnnnnnnnnnnnnnnnnnnnnnnnnnnnnnnnnnnnnnnnnnnnnnnnnnnnnnnnnnnnnnnnnnnnnnnnnnnnnnnnnnnnnnnnnnnnnnnnnnnnnnnnnnnnnnnnnnnnnnnnnnnnntcccaactactggggaggctgaggcaggagaatcacttgaacccaggagggagaggttgcactgaactgagatcatgccactgcactccagcctgggcaacagagcgagactccttctcaaaaaaaaaaaaaaaaaaaaaagtgtaaagagcaaaaattccttctttcccctaccctccagaaatagtcactgttggctttttggtggggatttagacagtgaatatatgtttatgtgtatgtttatatatatgttcttaaataaaattgagatcacattatacctatttgtaactggatgtccacttcctatgctcttccgtgtactttatgggctgtacagcatttcatgttgagtgcaccatacttatttaaccaattgccttttgatggacattatggctgccacccccattataaatgtgctgtaatgaacacctttttatatcactatgtgtgcctgttagcacttctgtctgatggagtaacagaagcaggattactgttacacatgtgagaattgaagtctatcacaaaaatgtcttgctacaaattagttctatcagtgctagacgtaagtgccctcctctagatactgcaccagttctgggtcttctaaatttatgacaggctgagtcaaaacagagtatctcacttttcttttctttcatttcatttcaatttaattttattatttgtcatcaatttgtgacagggtcttgctctgttgcccaggctggatggaatgcagtgacatgatgatggctcactgtagcctccaccttcaagcaatcctcctgccttagcctcccaagtagctaggaccacaggcacacaccacattgcctggctaattttttttttttttctgtggagatggggtcccactatgttgcccacgctggtcttgaactcctgggctcaagcagtcctcccatcttggcctcccaaactgctaggattactggtacaagccactgtgctcagcctcacttttaaaatatgcatttttttgtttctgagattgtttttctctgttagttatctgcatttcttctttccgtgaattacctattcccatcctttgtgcatttttgtatttttttctcattgatttatcaaggtctttatgatgctgcttcctaacattgtatatatactgcttcacaatttataaagcacttttcctatgtgtaataacactcgatccagttctgagttgcattttgtggtctcagaatagttagcctaacctgccttcagtcttcctgctagtgagaggagtctggactcccacccagatttccagatcctaaaatgaatgttccttttgctacactgcagtttgcaatttccatcttccaaatccaggagtattttgggaaggttttgtttttctgacgtctgttccacaagagcagagctcatgaatggccatgatttaattccccaagtctctgctggagccttcccagctgtcatgaggttgagtatggctttatcatcatgaaacaagtcatcagagtctttgaatcttgcgtaggaattggaagtcggggtataccaggataggttttcagcaccaggtgtggcactcaccctccggtatgcttggcagagtttgtgaagcggctccggtactgcgaatacctagggaagtatttctgtgactgctgccactcatatgcagagtcgtgcatccctgcccgaatcctgatgatgtgggacttcaagaagtactacgtcagcaatttctccaaacagctgctcgacagcatatggcaccagcccattttcaatttgctgagcatcggccaaagcctgtatgcgaaagccaaggagctggacagagtgaaggtgagccgcagccccaaccccatccctctcattggaagtgtcctgtggcaggaaatgcacatcacactagcttggggaacccacagatacatcctctaagaggcaaatggatcataaagcgagtgaagcggctgggcgcaggggctcacgcctgtaatcccagcactttgagaggccaaggtgggcggattgcctgaggtcaggagttcgagactagcctggccaacatggtgaaatcccatctctactagaaattaaaaaaaaaaaaattagtcaggtatagtagcacacgcctgtaatcccagctactcgagaggctgaggcaggagaatcgcttgaacccgggaggtggaggttgcagcaagccgagattgcactactgcactccagcctgggtgacagagcaagaccctgtctcaaaaaaaaaaaaaaaattagtgaagcttacactttggagcccctctcctgcacaggctctttccaaggccccacactgaatcttatacttagtattatgtttttcttgaagaaggccccaaagttctgtaagttttaggttctacaaaacctggatccatccagggcacactttgtggatcagcagactcagttgtgaaggcttgctgtataggcggtttgctttcaaggtttgttttatacaagtgcagcatttcaagcttagaaataacatttaaatttgacttgcacttttcccgtgtcatttattacatttaacttttccccgtgtttggtttctcccattaggaaattcaggagcagctcttccatatcaagaagctgttgaagacctgtaggtttgctaacaggtactattctcagctgggacaggctgccttccctccatacatctgctaatcctattagtgcctcctgcatctggctcccccattacacagggcttcttagcacagtgatgacctcatggctttccttgggaaatcatgccatctctttgaattactaagccaatagtgggatgcattagtctgttctcaagtagctaataaagtcataccagagattgggtaatttataaaggaaagaggtttaattgactcacagttttgcatagctggggaggcctcacaatcatggtagaaagtgaacaaggagcaaaagcacgtcttacatggtggcaggcaaagagagagcatttgcaggggaactctcctttataaagccatcagatcagccaggcacggtggctcacacctgtaatcccagtactttgggaggccgaggtgggtggatcacgaggtcaagagatcgagaccatcctggccaacatggtgaaactctgtctctactaaaattacaaaaattagctaggcgtggtgctgcatgcctgtagtcccagctacttgggaggctgaggcaggagaatcgcttgaacctgggaggcagaggttgcagtgaatcaagatcgcaccactgaactccagcctagagacagaacgagattccgtctcaaaaaaaaaaaaaaaaaatcaaatctcgtgagacttattcactaccatgagaacaacacaggaaagacgtgcctcatgattcaattacctcccaccaggctccttccatgacatgtgggaattatgggagctacagttcaagatgagatttgggtggggacacagcctaaccgtataatggagaatttaactcattaagaagaatggtttagttggaggatgaacaactctagccagtgacctttttattattattattgttatcattaaattgtggtaaatacatataaaatttaccatcttaaccatttttagaatacacttcagtggcattaaagtattaacatcgttatgcaatcatcaccaccatgcagcccccaaactcttttcatcttgcaaaactaaaactctgtatcatttaacaactccccattccctcttcctcttagcctaactcctggcagccactattctactttctgtctccatgattttgcccacacacatgccttatataagaggaatcttacagtatttgtctttttgtgactggcttgtttgacttagcataaagtcctcaaggttcattcatgttgtagcatgtgtcagaatttccttccttctttttttttgagacggagtctccttctgtcgcccaggctggagtgcagtggcgcgatctcggctcactgcaagctccgcctcccgggttcacgccattctcctgcctcagcctcccaagtagctgggactacaggcgcccgcaaccacatccggctaattttttgtgtgtttttagtagagacagggtttcatcatgttagccaggatggtctcgatctcctgacctcgtgatctgcccgcctcggcctcccaaagtgctgggattacaggcatgagccaccgcgcccagccagaatttccttccttcttaagtttgaataatatttcattgtatgtatatactacatttttttaatccatctattcatccgtggacactagggttgcttcccctccttggctattgtgaataaagtggatatgaccatgagtataccaggggccttttaaaaccccttatagggaggcatgtctaaccaagtggaaccatggtcttcaaaaattgtacttttggaagtttatcctaaggacataccgatggatataggtagagatttaaagtatagttttttttgttgtttttggttttgttttaagacagagtctagctctgtcacccagtttggcgtgcagtggtacagtcttggctcactgcagcctctgcctcccaggttcaagcgattctcgtgcctcaccctcccaagtaggtgggattacagacatgtgccatcacacctggctaatttttgttatttttagtagagacaaggtttcaccatgttggccaggctggtcttaaactcccgacctcaggtgatccgcctgcctcagcctcccaaagtgctggggttactagttttgtttttaaataagaaaaggcattaaaagtctattaagaggtattatgctctctccctgggtgatgggatcattgatactccaaacctcagtgtcctgcgatatacctgtgtaacaaacctgcacacatacccccaaatctaaaataaaagttgaaattattttaaaaatctaggtgttcgtaatagggcagtacttacattaataccatgtccgtagaatagaatactatacaaccagtaaagacttaggcatgaattcattgagagagagatttttaagtagaaaaagcataggttgctcaaggaagttaagattgtttattgtacttggtggaattatagagtttttaaataaatggtttagctttaaagcgttttttttcagtctctaatctttaatgatgatgtattgctttttaattaaattttgggggaaggagcatgtattctggagtcatttggttttgagcctttgcttcatggccttggcatggcattggtctcagggcctcggtttttgcatccacaacatagaacaatacctatacttcctaccttgtacaaaaaatcttgaatatccattctgggcttcagataaaaaaaattagtagatctgtattaagtccagggggatggtcagcaccaaccgatcactgctggactgagtgttagacacgtgtcgggggaccatgaggatacaaacggaggcagcatttagctcaggagtgagatagggtagaccgcaagcaaggattccaggagaaaaaggctgagcttgaagagtaaggtggagcaaagaagagggattggggattctccaggcagaggatgccgcaggagtgggcacctcaggctgggtgcagaattgaagagaatttggcattgtagcatgccaagtccagtgtaggccatggctgtcttggaagtgcagggaatagtgcttctactagccattgagagaattcaggtcgacacctgccgggtttggagaagatgaagttttgaatgccctagggaccatgaccactggcagttggctgcatgagccttaagctcagtgcctgactcgtgcatttggaagtcataggcttgccgagtgagtgagaattttcgcagctgagccaacagtccataaggctgatagacttgaaatgtagctggaagaaataaggtaggaattttgattacttggtaatcaaagggtactaggttcacattctttaagacctaaaaaactaatgctcagttttcttttgctcaatgtgtgcatgggcaggctgtaagagatacaggtctctgcttattcagctttttgaaatcagctttcatggaattttaacttcctggcttccaagcaaacttgcaacatgtagaatggtggcgagcatggttcactgttgttcttggagctatttattttttaaattgagttaaaaaaaaattaagtgtgagtgccaagagaaaacaactggccccattcttccctgtcctctgtgtgggtgggtttctgaattcctctttgtttcctctctggcagtgcattaaaggagttcgagcaggtgccgggacacttgactgatgagctccacctgttctcccttgaggacctggtcaggatcaagaaagggctgctggcacccttactcaaggacattctgaaagcttcccttgcacatgtggctggctgtgaggtgagggtgcacccagagcagattcgttcccgatgcaccagggcctgtgctgggtgttccgcacttgacttcatttaactctcacaaaccctgagggaagtgccggtgacctagttagagatgagaaaactgaggtcagagctgtgaagtaacagctgagatacccctgctggtaagtggcagagccgggatgcaagcctggaccaatggacttcatctgggtgcccagttctgctcagggcccactctgccctgatgcaccaagtatagtcatgtggaaccaggattcaatggaacaggaggctctgtgtctacacggattgaagaattgtagtgcagcaatgataaatgaaattagatcatttcagagtgcatgtttacaattaggaccttactctggtactttaaaactgctttgatatggaattggatgaatgtacatttttatcttttttttgattctgacccattcattgctgcaaaacacaacatccttttccttctagaggctggaatcatagacactgaaacactgatgtttataaagttctgtaatagtgaaaactcagcttatccatcaagagaaggttgtaactttttgatgtcttcttttacagctgtgtcaaggaaagggctttatttgtgaattttgccagaatacgactgtcatcttcccatttcagacagcaacatgtagaagatgttcaggtatttaataacttaataacataagcttaataataggttaactaattaaactaagtttagtaacttaagcacaaaattaacttaagctgaataatagcttaataatttaagcacagttatttaaagtacagtcatgctggtgtgtgcttgtatgctggattggagataatgaagttttgggcacagaaggaggagtatttgggtggggcagggataaaggataatgtcttctggtgcagggtttggatagaggagatggtccctttgttgcctgtgcccacctctctgtcttgtaattggatcattcatgcccagtggtgaagtctctggctgcttttgtgccacggaggcagagttgagtagctgttgtagagaccacatggccctcagggtctaaaacatttgctatctggctctttacagaaaaggttgccgacccttctgtggtattagtgcccgagagaatcccgtgttctgtaaactctgtttaatgggagagatcctggtaatgaactctgccttcacccttgataggggcatatcctcctctcaggccactccagtgttgtctccccaaccctttaggcagtgttgcaggactggctccccagcaaagagactctggggcagagacttgcctacaaaaagtttcatgttcttcaacttaatacctgtaggggtgtgcaggcagcaagactgggagagggagaagttgaactgtggtggggttgcagtggagccctcagctcatctcacggggagctctggagtttggtggcctttcagcattgttccaaactggggacaaattggggccggcctactcactatatagtgatcagtcattgaatgcaggctggtgccaggaaggggacaaagcagctttctcgatgtagggccatatctagagaaacaatgtggcttcccaagagttatcagccaccacctctcttggcagctggggaaacgcctgcctcagtgcttgagcagatccagggggcactgcagtgtccgttacatcaggctctctgagcctcctgttcatgacctgttggaagagtccaacaggtctgctgaaatgtgacctgctgaaacgtgcgtttcagcctggctggtttctttttagaagactctgggctctggattcagacccctctccctccctaggatggagacgaatgtctgcagaaatgtgagaaaacaagatagaccgtttgctaacggctctcttccttgcttgcagcgtgcagggcttgctttcacaaacagtgcttccagtcctccgagtgcccccggtgtgcgaggatcacagcgaggagaaaacttctggaaagtgtggcctctgcagcaacatgatgcccctgagtactgtgaaaaagactgttcaacatgccttatgataacaccgatttgtgtctattattggtgacattgttttagatattgggtattgtatattaaggaaaaagatggtctatattctctttattgcatatacttaatgtttcaaaagaatgcagattctgtgtttaagcacagggctgatagttgtggttttgtttacaaatgttctgttttggctgctattggttttttaaagaggttttttatacttttgtatttgaatagttatgtttcactgatgctgagccagtttgtatgtgtgtgcatatatgtgaactgtaactgacaagatgaattactcagtttctctttctctaaagcttgtttgatgaaactggttggtcctttcagtgaacaaaaatatgaccccaaatctgtttgctctggcttttatttcttcaggaagcagacttccacttaaatgccattttgtgattgtgtcaatcatacacattttatttacttcagagtttgaatagagagtacacatttcttctgcagatttatttcatgatgagtttgagttgcttagcagggcgtgtgggtcccgttgaagtgcagtttgaagcaactgcttctagatggcactctttcaggtggcacaaattgaacctgtatttgtcatctctgttccacacactgcaatgtcaagggatgcagaagtgagtagaattccatccctgcccttgaggatcttgctttaacagatgtaaaactgaacataaggtatttgcagatttaaacgaactgggggaaataatgaacagtgtgactctagtaataacattaaaatcatagacattgactaataaggttaaatgaatcacaaaacctttatgaatttcttttttctaatagttcttatatgttttcctgaaacatgtgagcctattcttttttcttctactttctatatactttctcccacttgagaaaggggccttgaggctgggtcccttcatggtatacctttagactgaacggtttgcaacctagggcttgggcattacattccctgggattcacatgccctaactaaacctaccttgattttctcagacagcacaggcaggcaataaagcgtcacagattgtcccctaaccccatccagccatgtgtatgggtgtgttttattcaatgggatagtactgagcacatgaaagaaatgaatgacttctgtcaatctcttttcattcagtcttctcattctgtcaattgttttctcatccgcagtgcctctgccagaactgtgctcacatccattatttaagccagatcttttctaagtattatagaagtgtagaggcacatagaataaataaaaccagacttcaaacaatgtttcattcttgcccattgctcctattccctgttaagaatcaagggtaagagtggtatgttcacattcctttctgaggcagatgtctatatctccatttacaggcaaggaaactgaggcctagagaagagaaataactttcctaggttcccacaggaagtgcatgatggagctggggttgacattcaagtccacctgcctccaaagcccatgcttaggccctgcttcttttgtggtgtcttttcaagacaaaggagtaaaaacaaccttaactggtaagtgttgctccaacttgcagaagtggcattgggcagagtgttttctcacatcagtgttgatttaaggcagctgctatggctcaagcattgcttgaagggctctgtgctcagggtttgtatgtttgtaaggcactgatgagcctgtgtgtgttacatatctttgatattaaggaagagtgcacagcagttgccaggaagtgatgcttttgattttctattttgaggaagaatgaggtcatttaaataactgcagtatgggatttgtctgagactttgttcctctccaatgtgataatagaggcttcttcccaggaaggcacctgttagggaagtgatcttcagcccacatggagcaccccataaggaagtaattagttgtggcatatatagctgtttaatgggtcttcctgattgtgtgggttttctgttcaactcttccttggctgccggaaagaagatgaatgcttggtcagaccattacccactgtgaggcatcagttgcagtgctgtaaaggtcagtgattcattttctgcctctgcactcttcacatgggcaattccagtagtgtgtcatttacagtcatgattctcaactgcagggaggaagttacaccatctcaaggcagaggctataggatgaggaggagcaagccatcccaaagatgtctggtgtgttgacctgggtgagaattattggccacaacttcagattagatcccaaatatgccactttctacctacccatggtgacttggtgctctagtttggcttgtttgactcctgcaaacctcatggtgaaatttgatccccagtgttgaaggtaggcctaataagaggtgtttgggtcatgcgggtggatccctcaagaatagcttggtggcacctttgtggtgatgagtgagttctcactcttagttcccatgagagctggttgttatgaagcctggcacctccctgccctctctttgcctcctctgtttccatacaaggggagtctgcacacgcaggctccccttcccctccaccatgagtggaagcagccacaagtcctaaccagaagcagatattggtgcgatgcttgtacagcccgcagaaccataagccaaattaacctcttttctttataaatcacccagcctcaggtattcctttatagcaacacaaatagactcagacactggggaagccatttaaattatctaagcctctgtttgtaaaatgagggatatgactctctgcagttgagataaggattagaaatgaaaatgaagcacccactaaaaggcctggtacaagcaagggcaaatggtaataatgaggtctagacagattacaaactgagtcataccccttattttctgtatctctgggtaagttactccctgggtctcagtttataatctgtaatacaaggattagaacaatagctactgttgtgggttgaattgtgtcccatgaaagaatatgttaaaggtctatgctggtgtctgtgctgtggccttttgggaagtagggtctttgcagaggtggttaagttaggatgaggacatagtgcattaggatgagttttgatctagtgactggtgtccttataagaaaagggaaattgagagaagagagaagatgcagggaagaaaaaaagcagaggttggggtgatgcatctacaagccaaggagcaccaagaattgctggcagcccccagaagccggagagaggcagggggcagattcttcctcagagccttaaaaaaaaaacccaacatggctgaccccttgatttcaaacttctgacattgagaattatgagagaataaattcctggggtttttttgttttgttttgtttttgtttttgtttttgtttttttgaaatggagtcttgctctgtcacccaggctgtagtgcagtggtgcgatctcagctcacttcaacctccgccacctgggttcaagtgattttcctgtctcaccctcccgagtagctgggatcgcaggcgcacaccaccaggcctggataatttttgtatttttagtagagacgggttttcaccatgttggcaaggctggtctctaacccctgacctcaggtgatctgcctgcttcggcttccaaaagttctgggattacaggcctgagccactgcgcctgaccctgttgttttaaaccacccagagtgtggtcatttgtctgagacttcggaattcaaacctgctggaaggaacgtggtagacatgtcaggaaggggtttgacattcagtttctgcccccaggtctgagcctgcatggctggcttagccaccgtcagatgctacctgcaggaagccttcctgaactcatcgccaaaggagggtgaagtgtgtcatttttagaagcatgcttccttaaaacaagcatttaaggatctctgtctttaaataatttctcaactggtatgggaaggaaaaccatagttcccctttttcacttcactagaaactaaaacaatacttttatgagtaatgctgaggtagcaggctgcagacacaattgggaagcttcagcacaaacatgagaaatcgagaacctttgcatcctcgcatatctgggcagctctccaagccaaggggactgaggattgaagagcttaaccacataggttaagcaaattgtatatttttccttgcacttttttttttttttttgagacagggtctcgctctgtcgcccaggctggagtgcagttggcgtgatctcagttcactgcagcctctgcttcccggttcaagcgattttcctgcctcagcttccctagtagctgggaccacaggcatgtgccaccatgcccagctaatttttttctgtttttggtagagacggggtttcgccatgttggccaggctggtctcagaagtgatctacccgcctcggcctcccaaagtgcttggattacaggtgtgagccaccgcgcccagcccttccttgaacattttctggcctctgcttgtgcttccaggcttctttctccccagggctgccccctcttttctagtcctgccgtgttcctgcctccatggtcttgttcttcttgcatcccttgcctgggatcaggactgccctttcatcctggaaagaggccctgctctggccttcctcgggctacgtacatccccattggtgaggagacaaagggcaagcgcacccaaagcccccacccctcctgttagatcaaatggagccccagacagaatcccctgccctgtggtctcaaccccacttttagggctgctcaggtctttcccctggtccagcctcctgaaagtgaactgcgctgctaagaccaagaggcagccaaggggcagctgcttgtaggatggagccaaagtgggaagagagaggggcaggggttggcccaatgctagctatacctgagccaccatgctccagagcagagcactgaggagtcaaagatttcaaaattcaaacctgctttctcgggtcctgatgaagggatattcaccatggtaggaggataaaacatatttcaaattttaaatacttggatatatggcatgtggacctgtatttgtactcttgcatgggctctgcagatgggagtggtgggcgcttcccctttccatctccctcccgatcttgcccattcttcagcgtactgcacgtgcacacacatgctcccttctccttacactctgatatctgcatttacctcattattctactggggacagctctctgaacttttggcagcctttgatcctttctatctgcccttgaaagtctcttggaagctatgagagagactttattctccctttgctcctgcagcccctgaaggtccacattcctgagggccctacccagctccctgagtgattgtttgaaatagaactactcaggagtgcggtgcctgcattggactttttacaagcaagaataaacctttattttgttcagttcctgagatttttgtggggctggttcctacagtgtaacccaccctactctgactaacataagatgtcctgatacctgttgtccaggggatgagtactgagggaacaggtttgtcactgtcgtagtctgtttaggctgctataataaaataccttacgctaggtggataataaacaacagaaacttactgctaacagttctggaggctaggaagtccaagatcaagacaacagcagatttgatgtctattgagggaccacttcctggttcatagatggcactatctcactgtatccttacatggtagaaaggagagagagcggaccaggcacggtggctcacacttgtaatcccagcactcccaaagttgagatatatgcctcaggctgagacaggcatatcacgaggtcaggagattgagaccatcctggccaacatggtgaaacccagtctttactaaaaatacaaaaattaggtgtggtcgcaagtgcctgtaatcccagctactcgggaggctgaggcagaagaatcgcttgaaccagggagttgaaggttgcggtgagctgagatcacgccactgtactccagcctgacaacagagtgagacttggtcccccctccccgcccccaaaaaaagaaaaaggaaaagagagagagagagaaccccctggggtctgttttacaagggcactaattccctttgtgagggcctcaccctcatgacctaatcaccacctaaaggctccacctcctaatactgtcacaattgggggttaggtcttcaacacatgacttttgaggagatataaatattcagtccataacagtcatgcagacatcaaaaactattctactcctctgagttatccatattatctagtattccttacattaaaaaataaaggaatatgcagagagaaaaaaattctttaacctcacattcctttccagttctacctctatgatcttattcacagcaacatttttgaaagaacagtttttaatgtttgccatcgcttccacacctctttcttcctttacctacaacaatagcatttccatctcaaccattctacccaaaccgtcaaggtcactagcaatatctaaattcagtagtcactgtattgtcttcacctacctctctaccacagttgcttgcattcttcttaacaaaagagaatactgttttataataaaatataataaaataaaaagtctagctaagaaaagctagactataatgaatttcatcatattgtggtggtgattatctctgtatagtgggattagaataattttcaaaaattttctttgtaaattttaccatatagactagatatcattttaaataaatgatagatcatttaaactaatgacaaattacagatgataaatgagatcagtactatacaacttttaagagtaatggttgcatttctactgtccatgcccacagtggagaaatcagattagctgttggggaccacctgaaactccatcttcgtagagtctgatgatggaggtgctgcctggtacccaaagctcctggttttcttggttatttagtaaattactaaagaccacgtgaacaaaaaagaacagggccggctgtcagatagaccagatggatggatgcaaccattcaccttcctcctggaagctttggaacccggaaacatcatgacatttgtgatttctccccttcctctgtagacagtggtctcttttcttggtctcctttgtaggttttcctcttctttctctgtccatctctaaataaagacaaagattccagggctcagttttgccatctcttttcttctcttgggatggtcttatccagtgaaatagctttgaatgactctaaatttgtagcttcagcccagaggctggtactcagcagcccactgatagctgtgcttgtattagtatttctttacaggcttttccatctcagaaaatggcaccaccatagacccagtcgcttaagccaaacacctaggagtcatcctttccctttccctcactccccagatccagtccatcagtaacttctgtcagctctacctacaaaatatatcttagttgatggctcaccacagccactgacattattacagtacaagccaccatctctctcctgaacttctattagattgaactacgtagcattgctgctattttataattgttgagctaccaagtggcaatttcatgtgtggttcaacctaattaaaaacctcctatctcctctttccacacttgcccctctatagtccattctccacacaacaccagaatgtttataaagcataaatcagatcgtctatctccctggattaaaccctctgaagacttaatttaaaattaagttgggtgggtgctggctcgtgtctgtaatcccagcactttgggaggccaatgcaggaggatgacttgagcccaggagtttgtgaccagcctgtgcaacatagcgagaccctgtctcttaaaaaaaaaaaaaaaacaacaacaacaacaacaacaacaacaaaaaaacacaaattagctgggcacaatggtgtgtgccagtattcccagctacccaggaggctgaggtgggaggatcgatcgagcccaggagtttgaggctgtagtgaggcatgatcccgccactgcattccagcctgggtgacagagtgagaccccatctcaaaaaaaaaaaagtccaaattctttacccaagtaggtttcctgttgggcttgacctgcaccacttcctgagctgttcctctcttccctccatcaggaacctctttaaaaattcctcttgcccttagtatacccccaaatcttcccccactttcctttggggtacagtgagtctaagtgatccagaatttagagccagaagcacttggatcctttcacttctagtcctgtgatttgtgataagttgctcaaatttcttaagactccggtttcctatttgtaaaatgctgataatctgtctcacaaggttgtcgtacagattaaatgatataagttatgaaaagtatgtttagcatcttgtctatcactttgtgtataaaattcagtgttttttttccccctggcctccaagctcccctgcctacccttagtccatcccccttcctttctgaatcataacttctctataacctctttattcagccctggtataattcacacatctgaatcattatacctccctcctgctcgtctgaccctctgagtcttccataaaaataacatcaactttcctaagggaccctttcccattcaatcagttgtcgtggggaggaaagagtgattgttttggcccatgggcatcatgagaatgtagagtggaccgttaacagtcaggaaacctacatggaaagggtggcttagacactttcaagtgcagtgactttggacagctcatttaatctctgcgtcttggctcccttatctggaaagtggcacataacaccaaccttgcagggtgattgtgtgcatccaacaagataatggaagtgaaagtgcagtaatgtaaagcacaccgagatgtagcttagaacagttactctcttctggtgctagtgcttatgaaaacctaatgctggtggtttccaccttcagagcacatgtcagttgccattggatttcctcagagtcacctccctgtcaaccgtctttcactgtcagagtccagattggccacatttcggctgagcttcctggggccccgtctttggatgagagaattggtgtgggagtggcacagccctagtaggccagatttggcacataaaaattcaggcacctaattaaactgaacttgagatatatgagtaagtttttactgtatatatgtcctgtgtgatatttatatgtttcttccaaccctgaactctatagaaagctgggtggacacctttcctgcactatggccattcacggtggcctgtgagctaaagtgacattctgaccatgtcctgactagtcacagaacatgtgccaccctcttggctagtcattttactcagggagctgctcttggtggccatggccaactgaggatgctgatatatgtgcatctgcacaaagctctcctggtactggaaaactgaccacaattttcaggtctccatcgcccatcttctgcatctttactccttgggtgatctcatgtatccagcaattctcagttgaagacaatttaaaaatctatcactgagcatcagccttgctccggaagcacaggtgtgaacctgacccagtgtgtactctagagacccttgcagcctccgaagttgacagttttaaacagtcagaatcaccttctgattccagctcctcctcaggctctcacttggttctaaagcatgacctataaaaatgctccaataagtacatcttcctcacaccatgggggcaggagagtgggtcaggctgcataccacaaatgccaccaggccctcccattcccttgcagagtagtcctaggaccccctggagaagtctcccaaagatgcatgctagggaacactctccatatacacacacattacaaacacaaacacaaacgcatgcagaatttattgcctttttctggccaaacctgattccaattaggttaacttcctctgttaactacctcctctcctccccaacctgaagttgtgacatgttgtctctgctgtagcgtccagatggccaaagcatggggcagggctgaccctgatgccccatgccaggcccctgcccctagcccctgcagccatctgggtccgtgtggatccatgtgggatctcagtagctgcccccttccagttccccacagaggaggaaaaacgtcagaaaagggaagtggggttaagatggtgcagacgagttagtgggtgcagcgcaccagcatggcacatgtatacatatgtaactaacctgcacaatgtgcacatgtaccctaaaacctaaagtataataaaaaaagaaaagaaaaaaaaaagaaaaaaaaaaaaaaaaaaagatggtgcagtcagttacagcatatccactgacattccggctcccaaagttttgttgctgatgtctcttccttcatcctttctgttcttgtaagttcatgtctttagaataattccttaattgttgtttttgagcagtctttctaccattgctttagagggacttcagcagtatgcaaaagtaaacgtacgttcaggctgccatttttacaggaagctagagctcacagcctttttattttataattgtggttaagcttaaactcttaactgttgcgctgtgcctcacctctatgtttcactgtctcggaagtctttttttttttttttttttttgagacaaagtctcgctctgtggcccaggctggagtgcagtggcctgatctcggctcactgcagccttcacctcctgggttcaagcaattttcctgcctcagtctcctgagtagctgggactacaggcgtgcaccaccacgcctggctaattttgtatttttagtagagatggtgtttcaccatgttggccaggatggtcttgatcgcctgacctcatgatccgcccacctcagccttccaaagtgctgggattacaggcgtgagccaccgcgccctgcccagaagcagttttaacaggggactaactatgtttgtgcctttagaaagttaactgtggtgatggcatggaagatggagatagaattgtggtagggaagctgttctgaggctagtattgacaaaactctgttacaagaaggagca

SEQ ID NO: 521 - DNA, 3462 bp, Homo sapiens
ctttctgctgttaccgggagcgcggtggccacggaacgctgcccggagccgcgcgagggaggacccgacgcgcggcgtttacccagcgcagcgttccaccgctcgggtttggctggaatagctctccagacccccagctggccatgtggtgagttcagggcccaaatcaagtagtaccagcaatcagggaactcctatctgttttgaatggattcacaccagccacaagcctggaaagatggtgtcacaatctacagtcaggcaggattctcctgtggagccctgggaagggatcagcgatcactctggcattattgatggttcgcccagactcctgaacactgaccatcctccttgccaattagacatcaggctcatgaggcacaaagctgtctggattaacccccaggatgtgcagcaacagccgcaggacttgcaatctcaggtgccagcagcagggaacagtgggacccattttgtgacagatgctgcctctccctcaggcccttcaccttcgtgcctcggggactccctggcagagacaacgttgtctgaggataccacagactccgttggcagcgcttctccccatggctcgagtgaaaagagtagcagcttctctctgtcctcaacagaggtacacatggtccgcccaggatactctcatcgggtgtctctgcccacaagccctaggattttggccacctccccatatcctgagactgacagtgctttttttgagccttcccatctgacatctgctgctgatgaaggtgctgttcaagtcagtagaagaaccatttcttcgaattccttctcaccagaggtatttgtgctgcctgttgatgtagaaaaggaaaatgcccacttttatgttgcagatatgattatatcagcaatggagaaaatgaagtgtaacattctgagtcaacagcagacagagagctggagtaaagaagtcagtgggttacttgggagtgatcagcctgactctgaaatgacttttgataccaacataaagcaagagtctgggtcttctacttcttcatacagtggctatgaaggcaagttgtgctgtgttacaggtcagcccagtgactgaaacacgtacttaccatgatgtgaaagagatttgcaaatgcgatgttgatgaatttgttattttagagcttggagattttaatgatatcacagaaacctgtagctgttcctgcagctcctctaagagtgtcacttatgagccagacttcaattctgcagaactattagccaaagagctgtaccgcgtgttccagaagtgctggatactgtcagtagttaattctcagctggcaggttccctgagtgcagctggctcgatagtcgtaaatgaagagtgtgtccgaaaagactttgaatccagtatgaatgtagtacaggaaattaaatttaagtctaggatcagagggactgaagactgggctcctcctagatttcaaatcatatttaatattcatccaccactcaagagggaccttgtggtggcagcccagaattttttctgtgccggctgtggaactccagtagagcctaagtttgtgaagcggctccggtactgcgaatacctagggaagtatttctgtgactgctgccactcatatgcagagtcgtgcatccctgcccgaatcctgatgatgtgggacttcaagaagtactacgtcagcaatttctccaaacagctgctcgacagcatatggcaccagcccattttcaatttgctgagcatcggccaaagcctgtatgcgaaagccaaggagctggacagagtgaaggaaattcaggagcagctcttccatatcaagaagctgttgaagacctgtaggtttgctaacagctgtgtcaaggaaagggctttatttgtgaattttgccagaatacgactgtcatcttcccatttcagacagcaacatgtagaagatgttcagcgtgcagggcttgctttcacaaacagtgcttccagtcctccgagtgcccccggtgtgcgaggatcacagcgaggagaaaacttctggaaagtgtggcctctgcagcaacatgatgcccctgagtactgtgaaaaagactgttcaacatgccttatgataacaccgatttgtgtctattattggtgacattgttttagatattgggtattgtatattaaggaaaaagatggtctatattctctttattgcatatacttaatgtttcaaaagaatgcagattctgtgtttaagcacagggctgatagttgtggttttgtttacaaatgttctgttttggctgctattggttttttaaagaggttttttatacttttgtatttgaatagttatgtttcactgatgctgagccagtttgtatgtgtgtgcatatatgtgaactgtaactgacaagatgaattactcagtttctctttctctaaagcttgtttgatgaaactggttggtcctttcagtgaacaaaaatatgaccccaaatctgtttgctctggcttttatttcttcaggaagcagacttccacttaaatgccattttgtgattgtgtcaatcatacacattttatttacttcagagtttgaatagagagtacacatttcttctgcagatttatttcatgatgagtttgagttgcttagcagggcgtgtgggtcccgttgaagtgcagtttgaagcaactgcttctagatggcactctttcaggtggcacaaattgaacctgtatttgtcatctctgttccacacactgcaatgtcaagggatgcagaagtgagtagaattccatccctgcccttgaggatcttgctttaacagatgtaaaactgaacataaggtatttgcagatttaaacgaactgggggaaataatgaacagtgtgactctagtaataacattaaaatcatagacattgactaataaggttaaatgaatcacaaaacctttatgaatttcttttttctaatagttcttatatgttttcctgaaacatgtgagcctattcttttttcttctactttctatatactttctcccacttgagaaaggggccttgaggctgggtcccttcatggtatacctttagactgaacggtttgcaacctagggcttgggcattacattccctgggattcacatgccctaactaaacctaccttgattttctcagacagcacaggcaggcaataaagcgtcacagattgtcccctaaccccatccagccatgtgtatgggtgtgttttattcaatgggatagtactgagcacatgaaagaaatgaatgacttctgtcaatctcttttcattcagtcttctcattctgtcaattgttttctcatccgcagtgcctctgccagaactgtgctcacatccattatttaagccagatcttttctaagtattatagaagtgtagaggcacatagaataaataaaaccagacttcaaac

SEQ ID NO: 522 - protein, 263 aa, Homo sapiens
DHSGIIDGSPRLLNTDHPPCQLDIRLMRHKAVWINPQDVQQQPQDLQSQVPAAGNSGTHFVTDADSGPSPSCLGDSLAETTLSEDTTDSVGSDHGSSEKSSSFSLSSTEVHMVRPGYSHRVSLPTSPRILATSPYPETDSAFFEPSHLTSAADEGAVQVSRRTISSNSFSPEVFVLPVDVEKENAHFYVADMIISAMEKMKCNILSQQQTESWSKEVSGLLGSDQPDSEMTFDTNIKQESGSSTSSYSGYEGKLCCVTGQPSD

SEQ ID NO: 523 - DNA, 33126 bp, Mus musculus
  misc_feature (1)...(33126): n = A,T,C or G
tgcctagttttcattgtaattatatggtcatccttgaagttttctctatggcggtggtggtggtggtggggggggggtggagattctgaaacaggatgtttcagnnnnnnnnnnnnnnnnnnnnnnnnnnnnnnnnnnnnnnnnnnnnnnnnnnnnnnnnnnnnnnnnnnnnnnnnnnnnnnnnnnnnnnnnnnnnnnnnnnnnnnnnnnnnnnnnnnnnnnnnnnnnnnnnnnnnnnnnnnnnnnnnnnnnnnnnnnnnnnnnnnnnnnnnnnnnnnnnnnnnnnnnnnnnnnnnnnnnnnnnnnnnnnnnnnnnnnnnnnnnnnnnnnnnnnnnnnnnnnnnnnnnnnnnnnnnnnnnnnnnnnnnnnnnnnnnnnnnnnnnnnnnnnnnnnnnnnnnnnnnnnnnnnnnnnnnnnnnnnnnnnnnnnnnnnnnnnnnnnnnnnnnnnnnnctgcattcttctctcatctctccacacaaaagtgctactggcccggtcgccaggttcctgtgtgtccatctaatgatttctacttgtgtgagtgcctgggtcaggaatgtgcgtggcaatgatttattcactcacgacatagttaaggttaccatcgctgtggtgacacaccatggggagcagaggggtttttggctttcgcttccacatccatagtccatcactgaagtcagggcaggaactcaaacagggcaggaacctagaggcaggagctgaagcagaggccatggagggggctgtttattaactcacttatcatggcttcctcatcccgcttttttataaaattcaagttctcctgctcaggaatggtaccacctacaatgggcagggccatccccagcaaacactaattaagaaaatatcttacagctggatcttatggaagaatttatttcctcaagtttcccctctttcagatagctctagcttcatgtcaagctgacagaaaactagccagggatatgcaacaaatgaaaatttagtatttatcatgggccagacagggtataaaaatactacacacacacacacacacacacacacacacacacacacacacacgaccgagtctgattgcaaatcatatgccacctcatttctgccacttgagaaatttatttttccctctggaacaataagatgctactccagaatagcacccctagtaggtttaaggtcacatctgttttcttttcaggagttttatttgtgacagaaccattaagaaacccttcaactgtagtcaagtggggtaggtgaaattctgaaggggctgtagttgtaggtgtgtacagttgtagttgtgtacaggtgtgcagttatgggtacggtgaggtggggacagctagagagagcagaaaagttggacagatactgtgttggggcaactcctggagacagtactcttttcttttggtttcccagagagtagcagcagaaagttatagagtccacctctgggcatcatctggcttgaaggccacccaagaagtgctgtgtactgttttggtagtgtacgactattatatcagcatggaggaggctgagacagagggcatgaggttgaggccagcctcgcatagcaagacactgtcaaaagggggcagggctggagatagccagaggacctgggttcaattcccatcacccacatggcaactcacaactgcctgtaatccagttccaagtgatgtgacactctcacacagacgcccacgcaggtggatccacatggtgagtaagacccatcagtaaaaaggaaacacacagcaacatgggtaagtctcaacataattatagaagagtgcacgtgattggttccacttatataactaattgaaggtgacaaagtgatgcagggttgcaggggtggcggggggatcacagtagggcaggaaataaaacctgtgtgtatctatgttcaatatcttgtgagtgtatgctaacatttttaaccctctaaatttgggtagctaactgcatgtgaactgtactgagacaaatacaaaaatagccacagtgatgcctttttctgtctttaaaagttctcttgtggtgtgcacagtgacgcatgcctgtgaccccagcacttgggaggtggtatgaggtggagaaatatgagttcaaaaccagtctggacagagagcaagatctgggcttaaaaacaactgactagggctgtggggagctcagtgacagatgcctgccatgcacaaggccctggatttgatacccagcactatggaaaggacactaccgcccccttaaaaccaacaaacactagcagaggctctcttaccttctctgccgtgctcagccatcctaaggcagcgccttgacctctggagtactctacttaacttcattgcttgtttgttatacatcactggtgagccctgccagagagcagatatggtgttgggagttagggaggcaatgagccacccagggtcacggggaggatgcacccagggagtgaactgatgtggagctgagcactgactccagtaactgggtcacatggacaggactagttttgcacttgtaaaatacaggtcctaatactaacttcatgaatttgtcaccagggcccaagaagagaaatgtcaagagtctgtctgataagtatcaagggctagtattgtttctaaagactgtttggggacaccagcttggcattccggaaatcttcgggcttctctggaattttataaggataattagagaaatgtcgtctgcggctggaagatggtgatttgtgagtctgtggtgaagggtgtgtgcttactgttggaagggaaacagaaaggcgctgaaggtcctcatagtgtggaaaagtaacggcacagtccctcttgtttccaagagtgtattttacacccagtcaagtgcacactaactctaagtataatggctttattgttgttgttgtataccgtaagtattaaacacacaaatggagacacagaacatttcctcgaagttcccttggtcccccttttactgcaatgtgctacccctataggtctgcctcagatctccactgattctttttgtccgtatttgaacttagattcatgcagatggagtcatactgtgtacagtcttgtcagcattcctgctcctgctgtgacaagtgaccacacaaatacgtatcttgcagctttttgtgttagaagcccagcaaggaactaggtatggcaatgcagtcctgaaatcccagcactcaggaggcaggagagggaagactgtgaacccggggtagcctaagctactgcactacaaagctaaacaaaagcataaaagaaatccatcaaaggttttgctgggctggagtcaatcgatgtgctggtaaagctgcattcttctctagatccctaacagggaaactgtctttttgtcttttctaacttgggacacatcccccctccactaacctccccccgccccccccaacaccttgacaatacttggcccacaactccttctccagtcttcaaaattagcagcaacacaccccttattcctatcctccccatccacagcctccccctgcccctggcagtggccaggaaacattctctgctattagagattcatgttatcagactgggccctgtctggcttcaatatgctgtttcctcgtagacttgtatattgtgaccctgtcctaggaagggacaaatgtagttctctggtgactcaggttacttctcaagatgaattattatgaaaataataataataaacaagccaaaaaaacccaccctgcattttactgagtttttgtctctcagtgttctcgctcttaaataagttcgtaccgcaacgctgtctgcatggtgtgatatagcaaggactcttgccagagctggaagctgtaaggctggccagtggtgggcttctggcttccaaagccgtgagctgaatacctgccttttgcttgtaatgtacttagagccaggtattctgttacagccacagaaaatgaatcaatgcaggctgtcttagttagggtttctaggactttgaagagacaccgtggagactcttataacggaaaacatttaactggggctagctttatactttcagaggtttagtccattatcatcatgtcaggaggcatggcagcatccaggaagctatgatgctggaaaagaagctaagagttctacatcaggatcacaggcagcagaaacagactgaaaaaacacagtaggtctggcttgagctcctgggaacctcaaagcctgtgacacacttcctccaacaaagctgcacctactccatcaaggccacgcctcctaatagtgccactccctgtgagcctgtggaggccattttctttcaaaccagcacacaggctcgctcagatgatccacagttatctcccatggcgagagcttcagcctctgtcgtaggtgctccttcgctagctttgtacgcccactcagggtgatggggtacagacctttgaggggcacgagtgatgctcctcagcctcgtccaccttgttgtgatgtcccacgagtcgtattgcacgtttttacattcatgcctttgaaggatgttcaggctgttagcaactggggccattacacataagaacttactcttaccttgtatttcattgcatttgtaggggaattgctaacccatgagaagatggcaggctagactttatgtgctcacggggggtcactaacatctctttctttgtgaggcatatcttcaagtgtctcgtctgttacatttttgtcgggttgtcattgtcttatgaatttgtagacggtcattctatgctttaaaaacaaactatttgtcatacacatgcattgcacatgtatgtggatatgggtagggttcttcctgcttacatttttttttcttttttgcgatatgtctttggtcagcaaccatttttaattttatgaggtctgatctcttaattttaaaaaaacaaagttccttccaggtacagtagcacagagtgcaaccccagcacttcgagagtggaagaagaggctggaggattcccagccatcttggactgcaaagggagagcccgtttaggtcgagacagctggagaaacagctcagtggtagagtacttgcctagcattcatgagagcctaggtttgatcctcggtaccgaataaatgaagaggaaaagttgcttttgcaccatgtctgaaatcactgagtcataaggatattctcccgtttctgaccgaaagcagcttagctttagctcatccgctatcggtctgtattctatttccaatcagtttttttggatctggtttgtggtagacagctatgccagatttctttgtcaaaaggacttttctcacggtattgttacttcttagaagtcactttatcaaacatgtttgtatccatttggggagtctatcctgttctagtgggtcatttgcttagtcttttattttgaaacagagtatcactagtttcaaagccaatacccaagctggccttgaactggtaatcttcctgcctcagcatcccgcacaacaatcctttgccaaattaatctttcttttgctttgtggtgggaagtgtgcaagcagtctgttgttaagctgcatcttaaaccagctttcttcatcacagctttataccaagtcttgactctgtatcatctctaatatgtctctcattaatggaggtccatttggggtttataccactgggttgggttaagttgtgtcacactctcagatttgctcaagtacctctggatgtgacctacttggagatagcatctttggagacgagatggagatagggtaaggccatccaaagttacagctagtttaatccgtgtcaggtagtagttgctacccttaaaagagaagagatccaagcagacatacaggggatatcacatggcaaccagaagatcagggtgacacactgaccagcttgaggcactgaggatgaccggcacatccccaggaaccaagcagaggcctggggcagatcctccctgcatacgttccgaggaagctggtccaggcagcatgcgatcccaggtttccagtctccagagctccgggagagaatgcacatctgttgttctaacttccctagcagctcagctatggacagatgctgaaacatgactcaagctaggctagggaagaagaagaagagtctgtctcttagagttacaggaccagaactgccaagcctgttatttatttgttacaggaggcattcaggctaaagctgaattgtaaagatcagaacatacccttcccctataggagtgtacacaagatggtgatctcactctacttatttatttttggtagttttgaggctcgaatccagaatcccacatgctcagcacatgctcggcacatgcttggcacatgctcagcacatgcttggcacatgctcggcacatgcttggcacatgctcggcacatgcttggcacatgtttagcacatgcttagcagatgcttgtccactgagctacatcttcaggccctgacggcttattttatttttcccctgtagatgtcagttaccgatagggttggttaacatagctgcttcatgacatcagagacccaagacacttctatgtttctgctgccattctaggaaagtgatctctacctcatggctaaaatccagcttcaaggctgcctgtcatcctgtaggagaaagccaagtgagggagacttactcaggaagccacataggagagctctgtctgctgcccaaaatttagtcatatcaccaattttaactcaagatagactggaaatatactgtttcgggaatgcatgagtctacttgtttgtttacagattcaactagaagcatcttccatagagtgtttgtggagaaatatcaagcgcagaagtcctatgggtaattgcaggtaagacatttaaggggaggaatatttgttctgaaagtaaaaaaaaaaaaaaaaaaattaaagtgaatgaatttcagttatacatttccaggaggaaggtgagatggctgagagaaagtaaagtcctggaagaaaggatccaggagggtgctggtgagatggctcagtggataagagcatcgactgcccttatcctctcctgagttcaaatccccagtaaccatatggtggcttacaaccacctgtaatgagacctgataccnnnnnnnnnnnnnnnnnnnnctttaaaaaaaaaagaaaaaaagaaaagaaaagaaaaaagaaagggtccaggagaggcaggaggttagccatgataacctggaggattcagaaagatgagacccttaggtgatgctctggacaagtttcatgaaaagagtggccagcagtgtgcagagaagaggtggctatggtctgactatgtcagaccttggggtggcctgaacattacaatctcattgcaagtttgatcctgtcaaacagcggggcctttgtgaactggctgtcaccagaatagagctctcccagatggaagtaagggttaccaaagggcttgaagggggcgccgtttgctctttccttcctttcgccctgtgagcaatcagcaagccctcaccagacagcactgggtgggagtcttgatcttgggccgcctggccttcggaacagtggggaagaaatctccgtgattcacaaattacctagcctgtgatattttattatatgatagcaaagcatatctacgggagagaccggttaaaataaagatcgggtctttacagcactagaagtcctgactttcctgttggaaattaaaggagacatcaagtctttttcttgaggccattgcagccagagactgaatgactgaatgagcttttgaaacctggaagttaggtaagtctcagtgaggagatgaaggatacagctccccgtgcctcctgagggacgggttgcacctgaacactgaggtcattgactatctctgtcaccactgtcaggtggggggggggggcataaaaggccctaggatatggagcccagccagaaggctctggagaacaagggtttaaacctttacctggttctagggaagaaatcaacacatgtgcagcactgagtgaggcctttgcactgagatgtgtgtaaggatgggctgggggcaacccaatttcacaccaggtgaactgtggacaaatgaattgtgttccacgcactaactgaacaggtaattggcatcttttttttttttttttttttttttggctgctcctcccagattggttgctgctgttggcttatctgctctggggctcagtgccacccttgactgcttagttcttcttcaccctagggaggcagggtgtggctaacttcaaagtggtgctgaaaagagacaggcctgccttctattaaaccactaaggggtaggcaagccccttagctgctctattccagttttcacacctgccgaccactggcaatgattatattattcaggggtggctgtcaggagtgacctggtgcatgccacattctgacacctaggaaggctggagtcactggggaaagatgtcctcacataacaccatccaaagattctgtgatgatggccgttgatcacttgaaagtgtctagtatagctaaggaagtgtctggtgtagttaagaaagtgtctggtgtctggactgaaaactttcactttattcaattttgattgttttacatttatttatgaaagtttatttatttattttcttttgcaggtctgaggatgagccttcagactcagggctcacccatgctaggcaagcactttattgctaaatcatattcccaggccccagctagccccttactttacattaatttagtggtgtgtgtgtgtgtgtgtgtgtgtgtgtatgtgtgtgtgtggtgtgtgtgtggtatgtgtgtgtgtagcatgtgcatatatgcacacaaggcgtatgttgtgccggacaagatcagaggtcaaccgcaaatgtgatcgattccctgggcactgcccacctccatttttaagatacagcttttcattgacttggagttctcactttgggattggctggggagtcccagggatttgccagcctttgcctctcagggctgggattataagtggtgtccatctagtttggattttttaatgtggattttggggcttgaacttggatcttcatgcgtgcacagtaaactctttacagacaggattgtactatgtagggttttttttcttttcttttcatgcagtagtcctcaaatctccactctcttgcctagacccccttctaccatcctccttagggctgggactataggcgcaggccaccagcaggcctcttattttacgtttaataactacctggggcaaagggctgttggtcacctgaggcaggaattctactgggctgtgctaaggatggacgctcaatcatacggaccctataccagaatgcatctgtccatgtggtactctgcgctcaaagatcatctcaattgaagactgcattcacctcaacccactgccctcagctgtccactctgtccacgcacaaccttataaattccttgagaaaagtcagatggaggactggttcttcgcagaggctactgaggcccttggctcctttatttttgcagcaaacaaggaggctttctgcatgtgcagttccatttcatagatgaggctcaaggaggctcagccagaaggcgggaaacagggtaaactcttggagaactctgatgcccgcaaagacacttccttgggtcgggttgtcagggtggtagagaaagcggcgggtaaatatttggggcggtatcctggactccggcgacacccgtcactgcggttcttcagaggccagcgcgtggctagggcggtgccgggagtagggggtggagggacaggggcgtcccctaggtcgtctgggacttactcagcagccccgccccgccccgcccctgccggtggctataagacggagtagccggcgggtggcgcggcgcaggcgagtagctagcgctcaggctcggcaaggagcaaggcagaggcaccggagcagactgcagtgcaggcggcagccaccagggccaacacctcgcagcatctctgctacgcgtgtcactgagcaacttctccatgaagccgccctcggcgcagagcagtcccgcggcggtcgcggccgcaggtgagtgcctatttggaggtgtcttctccacctctgcgccccgggatcgaagccagggactgcgtccacgctaagctacactctcagctccggggcccctgagagctggagcctgcaagtaggggcgagagaacagaggtcgctaaggtcttcttccactgcccacccttctgtcctccatcaccctggcatcccgtctccggatcgctcgtccgatgcaggtttagtttggttttccacgcgggacaaggaaccggagtctgacacgtaacgggtgcctgctgactcagacttcccgccgccacgcgctccagggagcgagcgtgggcaacagtaggaaagcgcgtggggtgggctaggtgacttccagactttcagctcaacccacggaggcttcttctcctccgtgtctggtgacaggcgctttagagggtggttgggaggttacggagtaactgactgcgtggctgtcactggcaaaggcagagtggagttctagggaacgctggccgcccctccagatgccctctgtgccctccctcccctagccccggccatggactccgcggccgctgcagacctgaccgacgtgctgtgcgagttcgacgcggtgctggccgacttcgcgtcgcccttccacgagcgccacttccactatgaggagcacctagagcgcatgaagcggcgcagcagcgccagcgtcagcgacagcagcggcttcagcgactcggagagtaagtgaagccctgttgaagtcagtaatcctcagactcaggcttcctaaagctctagattcacctgggttatctttaaactgaggcacgacatctggggaaagtcagacccggggatctgcacggctctgagatgcctgaagagttgactttctgagtcgttagcccagatgtgcgggggtcattaaggcgttcttggggagagaggtacgagggtgggtgggtggctcttaaagagctgtgggtctacctgtcacggcaggtgtgtaccatgaggcctgagggtttgtgcagtcagccagaactcctgggagtccagccaggccttccaaccttttcccgcctttctacccactcttcgctcttcatttttttttttttattttattttattttgagactctcccaaggtgatctatgtagctgcgggtgacctcgaacctctctgatcctctttcctcgggcttcagggtgctggggtgacagtgcaatgccaccacatttaggcacatcagtttataggcaatgctgggggtcagacctagggcttcttgcacgctaggcaaacactagaccaacagcaccctccctttccttttccagaatgggtgttggggaacatgaggacacgagtgagcacaagaatgaaacatttgtgaaaccaaaatggtttcataagctgctgtttttggaatgcttgaaataacttcgttcactttctgcctagctcccaggctctttcgccactccaggcacttttgaaacagtctcccgctgggctgctgagttcaagtacagggtttcaggcacgcccaccctccaggttacccacagaaggtcatcctagtaaccttttccacattgcctctggagagggagagagagagggagagggagagggagagggagactatgaagaggtcctgctgaggcaggaatgaagtcttctcttctttaagctccttcctgctgaccttggggcaatggttttgtctttgaggaacctaagaagattgggatggggatgctggtcaagaactgagtgagctggctctttcattgctgtcctgggtctgtggaaccatctactggtaggaaagagctggtccagtagaagcatctgtgagagtagaccagagctgtcctggatataggctggagtaaacacctggacttggcaagatgctgaaacacacacacacacacacacacacacacacacacacacacacacacacattagaggcagttaagtagactttagagaaaaatttttctggtgtacgtttgaaacccttacgtctttgtggttggggggaggggagttcccaaaccagggaatgggggaggaatcccaccctctggaatagcgccgcaaatgggtggcagggattgttattnnnnnnnnnnnnnnnnnnnnttagttttcagtaactcaagtgacctgcaagaacagtgaatttggtgaccttttatttattattatataattgttttcaaatcttggcttattcactgtttttcaatgtgaactttaaattctgtttgttcttgtgcccttagtccctagatacaggctcagacatcaccaattgtgctgtccccaactctgggagtaaaagtcacattgctgttttgaaatctagaaacattttcctttgttactgggtgaagattctgagcctgagctgtcctgagaagggatgatgtttgacatcctggtcaggatttgaatctgaaacccaagctctggtttgattttccttagccacctacacagatcaccacgtgacttagggggcgaagggggagggaagagggctggtgagctgttcatttccatttagaacttttgcgtcttgatgccaatgacctggtcacttgttctcagcagtcaagtgaagtctgacgctggaaatttgtctccacagctgtggtgtaacttgaatatatttctttccactgggtcaaggaacaaatttttcattgtgtataaattctcttcttcacagaagagaaggctaggtctgtccccgatgctctgtaatcaagttcagctccttgctaagccccagcctcagtctagattagagtctgaatttgtgcagtgatgtcgaacagcacccaccagttctgccaggaggggtttcagatccacggtatgtttttaggagtctcaaaaagagaattcaccacagtttcttaacagttggagagaagattgacagaatttgcagttttcttaggcatatctctgtgcattttgctttctgcttttgttgtcaacttaagctttctttctgtggtggttggagagtaacagggaggatctaagaaagcacagatgaccttggtctttgccgtcaatgtggttttgttccctgcatgcttagaaatcgtcttggagggctggagagatggctcagcggttaagaaatcgtcttggtggattttgtgtgcatctaagtcatgctttcttaaggacacataatatgtctgtcttaattgtctccaggaatggagtgcagacattcctaatacttgtctgtctggtggaagtggatgtctgggagaggtgcagcccactgaaacttagctctcctgagagggccaatcaggcttatcatggtggtggtggcagctagcttacttttagcaagccctcactggggttgctatgattgtaacgtgatagctcttgttatcagccatctctggctggtcttccaatgttatcacacaaaatctttaccacagtcctacaagttaggcacttttatcttcattagttttgctctggttgcctagcatgtgagccagaacttgagtagcccagcgttccctcaagctcagatcatgtatctttttgtacgtggtattgcaggtccttttcaaggctttcaggatcaaaggtctgtggacctaggtgatgaatattcctcctcatttttgaaaaatactaccccccccattaaaaaaaaacaaaaaacaaaagcaggttgcaggactggagtgatgactcagaggtaaaggacaggtattgctttccaaaaggaccagtctttggttctgaacacccatgttgacagctcacaactgcctggaactcgatctgacacctttggcctccaagggcaccattctcaaatgcacagacacacacattcacactggggataagtgaaagtggatttttaaaagggctgtgtctttcccatagcactctgttaggaacagttttaagagtctcagtaaaagagcaatgcagatgggagctagaaaagtggtcttcaggtttgagcccttggggtgctgtagaagttgaacatctttgggtttgtttgtttgtttatttatttatttatttaggttctttcaagccagggtcttactatgtagctctctctggctatcttggaactcactatataaaccaggctggccctcagactcaccaagatccaagtgatgggattaaagttgtgtgcctagcttttgttcagtatttttttttagctttaaaagtaatctttaagtgggtttaataaagttttcacccattctatcccaaattttatcccatgtatttattgtatgcttctactggttgacttcgtaaatggtttattatactgacttatgcctttaaagatgaggctgaggtgtgattcttatatattagggtttcacataagtcatcctgtgagaggacaagtgtgctgctgtttaataggaaaggtctgaggtctactgtccatgccgtagctatgataagattgtagatatttggggagaatagggactgggtgctttagcatagcaacacttagaacatctacttatgtttagaatatgctggtctggctctgagagaggagaccttaggaatcctagaaaccagaatgacagttaccaagccagtggctaatggagctgaggagtcgggagttgaaacctggcaaggtgtgaggaggaggagccctccagatacctggtaccacattaggaacggagtgagtgacagatcgtattctctgatatctggtatgctatcttagagggtcagggccgctccagagggtgtggggggggcacaatgatcaaacagagacccagggttctttggcactgtgccatgcttcactgaagctgtcagaatttagaattggaggagaagaaagaccctccctcatgcctgccattccccatgggaccagcgcgacagacacagggcttcctttttcttggttaattactgtagttcccttgctgcagatgtgtggactgttctatatttgcaggaactctgggcaaggctcgctgtctgtggttttacttttcttcagggtagcatgtgtccgttctaaccctaaattacctttctcccaacccccaaaccaaaaacaaaaaacaaaacacaaactatgcctttaaaaaacaaaaaaaaaaacaaaaaaaaacaaagcttctgtttgtactatggaatttcttatacttgatgggtatacctaaagttaggggttgtgtatatataatatgcctttgtttatttatttttgatggtctctaaggagacccagtcccagaatctgagattccaatacattaaatggatcaggaatttaaaggatgtttgcaatggggatttgattctggtgaggtgggctttcaaggccgtctgaagtagacgccttaaggtctaccttaccacatttaaaggttcctcagatcatcactgggccccttgatcatgacaacactagatagcagggtgggacagcagtacatgtctgtgctatcagccagaggcacaccgttgtcattttatcagactggctgaatattatttttgcaagagctagcgttctaagggagtgagcacagccggaggctgaacctggctcacctatccatctgccataacctctagcacgagattccgttcatgcaggcttcttagtaaaagcttgcttgggagaaacaccgggcaaagatgctcagagtctgggtatctctgtgtcgtgggcatgtcctccgtgaattacctctgaagagaacctttcaaaaataaatgctataatctgaaaatagcgggaagccagggttcagagtcttggttcttctcctcagcgatgatggcttctttcctggacctgctggtctccattttgctaggaactcgaaaatccagtcattatgaagtcacggcatcctacacagaatgcataggtcgttattgcttttcacatgggctctgctcccccaccctctctacagcggcatagcttcaggtcctgagggggtcgaacaaagtggagcctggagttggcctaaggtctgtgaagacatggaaagcaggtagaaccatggtgaggtgatgagctgataggatgtgggacagtgtgtgcgtgcgtgtgtgtgtgtgtgtgtgtgtgtgtgtgtgtgtgcacgtgcgtgtgtgcgagtgtgcatgaggtggggtcaggaagaagggaagtgagcacaggctatgcttgccctgcctctgtatgtgtatgttatccagatatagatgctgtattttaccccctcttcctccctcattatgagagcagtgtgagttcctcagcactgaggtgaccatagatcagtctggcttacaacagaattgatttgtccaaaccagagcctgcctttattttcctgaccttgagggaaattcgtgggctaaggaatttatcatatggactagactttaaaggatcgaaggcaagccaggatggtcccctgagactctggcttcttccccacagtcacttcatgctgtctagggtgaggtgtcccttacccctctgagggtgttcttcactcttttgctatttcttttttgtaacgaccttttccacgttgaggttagtgcttctttaaacagccatagtttcgaagataaaccagcctgattatatgtgaatgtgaaatttctggagatttggagctgaacaggagtgaagttcaaagctagggcaaggactgtggtgtctgcagggaggggtggaatgaggtgtggtattgaaggtggctcttaagtgccatctgttctgagagatagagagcagggagcagggtggcctttacactctgggtaaagtctagtgagtctcagagctggaannnnnnnnnnnnnnnnnnnnnnnnnnnnnnnnnnnnnnnnnnnnnnnnnnnnnnnnnnnnnnnnnnnnnnnnnnnnnnnnnnnnnnnnnnnnnnnnnnnnnnnnnnnnnnnnnnnnnnnnnnnnnnnnnnnnnnnnnnnnnnnnnnnnnnnnnnnnnnnnnnnnnnnnnnnnnnnnnnnnnnnnnnnnnnnnnnnnnnnnnnnnnnnnnnnnnnnnnnnnnnnnnnnnnnnnnnnnnnnnnnnnnnnnnnnnnnnnnnnnnnnnnnnnnnnnnnnnnnnnnnnnnnnnnnnnnnnnnnnnnnnnnnnnnnnnnnnnnnnnnnnnnnnnnnnnnnnnnnnnnnnnnnnnnnnnnnnnnnnnnnnnnnnnnnnnnnnnnnnnnnnnnnnnnnnnnnnnnnnnnnnnnnnnnnnnnnnnnnnnnnnnnnnnnnnnnnnnnnnnnnnnnnnnnnnnnnnnnnnnnnnnnnnnnnnnnnnnnnnnnnnnnnnnnnnnnnnnnnnnnnnnnnnnnnnnnnnnnnnnnnnnnnnnnnnnnnnnnnnnnnnnnnnnnnnnnnnnnnnnnnnnnnnnnnnnnnnnnnnnnnnnnnnnnnnnnnnnnnnnnnnnnnnnnnnnnnnnnnnnnnnnnnnnnnnnnnnnnnnnnnnnnnnnnnnnnnnnnnnnnnnnnnnnnnnnnnnnnnnnnnnnnnnnnnnnnnnnnnnnnnnnnnnnnnnnnnnnnnnnnnnnnnnnnnnnnnnnnnnnnnnnnnnnnnnnnnnnnnnnnnnnnnnnnnnnnnnnnnnnnnnnnnnnnnnnnnnnnnnnnnnnnnnnnnnnnnnnnnnnnnnnnnnnnnnnnnnnnnnnnnnnnnnnnnnnnnnnnnnnnnnnnnnnnnnnnnnnnnnnnnnnnnnnnnnnnnnnnnnnnnnnnnnnnnnnnnnnnnnnnnnnnnnnnnnnnnnnnnnnnnnnnnnnnnnnnnnnnnnnnnnnnnnnnnnnnnnnnnnnnnnnnnnnnnnnnnnnnnnnnnnnnnnnnnnnnnnnnnnnnnnnnnnnnnnnnnnnnnnggacattaattcgattcggggcccaacattgtgcttatattagtgtttagaaggaagagacatttttcacgaaaagtagcctatattttgagtgtttaaatttgacttacttgtatgagtgttttgctcatatatatatgtggtgcctgaggaggccagaaaagggcattagacccctagcactgtagttagactgtagggagcttctaagttggtattgggaatgtaaaccaggaaaagcagctaggtcttaactgatgagtcatctctttagtccctgctccccctcacccaccccaccccttattttgacagagctactcccccccccctctttttttttggacagagcctcctgtatttccagtgtcaggctggccttacgctcagtatgtagctaaggatgaccttgaatttccgattcccctatttctacctccagagtcctgggatcaccagcgtgccgctgactgacgggtgtgccacactgatccagtccagggctcctgctagggtttgttctctctaccagttaaagcattaaaaggcagcaggagcctcagagaaatctgcaaacaggagcagaattaccacttgaaaaaaatggtggttattgggggtgaggaaaacaccgatttgtgtcagacacacagaaaaagaccctctctagagcagaagactatagagtttccctcccctaatttaaagctggtcagtttgaaggaggacaggatggttgattggcccacggctgttttgtaatctgtcctgatccagcctcaaacttgttgagccagtccatcagcagagagcctgagggtgggagacgaaagcctgcaaggccttttgcttagactgccaggtgtttctttcaagtcaggaagctgaggaagaagccaaccatcttgggagctcactacctttattactaaccatggcccctctgcctatctgcccggcctacaagggagtctgtctaattcctagtctttcaccactgtgccaaatttatatggtgctggggactgaatccagggtttcaggtcttctggacaagcaccctaccaactaggttatgttatatttcatccttcatcctatcagccaggatctggccagcagactcctgtgtggcagaggcctagtcctattaattggtcacacctttttttttttttttttttttttaatttaagaggaacaaaggtagccagtggacttggacacacacacacttctctgcctaacatcatttagtgcctagtttgggaactgtcctgctttttaaaatatagatctgtaacatctggttccctgggagattaactgctgggttctgtagacaggctggcaagtgtgtggtttggtaaggacagctcctgataactatggcttccttccttaaaggtgcagactcagtgtacagggacagcttcaccttcagtgatgagaagctgaattctccaaccaactcctctccagctctcctgccctccgctgtcactcctcggaaaggtgacctcgccgactagactgcttttctgctcctttatccccaccccgtatcctcaactaggctttccccacatgtatacatacacacatacatacacacataccaaatatatatttgttttaatatagatcaaaacatctacatatagatgttacaaatatgtatacatatgtacgtgtatatatatataaatacatatacatatgtacgtatatatgtttaaaacacacacatacatatatatatctatatttaaaagtggacatgactcaaagcaacagctccaccctctctctgcttaggttttaacagactaaagaggggtttaagtttcatgaataggttcttagtttttggaactggccaagtctcaccagctagagagctgaatgttctgttacattggacaggcgccctgctgagaacaaaagaaggctaccccctccaaggaaaagttgaacttgctgaaaatagttgcaaaagacaatcaaaatggagccaaactcttaaagaaatgtgacgatcccactacgtgtctccacatagaacttccctctttcttgaaagagatagttttaaattcccttcccatcgcaaaagttagcagccacaggggactcgccgtggttcagtctcgatctgtaatggctctgtgcactccagggagagagcagtctagagaatggcttaaataccgctcagatccgctccctaatccgccagaggagaaaaggcccttgtggcgaggggactggaaagccaagaacgatcatctgttgtaggaagctagggtgactaagaacaatatttagcaatgcatttcaaggaagtcatgaatgacgaattatacagaagaaagtaaaatacgtgcagaaagcgtctgcctctggctgcagaggcagcagtgtctagatacaatgtagcaatgtctgtgctactctggatgtgtcaagtaagactgcctggtccgtcacggaaactcacgtggatcacagccagtgacttccctcggggctggtgagatggctcagtgggtaagagcacccgactgttcttccgaaggtccagagttcaaatcccagcaaccacatggtggctcacagccatctgtaacaagatctgactccctctttctgggagtgtctgaagacagctacagtgtacttacatataatannnnnnnnnnnnnnnnnnnnttagcagccacaggggactcagtctcgatctgtaatggctctgtgcactccagggagagagcagtctagagaatggcttaaaataccgctcagatccgccccctaatccgccagaggagaaaaggcccttgtggtgaggggactggaaagccaagaacgatcatctgttgtaggaagctagggtgactaagaacaatatttagcaatgcatttcaaggaagtcatgaatgacgaattatacagaagaaagtaaaatacgtgcagaaagcgtctgcctctggctgcagaggcagcagtgtctagatacaatgtagcaatgtctgcgctactctggatgtgtcaagtaagactgcctggtccatgttccactttgacaggaaacagtagtagttttacactcacgtcatgttggaggatcacagtattgtcttccagtaacagcacaatttgccatccctccctacccccaacttttatgacactgacagaccagtcttttaggataggaaggtggttggggtggtcggtggggtagggattgaggactgtggagacctataggagaaacacccaggttagcctccaggtcagttgctaagatgaaagtaaatgtggggcagacactaaggtctggtgcgtggcacactcccatgaggtctctgaaaacagcaggttttcctaatccctgggaaagtcccctatcagctgtgtccgagagggaagctgaacccttttctgttttgcagccaaattaggtgacactaaagagctcgaagacttcattgccgatctggacaggaccttagcaagtgagtacacgctgggtgtttaaagtatagcagagcaccgagccccgcctttgataacgtgctatgatgtttcccagcttgccccggggggtaggaagttacaccataaggctgctctaggtgtagcaacgggacctcattggctcagaaagcagtttggaggataagcctgcagaaaagtttcccaactgtgcaaagaggtcagcagggcacaatgacatgttgattagaaagtggtgagagctttgctgagaagaagtccacacaggatgtccagtcctgagaaaagaggacagattggtcacaaatgccttcctccggccagcctggtctggtctgatcagggtaattttcccgggtttgatacaggagcctggtgagaggtctgacccatgtcaacttgccccgattcagtttgcgcttctcatttgggaatttcactctcattatccattttgtgtgaccccaaacggaaaacatcaaatcaaaattgcagtgggggtgtggtggggacctgtgttagaggaaggaactgccacactctctgcatgccctacttcaaaggacaaggttgcaggaggcagaaggaccagccgcagcctgcagagttgctggtgtcagcatttctcatggaggacttgctaagccttggagaatttgtgttctggcttcttacttagtgaaaatgattttttttttaattctgcaagaaatattctacgtttttactttgtcaaataggcaaaaatctaaaaagctagaccccatagctaactttagaataatctgtttaaaattagccatgttcttagcaccccatcattctgtatttgcttgatggttttattggcccctttgcgccatcctacatcagaagatgtaggcctgttttgacagagattattctaattgcagcacaatttgtaatcagtccatgcaacacgcctgtctactttatgcaaattgtagctggccccctagtccttccagttagccagccctgcgttgcagggaagcctgccattaactttgcttctcatgctcatctgagactatgtgatgtggttaagcacgcgagttgtgagcctctggcggggataacttattctttgtcctcttttcaggtatgtgaagcaaggagtttggggtccagaaggctccgaggacctggcaaatcggctactagaatctgctgtgggagagggcagagctgaggctcctgccccctggccattcttggttcactataacattagccattgggcccatctctgggcagttcggagagtgaagctcactttgtttacctacctgcagcatattcaacagaggatctatctaatgtgtttttactcctttaaacatagcccttctataatttaaaatgcttttatggaaatatttgtaattacttatatatagttggaggtcataataagctttcccatcataatatatttttgtatgcaaataaaattaaaacggagatctgtactttgaaagctgccttatttccgtcagtatatttccatccagtagtttcctagtgggacaggctcctggatccctagtgagcatcccatgtgctgtgcttacacagactccttacaactccttacattcttaaaaccgtttctttatgggggtggagagaagcctcagtggttaatagcactagcggctcttctagaggatttgggggtcaatgcccagaacccacatggcactcacacctggcataacctccagtgccaggggatatgacgccaccttctggtttcctctggcactgcatgcatgtgatgcacagatacttaggcaaacactcatacattaaaaaataaataaaaatctcaaaaaatatttttcccttggagccagagatatggctgagtagttaagagcactggttgctcttccagaagacccgggtagaattctcagcaactataagtttgctcacaacttatctgtaactctagttccagggaaatctaatacaacctctgacttcctcagacagcagacacacatgtgccgcccagacagatgtgcaggaaaaaaaaacccaaaacactcaaacacataaaaagaaataaatcgccgggcgtggtggcgcacgcctttaatcccagcactcgggaggcagaggcaggcagatttctgagttcgaggacagcctggtctacaaagtgagttccaggacagccagagctatgcagagaaaccctgtctcaaaaaaccaaaaaaaaaaaaaaaataaaataaaaataaataaataaataaatctttttttaaagcctttgacttattttttctcttattgtttgatagttttcatatctttacataatacgttttagtcattgtcacgtacaccccaatccctccccagtctcttcctctcctgttggaccctgctcagcaagtcaccctcctgctttcaagtcttctttttgtgtggtccagagtttgatttagaatttcttgcctgagtgcgggtgggaggttgtttattccagagggagagcaacgtctcagtggctacaccaccgaggaagatggaaaccatggaccagttcttgactttctgtgcatcctcacccaggcactgtgctgagctccgtctggcccagtcttgcatatgtgctgctgctgaaggatccatccctacattctctgtgctggctggttatgtaaacttgagtaggctagagttacctgggagagggaacctcaattgaggaaccgtgccctacagactggcctgtgggcacatcttccgggcttttgcttgattgatgattgatgtgggagggtccggcccattctgggcagtgctatctctgagcaggtgatcctggcagctttaagaaagcaaactgagccgggtctggtggcgcacgcctttatcccaacactcgggaggcagaggcaggcggatttctgagttcaagaccagcctggtctacaaagtgagctccaggacagccagggctatacagaggaaccctgtctgggaaaaaaaaaaaaaagcaagccgagggtaagcagcatttctccatggttgcttttttgcctctgctctggcttgagttcctgtaaggagttttccttagtaaccgggacatgtaagtcacataaatccctttcttccccaaactgcttttggtcatgattttatcgcagcaacagaaaacaagctagggccatacgtattgtcacatggtgcagagtggtcttccttcctgagttcctgtggatgacagactacatttgatgacagtcctagagattacaacagaactggaagtgttcccagcgcctcatgacgtcacagtcaccatgatggtgttgtagtgggatgcattacatatttgtggtgacgctggtgtaaatctactgtgcttcaggtcatgtatagtgtcacgaacagtcataagatttgatcatgccgggcgtggtggcacacgcctttaatcccagcactcgggaggcagaggcaggcggatttctgagttcgaggccagcctgctctacaaagtgagttctaggacagccagggctatacagagaaaccctgtctcaaaaaaccaaaaaaaaaaaaaaaaaaaaaaaaaaaagatttgatcatgacagtaacagtcatgctacttactggctcgtgtagtcattaccttctttccatggttagaggtcacaggttttaagtattcaagttttttttttttttttattgtacacaggctctgttgtactgccagctgcttctcacatcagttaccaattttcttgattgtatgaagaagttacacttggtcaacatatgccgcctggatatgggctgagacctttctgtggtgttcgacagtggtaaaaatcacttagcaacgcgtgttggaaaactaataagatttggtcttttctagggtagtgtgaaaagacaccttttgttttcttccctcagacttctgagaaagctttgtgtgtgatgtaaacattttctctccttttttaatttaaagaacttctgtgtctgtgtgtgtgtgataggaacacatgtgccacagtgtgaggaagtatggaggaaggaatacatcttagtgaggtagttctttccctccacttttgaatgggatcctaggattaaattcaagtcagtaggctagtgtagcctcttgctggccgagctatctcactcactgcccgccccacacttttttttttttttttttagaaaatttgagatatgattcactgaaattttagctttgcggctcttggcatatccgcagatattatagccatcatcgctgctcattgtttgtatgaatctgtctactttagacacattacatgaaattatatgtgttcctctgttagcatatttccaaggttaatccatatgtcatccctttgaataacgaagtaatattccaccgtgtggataggtcaccttctgtgtatacaaccattgcttgggtaacggatagcatttaggtttctacttctgacctagtgagaccgctccttcgtacccatgagcaaggatttggaggtctcttacctcagcttgatagaagcagaactagaattatggggtcaggtcaagggctgtgctaactttctgaggaactgttgagtgtcatggaagcagccacatcttgtcactttcccagctgtcgttgaggcctcctactgccccatgccctcatccaccgcgatggtgtctctctgaagagcactccactgagtgaggagtccggtctcacttgtcttgcagttcctgtctgatcaatgaagtcttctcatgtgattaccagcttctgtttcagggttgagctatagaaaatgaccgagcattctggatacaggttccttaccacatatgtgacttgaaaaatactctatttgtgggcctgttgtacagggctctctggccatatcttcaggatgtctgcttataaaagaccctcacagctgggcctgttgactttttcccttctctcctagaaaggaggtggggagggtaatggaaccctggtattcaactgccccacctcccaaccagctgtatgcagttcttcctagttgcagatgaccttaaggtaagggggcagggctttcccagtagatgaccaagggaggggacttcatcggcatagccagggggaagctgtcttccgggttgtgttccaacctccagtgcagctgcctgaaggtcacctacctccttcccataacctctcacccattgctctgtaagtaggcctaataaacacatcggttgcccctggaaaactttggtagaactgtggaattgcaccttggtttgctaatggcgctttaggaacagggtgataccgtgtttccatctctccacggaaggacttcagcagcggagctatattttcatgtttttggccttgaagcgatgacagttttgattttgttgaaatcgaattttttttttccttctgttgcttgcagttgtggtgttctttctaagaaaccagtcaggtcccagctcagaaacagtcactcctcatctttcaatatgggcagagtggttcatgactgtgatcccagaaactgaggtatgatcaccttgggtgcagggcgaacgtgggctacataggtgagttcaagggctacatagtgagactccatctcaaaacaaaacaaaaaataaaaatcaggcgccaggagagaaatgtcagtgaagtgcttgccttgagagcaccataactcaagttttatatccaaaacacacacaaagatgctgggcactgtggcatgcctgtaattccagtgcaggacaggtgaagacaggcagatccttggggtacagtcagttaccccaacttggcaagttccagcccagtgacgttggttctaaaacgtaggtgggtgggactgtggttgtggctctgtagtagggcgcctgccttattagaatggcgttttaggctcaaccctcagtactgaaaaagaaaaaagaaaaacaaaaggtacctgagattgtcctctgccatctccatgcgcatgctggacacacattcacactgtgagcatttcctctaggctccatccaaccgttacctagcaacagccaggtacaagcctgggctacatataaggactgtttccctctccccctcctctcccctccccctccccctccaactctttccacctctctctgtctctctcccatctcttatatgtcccagcaggcctctccctctttcttctctctctctctctgtctctctgtctctctctctgtccttctctgtccccttccttcctctgcctctaccccctcctccaggtcccaaataaacccccttttatattaggcttgtcacatggcttgattgttggggggcggtcaccttggcagggcccaccaaagcacccccctcacgccactgtttttttgttttgttttttttaatatataaaatacagaacacactcaatgctctcacacacaaactagacaaaataaattgtagttttagcttttgcatgtaggtctgtggtttactttgagttaagtggcataaaactagttccaacatcattcttttgcactaggccagccagttgtcacagtacgacttttaagacgatgtttccctatattgagtcagatcggtgcccctgtggaacagcagccgtaagtgggtggactctcatctccctttttctttctcattttcttgtctagtctcactgtgcagctcaggcttttgagctcaaattcacgaacctcctggctctgcctcctccatggtattcatgatgtgcaccatgccagtctggtgccttctgccttaacaactgatctttatttataggcatgaaactcctttcagttgatcaggagctggttaaattcttttaaagttacaaataaccgaagtttattttacctccttaatttctcgcaattatatcttgtagtttttgtggtataaaccttgaattttttttaaattaaatttattgttaaatgtcttaatcactgttctattgctatgaaaagacatcatgaccatggcaactcttcaacaagaaaacatttagtagagggcctgcttacagtttcaaaggttaatctaatatcatcacggcaggcaggcaggcagggcactggagcagaagctgatcctcaggccaagagagagacactgggcttggcatgggcttttgaaatgtcacagcccactcctagtgactcactttctctgacaaggccacacctcttaatccttctaatcctttcaaatagtaccattttttgatgactaaacattcaacaatatgagcttatagggagaccattcctgtttaaatcaccccactaaatattctgattctattaaaaataaagagtttgcttagtgcggaaaagcacttgtcataccagcctgacaatctgagatcaatctgacaacccaagtaaagatggaaggagagaacccatctgtaaagttgtcctctgacctttacacgtgcactgtggtacacacaggcccacagtcataaatcaggagcacacacctacacaacaaaaacataaaactaataaaaattttaaaaaagaaaatagatttttatgaagtttgcttttagcttttcttcattgatagtgaatagaactggcatcagttttgtgtatgttggtcccatgtcctttatccttgttgtgtttattatgcctcttgtgtgtgtgtgtgttacaaacatgacatcacactgtaagtactttgtaagcctttgcttctccactgacactctaaatgcctcccatttcttcactgcattggttgtgtcctcctttggttcttggtatcaaaggtcaagcttgtgccattaagcaagatggcatgatggccctgttgtaaagtgttacgttggtaattttctcagttttaaaaagatttatttatgtttattttataggtatgtgtgtttcgcttgtatgtatgtctatgcagcatgtgtgtgcaatgcttacacttagtccaggagaagttgctggatcccttagaactggcattatagactccacgctgtgagctgccatgtaggtattgggagccaaacccaggtcctctgacacagcagcagaggtggccactaaccactgagccatctctccagcccctctcatggatcacacaagtgtttggcttcttttctagattttatcttttccattgtgtgattctggctcttgcccacgattcccactctttgtctcctgtggataaatctttttgtttttctcttcaggacaccagtggctctttgctctctccatgtcttttcatgctggacctgaggaaagctaccttgcagttctttcttttggggctcccaagacccgggttccaagctgggcaggcagggagggcgtgaggctctgcggcctggtgtgagtgataagcttggggaaaaggaacggattcttttctgtgagtggggaggaggggtggcgtgtgctctgtgggccttggttggataatgacttagggacaagtggcctaagtcacagcctgaggttctgggaatgtgaagtgttttcagagctccttaagaagtggttcaaggagcaaggccatcacctgttttgaaaaacaggtgttatgtcatctggacttgaaaaacatgaatgcccccgcctgaagatttgtcacgtacatttctgtgtgtgtttcttgggcgttgctataagcccttggctcagagattaagaggtagacaagctggaggtttctctctcaccaactttctagaagtgagcagggcagggttgttccctggtcaccagcatggctaggcctctagcacgctcatttatctgtcagccagggggaggggagaaggctagtcaaccccaagcttgtccctttccacagcatttgttgaagacacacatcacctctgctcacatggagtcccttgttcaagtcttaatcacaggctaaaactaatcttctccagggcctgggatgtccttggaacaccacttgactgtgacccagagaaggttagccagcagtgttttcagtgacatagcaagactggattctgtgcaggcaatgcaggtttgtttggtttttgtttgtttttttttttctttgttttgagtggaaatattctgttctaatttctgagaggaatggccaaagaaaaacaaaacagaaaatatttcacacccacaagtaagacgatttagtgccagctcaagtatgatgtgccaacccagcctctggagggtcccagcacatgttgcttcctcaggaaccatgaccgagggactcgatatcacattcacctcaggtgtgagagatcacgtctgagctgaggggagatgatgctgattggccattgagaaccaaggttggatttgatgaaacttcttcatggatgtatccttctgggtgtgtggtggttaatgaaggacagattttgaatcttgaccaggttaagctctcatcaatactgtgtagtagctgtgggaccttgaacaagctatttcacacccagcatctctatggctttatttgtgaagcagagaggtgagtccttgtttgctagggtcatgacaaaaaatcaaacagagccaatgaattgtgtccagcacccttcctcttcatatccacaggcaccatggacttctattcctgaggtaaagctaagcttcaactccagtgtgtaccatgtacctgggagcccaagccccattgctgactgggtctgttacacaatcatgcttgatgtgtgctagccccacagttgcttcccctcagggggaagggatgcctcggcataggctcgctgagacacccccttctcctacacctcaccacaccctgatagaacatattattatatttctttatctttttaaaaattatttatttatttatttatttatttatttatttatttatttatttatttattatatgagtacactgtcactgtcttcagacacaccagaagagggcatcagatcttattatgggtggttgtgagccgccatgtggatgctgggatttgaactcaggaccttcggaagagcagtcagtgttcttacccagtgagccatctctccaacccccacaatcacatctaccacatgctcttgccaccttctcttcctctgagactgtgagccctaagcgctttctttctcttcctcgggttatttccgttgggggctttgtcacacctgtgagaaaagtaaccaatgcagtgaaactttgtggtgccgcctctctccctggcttcctgcagctggatacgctctgtgagagcaagggtcttgtttggttcagcctcactgactgccatggtgatggacttaagcatagtccatgatcactgagtgggtaagcgctctcaactcctccagcacactgagagcatcgggagtttggcatcgggagcttgctggtcctgccgtgcttgctggtcttgcctcctaagctgagcactcagcttacacagactttaccacctcctcttctccaggcctttctccccatcctaccatggacatgaatttagaaccaacactgctattgagcccacagcagtcccctctccagctacttctaattcacaaggaaagaagaggcccctgaaaaccgagaaatcttggagtcccaaagaaatgaatttgtgggtgtaggatttcagggtcttaagtaccactgaatagatcactccttgatctcagtagagtttatatttccctgtagaacagactctaaagtcagctctattttgggagacttttgtataaaatattatgcagggtgggtgtatgtgtatgtggtgtcccacatgtacaattgtacccaggtattcatgtatttatcagttctgcagttaaaggaataaaggaatagtggaccaggatataggttccagtttggaagacctgggccttgagggactggttgtagtggctccctgggctggcctagagggtggtgacagttcccagacctggcactggggcagcctcacctcctgcaaacttgcctttgcttgtcaccttacagaacaggattcaattcctagctagggtttcacacatcacatgggaagggcccattcccatgtgcaccctggaagtcttcaggcctgttgtcctaggccagaagccaaagtatgttctgtaaccagaaaagtcagggcttggctgtgcattctgagccagaggaagcccccacccagccaagaacaggtttgggaaggacaggagcagagtgtgacccttctcttgtcatagatgtcttgagagtgaaggcagaggttgcaggaaggagaccctggaagtccagggggagttagcagcagggtcaccagccagtccaggatgaggggaccttcctgctcggggcattgggagtcagagaaagttcatgggatggctcagacagctacaggagggcagagaaattt

SEQ ID NO: 524 - DNA, 915 bp, Mus musculus
gcggcgcaggcgagtagctagcgctcaggctcggcaaggagcaaggcagaggcaccggagcagactgcagtgcaggcggcagccaccagggccaacacctcgcagcatctctgctacgcgtgtcactgagcaacttctccatgaagccgccctcggcgcagagcagtcccgcggcggtcgcggccgcagccccggccatggactccgcggccgctgcagacctgaccgacgtgctgtgcgagttcgacgcggtgctggccgacttcgcgtcgcccttccacgagcgccacttccactatgaggagcacctagagcgcatgaagcggcgcagcagcgccagcgtcagcgacagcagcggcttcagcgactcggagagtgcagactcagtgtacagggacagcttcaccttcagtgatgagaagctgaattctccaaccaactcctctccagctctcctgccctccgctgtcactcctcggaaagccaaattaggtgacactaaagagctcgaagacttcattgccgatctggacaggaccttagcaagtatgtgaagcaaggagtttggggtccagaaggctccgaggacctggcaaatcggctactagaatctgctgtgggagagggcagagctgaggctcctgccccctggccattcttggttcactataacattagccattgggcccatctctgggcagttcggagagtgaagctcactttgtttacctacctgcagcatattcaacagaggatctatctaatgtgtttttactcctttaaacatagcccttctataatttaaaatgcttttatggaaatatttgtaattacttatatatagttggaggtcataataagctttcccatcataatatatttttgtatgcaaataaaattaaaacggagatctgt

SEQ ID NO: 525 - protein, 176 aa, Mus musculus
LALRLGKEQGRGTGADCSAGGSHQGQHLAASLLRVSLSNFSMKPPSAQSSPAAVAAAAPAMDSAAAADLTDVLCEFDAVLADFDFHERHFHYEEHLERMKRRSSASVSDSSGFSDSESADSVYRDSFTFSDEKLNSPTNSSPALLPSAVTPRKAKLGDTKELEDFIADLDRTLASM

SEQ ID NO: 526 - DNA, 33316 bp, Homo sapiens
acaccctctgtgacattaggagtaacatctttctaaaatattacgaatcaaatcgcaaaatgtacaccccctgtgacattagaagtaacatcaccctaggctataagaaataatatcagactgtgtacctgcattgtgacatcagtagtaacatcccttactactgatttttacgaatattttcagagcgtgaacaccttctgtgacattaggagtaacatcaccctataatattgggaataataccacacgatgtacaccgcctgtgacattagtggtaacatttctttaggatattacgaataatatgacagggtgtacagcccctgtgatattaggagtaacatatccaaaaaactgtacaaataatatcactgtttgtacaccacgtgtgacattaggagtaacatccccccaaactattatgaataacttcacagattgtacaccctctgtgatattaggagtcaacatcttcctagaatgtgaagaataacatcacaggatgtacacccccgtgacatgaggagtaacatcactctaggatattatgaataatataacaaagtggacacaatgtgtatggtgggagtaacatccccctgggatactacgaatcatagcacagaaagcacacccccgtgacaataggagtcacatccccttaggatattatgaataatatcacaagctgtacaagcattgtgacattagtaacaatatccagatagtatattgtgaataatatcacagcgtgtacacatttgcgatattaggagtaacatctccctagaatattacgaataatatcacagggtgtacacatcctgcgactttaggataatcatccccgtggataactacaaataatttcacaggatgttaaacccctgtgacaataggaataatatacttctaggatatgatgaataatatcacagtgtgtacacccactgtgatatgaaaagttatacctccctcagatattgtgaataatatcacagggtgtacaccacgtgtgcacacctattgtgatttttaaagtaatatctccttaggatattacgaataatatcaaggggtgtacacaccctatgacattaagataacacccctttaggatattcgaaataatatcccagggtgtacaccccatgtgacattacaagtaacatcttccgaggatattacgaataagatcccagggttgacatcccctgtgattttaaaagtaaaatccctctagaatattactaataataacacagggtgtacacccctgcgacattaggagtaacatccttccaggatattacgaataatatcagaaggtgtacacacatgttgacattagtagtaatatcccactagtatattgtgaataatatcacagggtatacacacctgtgacattaggagtaacatccccctggaatattccacataatatcacagagtgtacacctcctgtgactttaggagtatcatcccgctaaaatattacgaataatgtcacagggggttagcctgtgtaatatcacagggtgtacagccccctgtgacattaggagtaacatctttctagaacatcacaagtaatatcacaatgtgtacaccccctgtgacattaaaagtaaaatccccctaagatattccgaataatatcacagggagtacaccccgtgtgacataggagtaataacccgtgaggatataatgaataatatcagagggtgtacacgtattgtgacataagtagtaacatctccctaggatattatgaacaataccagaaggggtacaccccgggtgacattaatttctgtaacattcccctagaatatgaccaataacatgacatggtatagaacacctgtgatttatgagtaacatttctatagaatattacaagtaatattcggtgtgcaccccgtgtgacattaggagtaacatcccacgaaactgtgacgaataatttcaaaaggtgtacaccctctgtgacattaaaagtaacatctcgctaggatattacgaataatatcacagggtatacagaccctgtgacatgaggagtaatgtctttttaggatatcacgaataatataacaagatgtacacacactgtgatattaggtgtaaccttcgtctaggagactgcgaatactatcacagtgaacacaccccttgtgacaataggagtaacatccccgtaggatattataaataatatcacaaggtgtacacacattgtgacttcagtgctaatatccctcgcatatactgtgaataatatcacagggtgtacacgcctgtgatattacattaggagtaacatctccctagagtattacgaataatatcataggggtactcacgcctttggtttaggagtcatattgccctaggatattacaaataatatcacagtgtgtgcactcactgtgatattaggagtcccattttcctaggatattatgaataatatcacagtaggtgttcacacataatgtgtacaccgtgtgtgtacacccaatgtgatatctgaagtcatatgtccctgggatcttatgaataatatcaaagggtgtgcaccccatgtgacattaaaagtaatgtcccttttggatattccgaatgctatcacagggtgtgatattaggagtgtgatattaggagtaacctcttcctaggatattacaaataacatcacagagtgtacacccctgtgattttaaaagtaacacccccctagaatattacgaataatataacagggtgtacaccccctgtaacattaggagtaacgtctccctaggatattatgaataatgtcactgggggcacaccctctgtgatattagcagcaacatctttctaggatattacgaatgatatcacagggtgcacactcactgtgatattagaaggaatatctccctaggatataagctatcacatcacagagtgtacacacatggtgtacacccactgtgttattagaagcaatatctccctatgatattatgaaaaatatcacagggtgtaccctctgtgggatactagaagtaatgtttaccatggatattacaaataatatcacaggatgtacacacatggggtacacccactgtgatattaggagttatatctccctaagatattaccaataatatcccagtgggtgtaccccatgtgtgtacacccactgtggtatttaaagtaatatctctctataagattacaaataatatcgaagggtgtacaccccctgtgacattaggagtaacatccccctacaatattgagaacaatatcacacggtgtagacccctgtaacgttaggagtaacatccccccagaatattactaataatatcacaaggtgtacacgcattgtgacattagcagtaatatcctgctagcatattttcaataatatcacagaaggaacacacctgtgacattaagagtcacatccccctagaataggaagaataatatcacagggtgtacacctcctgtgacattaggagcatcatcttgctagaatattatgaataatgtcactgggtgttatcttctgtgacatcaggagtatagacccctgggaaattatgaatactatcacagggtgtacacccttgtgacattaggagtaacgtctttctaaaatatcgcgaataatatcacaatgtgtacaccccgtgtcattaaaagtaaaattgccctaggacactacgaaatagaacacaggaagtacaccccgtgtgacatcagaagtaacatcccccaaggatataacgaagaatatcagagaatgtacccgcattgggacatcagcagtaacatctcttcaggataatacgaataatgtcaaagggtgtacacgtattatgaaatgagtagtgaactcccgctaggatattacgaattttatgacaccggtctacaggaccggtgacattagtagtaacgttttcctagaatattacggagaatattaaagggtgtacaggacctgtgattcacgagtaacatttctatagaatattacacgtaatatcacggtgtgtacaccccgggtgacattaggagtaacatcccacaaacctataatgaataatttcacaaggtgtacaccctctgtgacattaaaagtaacatttccctataatatgacgataatatcacagagcgtacaccctcttgatatgaggactgacatcttatgaggataatacgagtaatttgataaggcgtacaaaccctgtgacataaggagtgacatccctctaggatgttacaaataatatcaaagggaatacaccccgtgtgaccacaaaagtaacctccccttaggagattaagaaggtgtacaaatattgtgacattattattaatgtcccgctatattatagtgaataatatcacagtgtgtagagtcctgtgacatcagcattaacattcccctacaatattacgaattatatcgctgggtgcacaccccccatgtgactttagtagtggcatgatcctagaatatcaaaaataatgtcccacggtgataaccaagtgtgccaggagagaaaatatcctaggagtaactaatatcttataatgtcacacggggtgtactccctgtgttatatttcgtaatatcttagggcaattctacttttaatgacacaggaggtgtgcacatgcaggcagtaatatcacccccctctcccccccggatattaggagccacatcgcaggggggcgggcgccccccgcgatgcggggagtaatatcacccccctctccccccctggatattacgagctacggtggtcacacagcctctttactttattgtgagtaatatctcctccgcctctggaaattaccaaccatatctcagaagggtgtacatcttctgcactattggtagtaataacatcctcttccccctggataggaagaacaaaatcacaggagtgtttctacccccagcgccattgggtgtagtatcatcctctcccactttgaaattaggaacaacatcactgggggcttgtccaccccatgtgatattgaaagtaatgtcatcctcttctgtcctggatcatggaaaaaatattactggggtggtgtacactttctgcggttttgtgagtaatatcatcctctctgacttgcagtcttaagggcaatatcacagggtggctgtacacaccctgtgctattaagaagaatattatcctgtcctgccctgcatattaggaaaaatgtcacagagtaggtgtacaactcctgcgatatgggaggtaatatcatcttttcatcttctggatagtaggaacagtatcacatgggtttgtacactttctgtgatattgggagtaatatcaacatctccgcctttgactatgaagaacaatatcacagaatggatgtacacccactcagatattgggagtcatatcagcctctcatctccatggatattgggaataatatcccagggtgggtgtacacctcctgctgtatggggagtcatatcgtcctcccccatcctggcaattaggaacaatatcacagggtgggtgtccacagcctgcgatattgggactcatatcaccctctccccctccggatattaggaacaatatcacagaagggttgtatatttcctgcgatactgcgagtaatagcattctcttcttccgtgaatattaggagcaatatcaccgggtggatgtacacccactgctatattgggagtaacgtcatactccaccccctggatgttatattcggatcaatataaccgggtgggtgtacacctactgtgatattgaaagtaatatcatgctctctcctttccgtggacattaggaacagtatcacaggtgggtgtacacccactgcggtattaggagtaatattagtatgaattattacaccttgattattaacatgaatatgaattaccaatattaatattaagaaataattgctaataaaaagttttcagattattaatattaatattattaggagctaatattactgttttctaatgaataagatcagtatcagttattaatatcaggtgttattaataattaatattaataatttatttttatcattggtagaactatgtaatagaaattatgattatcggtattgatttaaaaatatcagttattaatattgatattattaatatcaatcaataattgatgttttaatatcaatcaataattgatgttattaatatcaatcaataattgatgttattaattgcgataagtaatattgcgacattcctcacaatatcgcagaaaatgtacacccctctgtgatgttgttccgaatagtcaggggtagacgatggcattactccaaatatcgcactgggtgtacattccttctgtgatcttgttgctaatatccaggctgggagaggatggtattaatcccaataatccagaaggtgtagacctcccctgtgatattgtccctaatatccaaaggtggagaggaagatatatcacccaatttcgcaggggttggacaccacccctgtgatattgtttctaatgtccacgggtagagaaaatgacataactcacagtatggcagggggtgaacactccctccatgatattgttcctaatactcgggggtaagagtatgatattactcccaatatcatagggggtgtactcccaatatcccagggggtgtatagtatcccgaccggtgatagactccgccacgatgcggggagtaatatcacgcccctctccttccctggctattacgatacacatcgcaggggggcgggcgacgctcgcgacgcggggagaaatatcagcccctcctgacattacaagccacatggcaggggatggacacccccagtgatgcggggagtaatatctacccccccttccccatggatattaggagccacatcgaaggcgtgtggacagcccccgctgatgcgcagagtaatatcaacctccgtccctccctgcatgttagcagccactgtggacacacagtgtatttacgatatttccagtaagattatcttttctattgaaccttatgaacaagatcacaggggggtgtacacatcctgcgatattgggggtaatatcattctctcctccacagcatactgggaacaatatcacaggggcgtgtattccccctttcttattgggagtcatatcatacttgccttccatatattaagaacaatatcaaaggggggggtggacactttgacgatattgggagtaacatcattctctctatccctggatattagtagcaatatcacagggggatgtacatttcttgtgatattgagagtagtattattgtcttccccactggatattaaaaacaataccacatggggtgtcaaaccacctgccaaatttgagggaatcttatcctctcccctgcaccccccgcgccccggatattacagacaataacacaggggtaatgtacacccactgctttattgggagaagcatcatcctctcctcccttagatattaggaacaatatcatggggagggggtgtactgcctcggcgatattgggaggaaaattatcctctcttcccctggatattaggaagggtatcagaggggggagagtgtacattccctgtgatattcaatgtaatcttatcctctccctcccagggtattaagaaaaatattacaggagggtgtacaccccctgcaatactgagagtcatatcatcctctttcgctctggatattaggaacaatatcacagggttgtgtactccccctgcgatattgggagtaatatcattctctctccctgtggattttaggaagagtattacagggctgtgtacaccccctgcgctattgggagtaatatcatcctctctccctctggatagtaggaagagtttcataggggtgtgtacaccccctgtgatattgggagtaatatcatcctgtcgccctgaggagagaagccatttcgctactgtctcctgtctctgaagaggaggaggaagtaaaagttggaaaacaacaggaatgaagtcagtgtcaagaccagccggtggcaatgaggagccggcctgaggtgaaacaatcaacccccgtgactctaagtacatgtgctctcaatccatcaagaccctttcacgtggaaccccttaaagctgtaagcccttaaacgggccaggaactctgtcttccttccgggagctcggctcttaagacgcgagtctgccgaagctcccagcggaataaaaaaaactcttccttctttaatccgctgtctgaggggttttgtccgctgctcatccatgctccatttctttgttccctgaccgggaatcgaacgcaggcagcagcggtgagagcaccgaatcctaagcactagaccaccaggggaacttagaaccttgtgggaaatagattgcacaccattagaagtgggttggccatcagaaggaagcctggacaggtcccttgtttctaaggcgtggcacaaggtaactggtaaagatacctagaccagttcccatacatagacacttggtgacagctggtgctagaacccccacagtggctgagggcatgcagcagcaatactagtagcaaagggacagatagctaaggaaggatcccgctccactcacccagggaaatcaactcctgaagttctgttcgaccccacatcagaggatccattgcaggagatggcaccagagatcccagtggtgtcctccccttaacagggaaagaggctccccactcttgagcccacagtgcttgtgcctccacaagacaagcatatccctaggccacccagagtagacaagagaggaggactattcatatgattagtggtcattaacatatactcctttgtgaggtgtatgtttcaatgttttgctcatttttaatttttaccaggttgtctatttgtgattactttgtagatgggtctttctatattctgaaaacaaatcctggctgggtgcggtggctcacgcctgtaatcccagcactttgggaggctgaggtgggcagatcacctgaggtcgggagttcgagaccagcctggccaacatggacaaaccccgtctctgctaaaaatacaaaaactagctgggagtggaggctgaatgtttcactccgttacatgttaattgctctacatttaattagccgtctgtggtgagaggcgagaggctagcgcctagctcagcgcacagtccagggcgttcgcccccgcaggccgcggggcagggtggctcgttactccgtggacactgcaaggcgccctgttcgcgctgcgtcgacgcagtagtttcttcccataataaaccccttctagataaagtcaggctggcgggagcgccctggaccgtagttcaggcccccgcgctccgcggtgggaacagttcaggactcccccaactcctgcccctctcgccccgaccctctccactccgcccgcccaccatctcggaagtccccttgggacaatgcgtaggggacctccgcgtccccgacacccgactgggacacggccgcgggctccttcgtccctcaccgccagccagggaggctctgcatgcccacgtccacttcacagccgaggaagctgcggctcgcggaggtgcctggcacgcggcgggaagcagcagagctcgcgcccagcagtcagctctggtgacgccgaggacaccgcgtgggccgggttgtcagggcgcgggggcgagaggcgggtaaatatttggggctgtaaccggggcttcggcgactcctcgtcaccgcggttccagggcgggcgcgtggcgagggcggtgcctgggggcaggggcctcctcggagggcggcggggacagacccgtcgccccggctccgcagccccgccccggccccgcctccgctccggccgccgaaggctataagatctaggaacccgagccggtggtagggcgggcgcggaccgtgctgggagcggcgcggctggagcgcagcgccgaagggactggcagggctgaagtgtgcgggacagcaagcccccgaatagccccggctgccacctcgcaggacccaaggccacgcgcgccgggcccagctgagccgcctcatgaagccgcccgcggcgcagggcagccccgcggccgccgcggccgcaggtgagtgcggggtccggggtccccttaaagtctcggctctgcagatggcgggtgagaaaggaggggccccgtgtcgtcccttcacaccccccacccttccatcctccccggcgggaacctgtccccggtcttcccgcgcgggcggctgcagcctcctttccggcccgggctggcccccatgtcccaccttccctccaccaccagctccgcgcgcgcccggggttggggggagcggcggggacaggtaaccggcagcgcctggggaggaatctggccgcgccaagtcgctgggtgaccctgggcctggcgaaggctcagttttcttgtctgtaaaacggacttggtaatagaacgcacttcgggggtggtggagaagattacaaggtaacagcgactgcgtggctgtcacttggcagaggcgccaagtgtcagttatcttcgggaaccgtggcggcccctcctggccctgggaggtggtcccgctgcccccctgacttccgtgcactgagcccctggccctgcccgcagccccggccctggactcggcggccgcggaggacctgtcggacgcgctgtgcgagtttgacgcggtgctggccgacttcgcgtcgcccttccacgagcgccacttccactacgaggagcacctggagcgcatgaagcggcgcagcagcgccagtgtcagcgacagcagcggcttcagcgactcggagagtaagtgcggcccccgctaggatggcgccgggatctcccagctcccaggacctgccccgcgaaggctgcggcctcagttttcttatcagtaaactgaggaatggtttcctgaagctcaacgcagtaggccgagtggtggcggggcccctgacgataatcacgggaaaggtcgctggagggcaggttggttcacttgccgcccacgggtgtgtcaccaggcaggcgagtttaagcagcttgtcccgactcagccagacaggactccctggacctgcaccaggcctttccgcagtttccctcctcttctcctttccgtgcctctcccctctcagctgtaactttgcagatgtggaacaagtgccagtggaatgagggggcacagtggggacatgggagggcgcagaacggaaatattcatgaaaccaggaaaggtttcataagcccaaactgctgttcttgggatttatgaaataactgcttgcattgtcttctggcccttagctctcagacttgttgctccattgcatgcagttatgaaaatctttggcactgctgagttcaagtatttttcagccaggtcctccaccaggctggagggggagccagagagcacatgggcatgaaggtggttcctggtgatctttctcacaatggagactaccccagggtctctttgtcctgaacaactttgtcaacaacagcaacaacaacaaaaacaacaaaagagacagctttttccaggaactcacatgtcctgggaggattacaggtacctcaaacagcaaattaggtgcctttttaatattacatgattgttggtttcaaatccagaattgcttattgtttttcaaagggcaaagtcaattttaaactcttctgtgttattcttcagcctttaatccttagatgggttacaggcatgaatgtcactccttttgctgcccttgactcaggacgtgaaagtaatggcctttccgtgtgattctcttattttgaaacctggagctcttccttgttcctgggctaagattcggggctagacatgaacatgagctgcccttctgcaaagggataaatgcgctcaccaccctggtcagggtttgactcaggaagctgagttccagcttgtttccttggcagcactgccaaagagttagaccaagctgcagcttttgaggtgaaaggggatggaagaaagtactgttacttttccacttagaatttttggactttgttcttaatgaataggttcattttcaatttcaaagcaaagtgttaacatttttgaaatttgtctcaattctaaaggccaaacttaaatatgtctcctcctactggggcatggagcaagttattcatcaaatacagattctcgcatggaaaagaaagctaggatagtgtgtcgctgctgctctgtggcaaagaacagctcctttctaagcaacagcctcactctactagaataggtctgagcgcgcccattcatggctgattgcaacttccactgggtgggatttcagatctagaatctgttttcagatgccttaaagagaagacatagaaacacattcttaacagtttcaggggagatagttgggatagtttgtagttttgcttaggttatatgtgtctgttttctgcttttgttgttaacggactaacccttagtttggtggttagagaagtgatgggaagaacataaagaaagctcagatgacatttgtctttgctttaaatgtgtagtttttctctcacaaggctagtcagaaatattgttggcagaagctgtgtgtatctaaatagtaatttcttaaggaagcataatatgtatatcttaattgctgccaagaattgagtacagacatttgttatcctcgtttgtctgtttaatgcttttctatgggagagaatgcttaagagaggtagatactactgaaatttagctcatcaagagggagacacaccaggataaggataataacagcagctcacttttagcaaacgcttgttatgatgatgatgatgatttattagctggaatgggaaccatgtcttcacgaatagactgaagtccttttgagcccagatcacatgcctgtttgtcaatgatggctgtttatgaaggtgtctctttgaggtggtggtcatctggcagggtcagtagagcttagattgagccttgtcaaggccctgggtgatgagtgggatttagtttctctagctgtgaaattgaaaggatgctatttaatagtgctattagggagaaaatatttgctctgttgaatactttcaaaatatcattacaatgtacatgctgtgctataccatatagatacattggagccagtgtctcgcatgaaaatattttggatgaatatgtaaaccaatgttacctttgttttttgctctagtttttacagctctgtctgaaggtgcaccaaccttacaaggaagatcaaacagcaagcctgttctttgaagaatacttctttattatcattaaaaaaaatttaggttgcttgcacccaaaggcaaaaaatagccattcctcgtactgaaagaaacaagttactcagataggaaagaagaacagatatttaataaggaaatattccttcctgttcccactttcagggaggcctcttaagacatgaagaggaccaaaataacaattgcagtataacttcacatggtggggtggggggtgtggagttcaaatgtggttgatcaaaatagtgttgttactttcctttagacttgattccaacatgtaaaaaaatcaggcactttagtgggagtgattttaacttcagtagtgaaagggcaatgcaattaagagttagggtagtgtttctcaaacttcatcctcagaggtgctttagaaattgactacctttggtttgaatttatttttagaaatatatcttcttttcagtatttttaaaactgtaaaaggtaaaccatgttttctcaaatgtgttaaatgaaattttaactcattatgtttcaagttttaaccagtgtgttgactttataagaagtttataatattaacttaaactttaaaaggtggtatgcacttatacctttaaggtattggggtttcacataatttttcctttgacgggggagtgttttgctgctcaacagaaaaggtctgaagtctactgtgtatgctagggttattatgatattgtaggaccatttaggaaatgaggaactggcttctttagcatcagcaagacttagaacacctgcatatctttgcttaggctattctggcctggccctgggagaggggaccttgtgggccctggagaaccagcatgacagatggcttatgtggcttagaagccactgaggtagaacctgaacttgttcaagccatgagagaataaggccaatgaggagccttcagggttccctggtactgtgttagcaattctgcatgggtaatgggtcttgtgatgcttggcaaggcatatagagggacagtgcgatcccagaaagggagctgggacaacagtggagaagttgaggcaagatgctctttcttattttgcccccctttggcgaggctatcagaatttagattttcaggaggagaagtcaacccacacccccagccattccctgtggcaaaagggaggtaggtccaaagctttctttttcttggttaattactatagtttgcttgctttaaacgtgtgggatcgttctatatttacaggagccttgggtaaggtttactgtctgtggttttacttccccctggagcagcacgttgacatgcgctaaccctaaattacctttctcccaacccccctagctaaaaaaacacacctaccttttaaacaagcctctattttgcagcagtgtttctcagactctgttagttgtatatttcatatgcttttctttcttttgatggtgccttagaaaacacggtcccagaatttgaggttcctgacttcagtacactaactagacttgccagggatgtttctaatgggaatttgagatacatgtgagatggtgctttagagctgattgaagccgatattgtaaggccctcaaatatccagccttaccacctgccagggttccccaaattatcactgttctaggtccttcgagcccctattaatagcagcacctgatacccacgcggggcaataatacatgaatatgtgatcagccagcaacacattgctgtcatttaatcagactaactggctattacttttgcaaggaatagagttccaggggagggaaaagaacaggatgtccggctttgcctaccttgaaatctgtcttgcgtgagattttgcccattgtatgttcttaataaaactctatggaaagaaattttattggttaagggtaaagagaggtctagagcttggggtacctctatgttgagagtttgttcttgggaggtttgttctaggatgccactgaagagaaagttctcttaagaatgttgctgctctctctcaagaagagggaggatcttgattctgtttattctctgtgattaccttttctctctcaggagtgctattctgcactttgctaggaactttagagttaaatcattaaaaccacaggcattatacacagagcacctaggttattgttcttcttctaacaaggaagaaacagagtgactctacagggtcatgcagttttcacgtggcctctagacacccactcgacagtggcatagatgctagatgcccactcgccagtggtgtagctttggggccttgagggctctcttttcatctgtgccatacacgatgtgtagatatcatcacagggtgcgcctcagctgcagcaggtttggctcaaggatgctggcggtcggcttcttcttggtggtcgaaggttgaacagttcaaaacttggagttgggtctgtcccagattgtacacctcacggaaagggagtgaagtcatggtgtggcaacgagctggggcgtgagctaatgtgtatctgtgtgtgtgtgtgtgtgtgtggtgggcagggcgggggcgggcaggaggaagtgagtgtagctgtgctgccatgcctctgtttgcgtgtgtttctatataaatagatattgtaactagtatttttcctcctcttcctccctcactgtgggagtggctgtcagtttgtctgtatattttctcagtttgggaaaaattctcacatcaagaaggcatttagcctgtgaacctaaaggatcagaggacagtcctggcaatattctggatctacggctcattctctacagattctctccaggccccatgagttatgctgagtctttcctgaatctttgctggattccttttttcccctgctaacatcctcttttgtaatggcctttccatatctagattgttccttcttccaacattcaatagcgtttggcctccttgcctgtgaggtgaacaaattgtggtgtctttctcccatgcagaggagtgtacgtggatggaaacttgctggagagtaggggcagaagagagctgaagttcaaagtcagggtagggcctgtggtgcatgccgggtgggtggagtgagcagtggtgtggaaagttgctctcccaggccagctgcttgtgggagatagagagcggaggtgtggtccctgcgatctgggccagccagcctctgggcccagggatgggggcgaagctctcaggtatccttcatagccacggataatgtgccaagggcctggtattttctggctcagagtctaggcatgaggcctgcctcctcaggaccctctgtggttttcttgcccctaaattttgccttatcttctccccatgagtttctcaggctgtatttgtggcgattctcctggtgactgcatggtgacaacagtaaggcttccttgcaggtctgcagtgggtgtggccagcttcctgtgtgtaggggaaagggcttcccttgggagaattggagagcccacctttggaggtgggctcggttgagggagccagcaggagggcttcccaagtaaggttccacggagtccaagggtcctgagaagtagtagcaggagcaccacaaagaagtgtcccgtggtcaggtacactggggaaatggggctggttttgtttaaccgcaagtcttttcaggatgttggaagtgggcatacccatgggaatgagcaaggctgtttggtgtttctcaggtgtacctgatcacacagccctcggaggaccagcactctgaggaatgtatttttggggaagtgtaggtatcaggtccaggattttggatctcagtccatgttcatcctcaaagcccagtgatggtggtcatttcaggtgagctgggctggacctctgaaggaagcaaagattgtgagggttgctctcaagggtcttctgggcatgtttggaaaagtggacaagatggcggtgtcagcgaaaaagagcagggggcaggtgggcccctgggcaggagagggtggggggaaagggagccaggtgaggcacctgagaagttgtggcagcctcttagggacaaagctgaatttccctgagactagaaacctcttcttccgaaaactctgatactttttgtactgggcctatctcttgtcacttaggcaaattccttttcagttaatgggaccaaagagagatgtttttgcctccccctaagctggaggtagttggcttaaagtggaagaatcccgaggaggcggggacctggtaaggcccccatcattcagctgccctctcacacctgaagagccacttctctgctccaactgtggctggctttgtgttttgttttaaccaggaaggctgttccccgtgacctcaggggccacatcctgcttctgctgcctgccttgcctttgcaccctttgagtcagtgctgctcagccagcagcccctttctgagtcacagccacacagctgggccaaccgtgcgttggtttccttccccttagcaggacttagagaatctcagaactttagagctagaagtgcctttaaggattatttagtccgccttcccattctattgataagtaagctaggcccagagatgtactagctcaaaggcaccctagtacttagtagttgactggatggtccccttgactcccagttcagccttgaacttctggggcctcatcttgctgtggttcaagtctttggaggtatgagaatagagggagccatgatgtcactccaagtgtctaatagatgaacttccaggagaagatgtctttatctttgaccttctggcttatctgaagagtacagactcttaggaaaacctctcttaagtaaaagagaggattattaaattataggacagcaagagagcaaagatctctcttgagcagggaaagaggcttaagtcatgggatactggatgtttgtattttaggaggctcagagggcagaagggacatatttcacttgagatgattccttttgcctaaaatccttacccccacactcccaccatcaaccaagcactggtcatgatgatcctatcacccccttcctgtattggggaagcaagggcctttggtatacttgatttgacacacacacactctctcacttctcactcacactctcacactcacatgctctcacacacacactctcattttctcacacacactccacactcacacacgcacacactctcacacactttctcacacacacactcacacacactcatacactcacacactttctcacacacacatattctcacacacacccacactcacacactcatgcacacacacacactttcacacaaacacacacacacactttctctctcacacacacacactccctctctcccctgtctcgaatcattttgggggcataaacataaaacctggaaatcaacctgttttctaatctttttttttgagacagagtctcactctgtcacccaggctggagtgcagtggtgtgatcttggctcactgcaaactccacctcccagattcaagcgagtctcctgcctcagcctcccaagtagctggggctacagacacacaccactatgcctggctaatttttgtatttttagtagagatggggtttcaccatgttggccaggctggtcttgaactcctcatctctggtgatccacctgcttcagcttcccaaagtgctgagattacagccgtgagccaccccatgcctggctgttttctttactatagatttgcagctttggcttattttgaagacaaattgttggttatcaatagactataaagtgctaagtctataatctcatgagtactatttctaatgagtatattttccttcctgaaaggtgcagattcactttataggaacagcttcagcttcagtgatgaaaaactgaattctccaacagactctaccccagctcttctctctgccactgtcactcctcagaaaggtaaggtcattagttggaatttgagttttttgcttttttattcctctctccttctcaatcccttctctgtcccttttatccctaaacaatctttctcaaatgtacaaaacaaataggtaagactaatgtcttaatactgtagagtatacagtggaattttttatttctcaggattttaatcagtgtgaacatgaaatcagataatttggggcagaaaacctgaagtcacagggagaaagaaaatttggagactagactgttctctctcatgtgatgtaatcaagactgtgcaaatgacagtgtttcttaggagtctcctcccagacttgttggttctagaatttaaaactcagcagtttgcctttgcagatagtgggattctttttattgcattaattatttaaccaatgctttcagatgaccaatttagcaattaaatggggttgtcattattagataagctatgatctaacatgatttaaaatagcagctccagcctgtctctactgtggtattaatagacctaaaatgtctttaaagatgcatgagcagtttcttattttttggaactggtaaaatgtctccagctagagagttgaatgttctgttacattggacaagtgcctttttgaaaacaaaaggagctttttttcttaagaaaagttatacttgctgaaaatagttgcagaatgcaataaaaatggaacatagttaaaaagaaatgacaattccatcactcttttcactttggcaataagacaggacttcactcttttttcagaagaggcatttgaaagttcccttctcaacatagcaacgttagcacccactgggaattctgccactatccagccctcagtctgtaatgaatcagttgaattcagagacagagcagtctaaaaagtggcttaaaacgtgctcagatttgttacctgatcctcaagaggtaggaattaaagagggaaaaaaagcccctagtggcaaattgacttaaaaggctaagaacaattagccatttgtagccagcaggtgttaattaataaaactgtccagtactgcatttcagggaaggcatgaatgatgtgatgaactctacaaaaataaagtcagctatatgaaaaaaatctctacatctcaggctctagagagaaccaaatcagaatgaggactcgtttccttgtgtgggcacctggaggggatgaggctgtcctgggcccagaagactcatggcaccttccctgtaccattttgataagaaacagtgaactcttcattcatttcatattggaggaactctgagggctgcagcgttgccctggggggacagcacaagcaagaatgcatcagaaggctagtgccgcaggaatgacacaatctaggtgtctgctctgcacagtgctatgcttactgaattttttgactaataactcatattctacacaatacaaaaaccagactccttttatcttcccttcctgctcctcactctcctgcaaacatttaagacagtgaaggaagattcctcttctaggtgagggagaagtggggtgggatgtttggagagggtggtgatgaactaaaaaataaagaaacacttaggctagtcttcagaatcagtttctgagtttactgtatcaaaacactggagcacacacttagggttggcccaggacactcttcaataaaagtctctgaagataaggaggtagatgtaaaatagaaataatccattctataactctggaagttccaacttcctggaaaactcaatatggagtcatcagctgtctttgttatggaaactgaactctctctctctctctctctccctctcctgtttcacagctaaattaggagacacaaaagagctagaagccttcattgctgatcttgacaaaactttagcaagtaagtacatgtctgatattaaaaacaaaaaaacaaaaaactaacagacacttctgataaagtgttgtaatgttaaccagcttgccctggggcagaaagtttcatcctaaggcttctataggtttagaaacaggaccctaggccggggcagtggctcacgcctgtaatcccagcactttggaaggctgaggtgggtggattacctgaggtcaggaattcaagtccagcctggccaacatggtgaaacccaatctctactaaaaaatacaaaaattagctgggcatggtggcgcacacctgtagtcccagcttcttgggaggctgaggtaggagaatcacttgaacccgggaggcagaggttgcagtgagccgagattgcgccactgtactccagcctggtgacagagcaagactccgtcaaaatagtaataataataataataataataataagaagaagaagaagaagaagaagaagaagaagaagaaacaggactctagtggctaggaatgaaattctgggataagcttgtgttaaagtagaccatgtgcgtttccaaacagtgagaacaggtcactagcaaacaatggcattttgtttgagaaatggagagcgagcaagactggagcattaccatcatgatggcctgtcaggcttttcagagaagaaatgaactgattaaccacaagtgcattattccaacaagccaaaagtcttccatcccatgggccagggtaattttcccaggttagatccagggtttgggtgaaatttaactttaagatgtgggtgccaaaagagagaattggcttgtggggcctttcaccagagacccatgccagtgactgaatgacctggattaggtatgcatacttgcaagcctcttatttgggaattacactaatggttacctgttttgtgtgaccaaaaatgttgagaactgaagacatcaaattataactgcagtataggggcccagaagaagggaccctcacaatctatctacacactctatttccaaaggataagattgcaagagccaggaggaccaactccagcttctgggatggaaggttcagcaactctactacggggggtcctgtttagtcacagagtgggctaggaaaattttgtcccagccccttaattttccagggtaagggttgattttctgtgagaagtatttaatgctattctttgctaaagagccgggtaaactctgaaaaattaaatccaaagctggttatttaaaaataactatgttcttaacactcttgcagacaaacctaaatatcagatagaaagtccttgtatcatttctatttgaaaattgaagattttattgcctcttttcttatgtactgcaccatcttacatcagaggaccagggcttgttttgacagggattattataattgcagcataatttgtattagacccatgtaacaagcctgtctacttcatggaaattgcagtgggttgcccagtcattccagttaatcagacactcatcgtgtgggaagcccggcattgagtttggtgctttgatgcacgtctgagacagtgtgatgtggttaagcataggaattgtgagcctctgagtggataaccttacctatctctcatttacaggtatgtgaaacaagaagttctgggtcctttcatcataagggagaagcttcagaaagttccgaggacctgctaaaatcagctactagaatctgctgccagaggggacaaagacgtgcactcaaccttctaccaggccactctcaggctcaccttaaaatcagcccttgatcccatttctgggcaatttagacagtgaaactgactttgtttacctgcttgcagcatattagaacagacgatccatgctaatattgtattttctcttaaaacatagctttcctgtaatttaaagtgcttttatgaaaatatttgtaattaattatatatagttggaaatagcagtaagctttcccattataatatatttttgtatacaaataaaatttgaactgaagtctgcttccttttctttttctttattttttaaaatatatttccattcaaataatattctagtgggagtaacatgcctcttgtttccttagcaaggcccctgggtgctgtctgattgcactagacaagaggacagtaaacttaaagtgttcctttagctcattcagtgctctggaaggaaatgctggcagacggctgctgggaaattttaatttcaggattgtgatttcattggaagttaggtttctattctgtctctgccctccttctcatatcttggcaccattgcaggtggcatggactctttctttgaattaagggaagtaccagttcttacaatccaggacttaaatacgagggaaagttgagatagctggaagacttgaaaatgatggtgcttttctaagatctgtgtggaggaagattgatggtgctggttttcatggaatgtccagcaaacctctggtgtgaagagtttgacgggtgggctttgcacatagaagccactgaccacttctcccacttgcctttgtgggggctggagagaggcataaaaataagaaagctcataattttcgtatctatgcttttctgtctttaaaacctcctctaaaataaccaggcattactttcataatcagaataaagttattttaaaacttgaatccctatattcctaaaggacataaatccaaaacataactacttataattttacttgtatcttcaaaagctaactactatatttgatgtgttttttagggaatcgggaaactaaattgcttttctttaacttttttcttttcctcagcttccaggaaaacttttgggttgaactcaaatattttctttatttcttttttaaaaattgagatctaattcacatactacagcacccagttcagcggtttttagcatatccacaggtactgcagccatcaccactgtctatctacttctctgtctccacgaacgtgtctattctggatctttcatataacgaatatgtaatcttttgtgtctggcttctttcacttagcatagtattttcaaagttcatccatgagtagcatgaatcagtacttcatttcttttcacggccaaatcataatccactgtgtggatatgccacagttgtttatctgttcattggttggtgaagatttgggttgtttccactttttagctaacaaataatattgttatgaatacccatgtattagtttttgtgtggacatatgttttcatttctcttgggtgtataactaggagtggaattcctgggtcgtatgttaattctgtttaactttttgagaaactgtcaaacttttccaaagcagtttggaaaaaccattttacattcccactagcaatgtatgaggattccagtttctctaaatccttgccaacttgttattgtctgccttgtcattctagcaggtgggaagtggtatcacgttgtggttttattttacatttcttttttttttttttttttgagatggaatcttgctctgtcgcccaggatgggtgctagtggcgggatctcggctcactgcaagctctgcctcccgggttcacgccattctcctgcttcagcctcccgagtagctggactacaggcgcccgccaccacgcccggctaattttttgtatttttagtagagacagagtttcaccatgttagccaggatggtctcaatctcctggcctcgtgagcggccctcctcggcctcccaaaatgctgagattacaggtgtgagccaccacgcccggcctattttgcatttctctgtgactaatgatgtcttttcatgtgcttactggccatttgtatatcttctttggagaaatgtctattcaaatccttggcccattttaaaattaggttgtctttttaactttttttaattttagtttttgtgggtacatagtaggtgtatgtatttatggggcacataaattgttttgatatgggcatgtaatgtgtgataatcacatcatggaaaatggggtgtccactccctcaagcatttatcctgtgtcacaatccaattataccattttagttatttttgaatgtacagttaaattattattgactatagtcaccctgtcatgctatcaaatactaggccttattcattcattccaactatactttgtgcccattaaccatacctacccttcccagcctctggtaaccaaccttctactctataattccatgggtttaactgttgacttttggatcccacaaataagtgagaacatgcgatgtttgtctttctgtgccaggcttatttcacttaacataatgacctccagttcaatccatgttgttgcaaatgactaaatctcattcttacgactaaatagtactccagtttgcgtaagtaccatgttttcttcatccatgcatctgttgatggacacttaggttgcttccaaatcttggctattgtgaatagagctgcaacaaatatgggagtgcagatatctctttgatatactgatttccttttttgggggacatatacccagcagtgggattgctggatcatatggtaggctctatttttagttttctgtggaatctccaaactgctcttcatagtggctgtagtaatttacattcccaccaacagtgtacaaggattcccttttctctacatccttgccaacatctgtcattgcctgtcttttggataaaagccattttaactggggtgggatgatatctcattgtagttttgatttgcatttctctaatcaataacgtagagcaccttttcatatgtctgccatctgtttgtgttcttttgagaaatgtctattccaatcttttgcccatttttaaatcagattattagattttttttcctatagagttgttttagctctttatatattctgactattaatccattgtcagatgggtaatttgcaaatattttctcccattctgtgggttgtctcttcactttattgattgtttcatttgctgtgcagaagctttttaacttgatgttaccccatctagtccatttttgctttagtttcctgtgcttgtggggtattactcaagaaatctttgcccagactgatgtcttggagagcttctccaatgttttctttttgtagtttcatagtttgaggtcttagatttaagtgttaaatccattttgatttgatttttgtatatagtgagagaaggaggtctagtttctttctttgcatatggatatccagttttcccagcatcatttattgaagagactgtcctttccccagtgtatgttcttgccacctttgttaaaaatgagtttactgtaggcatgtggatttgtttctaggttctctgttctgttccattggtctatgtgtctgttgttatgccaggaccatgctgttttggttattatagctctgtagtataatttgaagtcaggtaatgtgattcctccagttttgtcctttttaaaatttttttttattatactttaaattctggggtacatgtgcagaacacgaagttttgttacataggtatacatgtgccacggtggtttgctgcacccatcaactcgtcacctacattatgtatttctcctaatgttatccttcccctaccctcccccaacccccaataggccccggtgtgtgatgttcccctccctatgtccatgtgttctcattgttcaactcccatttatgagtgagaacacgcggtgctcggttttctgttcttgtgatagtttgctgagaatgatggtttccagcttcatccatgtccctgcaaaggacatgaactcatccttttttatggctgcatagtattccatggtgtatatgtgccacattttctttatccagtctattattgatggacatttgggttggttccaagtctttgctattgtgaataaagctgcaataaacatacgtgtgcttgtgtctttatagtagaatgatttataatcctttgggtatatacccagtaatgggattgctgggtcaaatgatatttctagttctagatccttgaggaattgccacactgtcttccacaatggttgaactaatttacacacccaccaacagtgtaaaagtgttcctatttctccacatgctctccagcacctgttgtttactgactttttaatgattgccattctaactggtgagagatggtatctcattgtggttttgattgcatttctatcatgaccagtgatgatgagcattttttcatgtctgttggctacataaatgtcttcttttgagaagtgtctgtttatatcctttgcccaatttttgatggggttgtttttttcttgtaaatttgtttaagttctttgtagattctggatattagccctttgtcagatggatagattgcaaaacttttttcccattctataggttgcctgttcactctgatgatagtttcttttgctgtgcagaagccctttagtttaattagatcccatttgtctattttggcttttgttgccattgcttttggtgttttagacatgaagtctttgcccatgcttgtgtcctgaatggtattgtctaggttttcttctaggatttttatagtcctaggtcttatgtttaagtctttgatccatcttgatttttgtataaggggtaaggaaagagtccagttccagttttcagaatatggctagccagttttcccaacaacatttattaaataggaacattttccaaattgcttttttgtgtcaagtttgtcaaagatcagatggttgtagatgtgtggtgttatttctgaggactctgttctgttccattggtctatatatctgttttggtaccagtaccatgctgctttggttactgtagccttgtagtatagtttgaagccaggtagcatgatgcctccagctttgttcttcttgccaaggattgtcttgtctatgcaggcccttttttggttccatacgaagtttaaagtagttttttccaattctgtgaagaaagtcagtggtagcttgatggggatagcattaaatctataaattactttgggcagtatggccattttcatgatattgattcttcctatccatgagcatggaacgtttttccatttgtttgtgtcctctcttatttccttgagcagtggtttgtagttctccttgaagaggtccttcacatcccttgtaagttgtattcctaagtattttattctctttgtagcaattgtgaatgggagttcactcatgatttggctctgtttgtctattattggtggataggatggcttgtgatttttgcacattgattttgtatcctgagactttgctgaagttgcttatcagcttaaggagattttgggctgagatgatggggttttctaaatagacaatcatgtcatctgcaaacagagacaatttgacttcctctcttcctatttgaatacgctttatttctttctcttggctgattgccccagccagaacttccaatactatgttgaataagagtggtgcgagagggcgtccttgtcttgtgctggttttcaaagggaatgtttccagcttttgcccattcagtatgatattgactgtgggtttgccgtaaatagctctgactattttgagatatgttccatcgatacccagtttattgagagtttttagcatgaaggggtgttgaattttgtcgaaggtcttttctgcatctattgagataatcatgtggtttttgtcattggttctgtttatgtgatggattctgtttatcgttttgcatatgttgaaccagccttgcatcccaggtatgaagctgacttgatcgtggcggatatgctttttgatgtgctgctggatttgatttgccagtatctttttgaggattttcatatcgatgttcatcagggatattggcctgaaattttatttttttgtcgtgtctctgccaggttttggtatcaggatgatgctggcctcataaaatgagttagggaggattccctctttttctattgtttgaaatagtttcagaaggaatggtaccagctcctctttgtacctttggtagagttaggatgtgaatccatctggtcctggactttttttggttgataggctattaattactgcctcaatttcagaacttgttattagtttattcagacattagacttcttcctgatttagacttgggaagggtgtatgtgtccaggaatttatccatttcttctagattttctagtttatttgtatagaggtgtttatagtattctctcatggtagtttgtatttctgtgggatcggtggcgatatcccctgtataattttttattgcgtctatttgattcttctctctttgcttctttattagtctggctagtggtccattttgctgatcttttttaaaaaaacagctcctggattcattgatttttttgaagggctttttgtgtctctacccccttcagttctgctctgatcttagtcttctgctagattttgaatttgtttgctgttgcctctctagttcttttaattttgatgttagggtgtcaattttagatctttcctgctttctcgtgtgggcatttagtgctagaaatttccctctacacactgctttaaatgtgtcccagagattctcatacattgtgtcttcgttcttattggtttcaaagaacatctttatttctgctttcattttgttatttgcccagtagtcatttaggagtaggtcattcagtttccatgtagttgtgcagttttgagtgagtttcttaaacctgagttctagtttgattgtactgtggtccgagagactgtttgttatgatttccattcttttgcatttgctgaggagtgttttacttccaattatgtggtcaattttagaataagtgcgatgagctgctgagaagaatgtatattctgttgatttggggtgaagagttctgtagatgtctgttaggtctgcttattccagagctgagttaaagcctggaatattcttgttaattttctgtctcgttgatctgcctaatattgacagtgggatgttaaagtctcccactattatgtgtgggagtcaaagtctgggagtcttaagtctctttgtaggtctctaagaacttgctttatgaatctgagtgctcttgtattgggtgcatatatatttaggatagttagctcttcttgctgcattgatccccttaccattatgtaataccctttgttgtctcttttgatatttgttggtttacagtttgttttatccgagattaggattgcaactcctgcttttttttgccttccatttgcttggtaaatattcttccatcctttattttgagcctatgtgtgtctttgcatgtgagatgggtctcctgaatacagcacacccaatttgccagtctgggtcttttaattgggcatttagcccatttacatttaaggttactattgttatgtgtgaatttgatcctgtcattatgatgctggctggttgttttgcccattagttggtgcagtttcttcatagtgttgatgttctttacaatttggtatgtttttgcagtggttggtaccagttgttcctttccatgtttagtgcttccttcaggagcttttgtaaggcaggcctggtggtgacaaaatctcttagcatttgcttaactgtataggattttatttctccttcacttatgaagcttagtttggctggatatgaaattctgggttgaaaattcttttctttaagaatgttgaatattggccccattctcttctggcttgtagggtttctgcagagagatctactgttagtctgatgggcttccctttgtgggtaacccgacctttctttgtggctgcccttaacattttttccttcatttcaaccttggtgaagctgatgattatgtgtcttggggttgctcttctcgaggagtatctttgtgatgttctttgtgtttcctgaatttgaatgttggcctgtcttcctaggtgggggaagttctcctggataatatcctgaagggtgttttctaacttggttccattctcctcggcactttcaggtacaccaatcaaacatagatttggtcttttcacatagtcccatatttcttgaaggatttgttcattccttttcactcttttttctctaatcttgttttctctctttatttccttaagctgatcttcaatcactgataccctttcttctgcttgatcgatttggctatggatacttgtgtatccttcacgaagttttcgtgctgtattgttcagctccatcaggtcatttatattcttctctacactagttattctagttagcaattcatctaacctgttttcaaggttcttagcttccttgcattgggttagaacatgctcctttaggtcagaggagtttattattacccaccttctgaagcttacttctgtcaattagtcaaactcattctctgtccagttttgttcccttgctggtgaggagttgtgatcctttggaagagaagaggcattctggtttttggaattttcagcctttttgcactggtttctccccatctttgtggatttatctacctttggtctttgatgctggtgaccttcggatggggtctttgagtggatgtgctattcctttctgttagttttccttctgacagtcaggcccctctgctgctggtctgctggagtttgctggaggtccacttgcgaccctatttgtctgggtatcaccagcagaggttgcagaacagcaaagattgctttctgatatttcctctggaagcttcatcccagaggggcacctgccagatgccagccagagctctcctgtatgaggtgtctgttggcccctactgggaggtgtctctcagtcaggatacatggggtcagggatctgcttgaggaggcagtctgacccttagcagagcccgatcactgtgctgggtggtccactgctctcttcagagacatcaggcagggacatttaagtctgctgaagctgtgcccaaagctgcccctttccccaggtgctctgtcctaggaagatgggggttttatttataagtgcctgactggggctgctgcctttttttcagtgatgtcctgcccagagaagggaaatctggcagtctggcctcagcagccttgctgagctgcagtgggctctgcccagttcgaatttcccagtggctttgtttacactgtgagtgtaaaaccacctactcaagcctcagcaatggtggatgtccctccccactccaagctcgagcatcctgggtccatctcagactgctgctgtgctggcagtgagaatttcaagccagtggatcttagtttgctgggctctatgggggtgggacccaccgagccagaccccttggctccctggcttcagcacccctttccaggggagtgaacggttctgtctcgctggcattccaggcaccattggggtatggaaaacaagaactcctgcagctagtttggtgtctgaccaaatggctgcccagttttgtgcttgaaacccagggtcctggtggggtaggcaccggagggaatctcctggtctgtgggttgtgaaaaccgtgggacaagcaggagcagactcagtccctcacggcttcccttgggtgggggagaaaattccccaaccccttgcacttcctgggtgtgatgacgccccaccctgcttcagctcgctctctgtgggctgcacccactgtccaaccagtaccaatgagatgaaccgggtacctcagttggaaatgcagaattcacccgcctgcatcgatctcgctgggagctgcagaccggagctgttcctattcggtcatcttgccagcgctattcccagttttgttcattttgctcaggatagctttgactgttctgggtctttggtggttccaaagaaattttaagattatttttctatttctgtaaagagtatcattggtattttgatagcgattgcattgaatc

SEQ ID NO: 527 - DNA, 970 bp, Homo sapiens
ggtggtagggcgggcgcggaccgtgctgggagcggcgcggctggagcgcagcgccgaagggactggcagggctgaagtgtgcgggacagcaagcccccgaatagccccggctgccacctcgcaggacccaaggccacgcgcgccgggcccagctgagccgcctcatgaagccgcccgcggcgcagggcagccccgcggccgccgcggccgcagccccggccctggactcggcggccgcggaggacctgtcggacgcgctgtgcgagtttgacgcggtgctggccgacttcgcgtcgcccttccacgagcgccacttccactacgaggagcacctggagcgcatgaagcggcgcagcagcgccagtgtcagcgacagcagcggcttcagcgactcggagagtgcagattcactttataggaacagcttcagcttcagtgatgaaaaactgaattctccaacagactctaccccagctcttctctctgccactgtcactcctcagaaagctaaattaggagacacaaaagagctagaagccttcattgctgatcttgacaaaactttagcaagtatgtgaaacaagaagttctgggtcctttcatcataagggagaagcttcagaaagttccgaggacctgctaaaatcagctactagaatctgctgccagaggggacaaagacgtgcactcaaccttctaccaggccactctcaggctcaccttaaaatcagcccttgatcccatttctgggcaatttagacagtgaaactgactttgtttacctgcttgcagcatattagaacagacgatccatgctaatattgtattttctcttaaaacatagctttcctgtaatttaaagtgcttttatgaaaatatttgtaattaattatatatagttggaaatagcagtaagctttcccattataatatatttttgtatacaaataaaatttgaactgaagtctgc

SEQ ID NO: 528 - protein, 135 aa, Homo sapiens
MKPPAAQGSPAAAAAAAPALDSAAAEDLSDALCEFDAVLADFDFHERHFHYEEHLERMKRRSSASVSDSSGFSDSESADSLYRNSFSFSDEKLNSPTDSTPALLSATVTPQKAKLGDTKELEAFIADLDKTLASM

SEQ ID NO: 529 - DNA, 835 bp, Homo sapiens
gcgggcgcggaccgtgctgggagcggcgcggctggagcgcagcgccgaagggactggcagggctgaagtgtgcgggacagcaagcccccgaatagccccggctgccacctcgcaggacctgtcggacgcgctgtgcgagtttgacgcggtgctggccgacttcgcgtcgcccttccacgagcgccacttccactacgaggagcacctggagcgcatgaagcggcgcagcagcgccagtgtcagcgacagcagcggcttcagcgactcggagagtgcagattcactttataggaacagcttcagcttcagtgatgaaaaactgaattctccaacagactctaccccagctcttctctctgccactgtcactcctcagaaagctaaattaggagacacaaaagagctagaagccttcattgctgatcttgacaaaactttagcaagtatgtgaaacaagaagttctgggtcctttcatcataagggagaagcttcagaaagttccgaggacctgctaaaatcagctactagaatctgctgccagaggggacaaagacgtgcactcaaccttctaccaggccactctcaggctcaccttaaaatcagcccttgatcccatttctgggcaatttagacagtgaaactgactttgtttacctgcttgcagcatattagaacagacgatccatgctaatattgtattttctcttaaaacatagctttcctgtaatttaaagtgcttttatgaaaatatttgtaattaattatatatagttggaaatagcagtaagctttcccattataatatatttttgtatacaaataaaatttgaactg

SEQ ID NO: 530 - protein, 145 aa, Homo sapiens
RARTVLGAARLERSAEGTGRAEVCGTDRIAPAATSQDLSDALCEFDAVLADFDFHERHFHYEEHLERMKRRSSASVSDSSGFSDSESADSLYRNSFSFSDEKLNSPTDSTPALLSATVTPQKAKLGDTKELEAFIADLDKTLASM

SEQ ID NO: 531 - DNA, 175603 bp, Mus musculus
  misc_feature (1)...(175603): n = A,T,C or G
acccacattcttcttccataaagtttgtcagtaaagattttatagcaatttgagtaaaagtagccacatgacttatactggaattagataaaattcatcgatgctacaaatagataatcatgaaatatttgtgtacatgtaagtaccgtattttaactaaaaatcagtattagttataaatttttaattaaatacacaaagataaaattaatattttaagtttacatttggatatctagaatttctaggccaaccatcaatagcgacaataattctccgtccttctaacgcagaagcctgtctggtttctatccgaattcgtggaattctcttatcagcgggtgtaaagagatgtcttcttgactagagaaaattaaaaagaagaattacagtcctgggccaatcacaggttctagcacatgctcttcaagtgcactctcactgagttacagccctcactgaggaaaaccaatttatagtcacagcaaagctggaaaaagggcaaagggagagctgtggagtctagtcagacattatcacttttcaacactgatagcaagtgctttgcttacctccttaatatcagacttggaaagcatgccacaatacggtctccagttcctttttattatccccacaactcgacctgtaggccgtaacattttttcacttacagcagtcttaagctgaaatataaaaacaagaatctttagttatatgtcttctaagtaaaatgaagtcatttttcttccaaattagaatatgcatatggatactaacacattcaagtagcacacaatgacatggaattcagaacctttatgcttcaaagttctagacacaagcaaacctctgaacaatgctaattgttccatgataataaagcactctatgaatgatgccaagatgcacatagctgagtgaatgtgtcagagctcagggctttcaaacttaatgtgatggtctactgacaaaacacactgtctaagaattatgagactaagatttaataccagtttagactaactagatatatgtagttaataattagttcactatgtagttatggtgaagagcatgttatgttgtatgaaacccattacaaagtaaatatatctttaacagttctatcttaccccaagttaaaagtcaaataaaaaatgttaaccactaaaaacagaccctataatattagacctctaacaattccggaggattgtattatgcaagagtaatgttacagtcagacttcaggaaactgactgtaactaaagaggtacacatgctagacctgtgctatcctcataaaatgggtaaataggtcatctctggaagacttagtaatgcataagaaataactcactcttccaataagtatattagtagaaacaggttaactaagcatgtctaaatacaaagatccagaaatacatgttctaaaacaattttaacactgcaaaaaatgttcaggaatttcaacatttctatttacttaaactgcattaattcagaccatatacagaatgtaacagacatccacttgattcacaaattgaaatacttaaaactcatttaagtgtaatgtcattaaaagaaaacaagtttgtgtagttaaaacagaaatcaattacgtacataacttgtaataaaattaaaagtacagaatttgggagagatggctcagtagttaagagtactgactgcttacaactatcaggaattctaactctaggtgacctgacatgcttttctggcttctgcaggcaatgcacactcatgttacacagacacacatgcaggcaaaagacccatacatataaaaatgaatacaattgttaaaaatttcagaactatggttttactcaataactataaaaacaatggcatgttaaacagtacaacaggacaaaaaccaagacttgctttctctcataccaggagttctctctcctcatctttctccacatcgtcttcattttgaccttcatcgtctaaaaccacggaagacggtgccacccactggctcctgggcagtagctccacggccacaatgtcttcatgcacagctctgtttagatgcttaattccctgtataagtatctgtggaaaccaataaatgccatgccttgaaatagattaaatgagaataatgaaagctatctaacagaaggttatagtctaactactgcatataatatctatctctctatgttttttcctattttaaaatcatcatctgagttgggcttgttgggtaaacgtgaatgctaaacaaacttacgtgatctgaatttggtcccagagcccatggtggagggagaccggaaaatgtcctttatttcacatcatacccacaactcacagtccacatcaaatatacacaacattagtcgtgcaaaattaaaaaatactactcttcatttcataatcttaatttttaaattttaatgagaaaaacagttcagtaagtatatgggttttgtttatgactccaccataaacaatgtgtataaaacatttgggagaaccaagctatttcaatctcagtaccttggttggtaaaaaggaaaacaccagagctttcataggttgggttgaagactaagtgaaatgctccgagtcaagttagacaaacttgatgaacagcacacactctaagggctggctgctacctgctttcatgtttgtgaagctctttttgttatgtaaatactatttattaaaagtagatacagaacacagaactatacttgacggttctctttaatagtgagtccccgaaacttctgaaacaactggcctcatgaagtcattgctgcctgactgcttactcctcccttaccgactagaagcagcaggtaagcctgagaaggagctgtgccatgaagtgctgcctgcatgcatgcagatctgaatttcagccctcagaccacagacactcctggacacggtgctccatgcctgccattcagtcctaagcaggtggagacagcagcctctctggaactgactggacagccagtccagcccaactgataagctctaggtcaaaacaaagcctgttttccaggacactctaaggccaccaactaaggctgtcctctgtcctctacactcaaatgtacatacatacacacacgaactaaaaataaaaagtgaaagccaggcggtggtggcaaatatctttatcccagcactaggaaagcagaggcagacaaatctctgtgagttccaggacagcctgggttgcacagagaaaccctgtctttagagaccaaatcagggctggtgagatggctcagcaggtaagagcactgactgcccttccaaaggtcctgagtttaaatcccagcaactacaaggtggctcacaaccatccatgagacctgacaccctcttctggtgcatctgaagacagctacagtgtacttatttataataattaataaatctttgggccaaagggagcggggccgactggagcaagcagaggtcctaaattcaattcactggattctgggtaggacctcagcatagaaagcagggatgtgctgcactggggaggattctgcctttgtttcaacggaggagaaaatgctgccgattccattcacactgataaaatgagatttaacagggacagactccgtgaagaacctgactgcaggcaagaaagaaatcaagagcagaccaggtcaagtacgtgctggtcccttttcacggaacagctctgaaactggttgacaggtgaaaatgtttccagctagaaattcagctatgcatagtcaataaaccttgttggctacagaatcctcaagacttaatattcccatccttttaagtggcatagataaaaaatttgttacaggttggttattcaatccaaactaacataaaaaagacaggcgccttcccatctcaagcagagagccgggagccctctttagctgaatggcgcacactgcacagctcatgcactgttcagttattgcagagctgtgcattactcatctgtttatgtttacaccaacgaagtcaacgcagccctgacaaggttcacgttcagggatgctgagacgctgagggatatttactccagcatcctgcctgatcctacctcaaactgcctcaatgctgttccctcaaaattctgcatccaggacagctttaatgaaagctgttgacccaattggtccaatatcagtaagactgttctagtcaggtaggacgtcagttaagccccgaactttctcagcagagactggacagcaaatgcaacagctggctttcttaagagctggtcacagctctcaaatgggaaacaatgctcccaatcagccggaagagattttaagagagccacatcccattcccaaaagacaggtagatggctcatcccaaacggggtgaaaagaaaagggggggacagggacgggacacataggaataacaggataaaagggttgattattgagtctactcttagaccaaagaacatcaacaagccaaatagttgtacatttgatacagatctttgtacactgatacaaaatgaagattacattttattacaacatactatgtatatgcttcagctcttgtttaaggtattatacctacataattcttaaatccgcaatgttaagttctagtccttttgaaatctactattacaaactgccaagaattaagtaagaaaagcaagttagtagttagacaatcaaactcatggtcatgttagatactattctagttaattacagcaagatattttcaaagttgaacagatagtaaatagacaggcaattcagatatattatagatacaaactgtccatgcttcaactgctgatagaatactgtccaaaccgaacaaacgagaccagggaggtcgactgctttgccaagacaaagtcataagatattctgggacagagggctgtagatgctccaatgttacagagaaattttggggaaccagccaggcagccagctttctctatttttctagttttggaagctgcttgcctaaacttcctgtacattcaggtaatatttattccttcacagggctctgagagggttgaagactagctagtctcaaaattaagcttcaatttcttaggattatttttagatctaagaagatattgggtttacaaatacaagttccatataaaatgatccaggtatggaactctagctcaccaagacagtacagatgtagagcactttcttcaaagttgccaaatacaaatgcactaaacattgtgaatacaatcttacctgatagttttcataattattattattgtacatagtttattattgcatatagtttattactgtaaaagaaaaagcttttcattgaaataaaagaggaaaatgtagagaatctcttatgcaatatatgtatttatcacctgtcaataatgctgtgggtctattagcttagacaggaaatagggaggtggaagttccagttcagagaaagaggactttgggatagagtgaggcacatgggagattcatctggagacagtcgcataaacctgaggagagctaactaaccatgtgaaagacagaataacctaattaggataaataagttaccatttagtggggaataagaaaaaggttatggcctaggaattaattaataaataattactctcagagttgctattgctgggaacaaagagactgggtggaaaagcctgcagctatccacaacaataaaaattttttaaaaatttaaaaggcatttatttacatacgtacctctttttcctcttctttgtctccatgaatccatactgtagcctccaaataattttccctgctagctctgaatgttccttgaagataggaaccagattttatgccttgttggagcttgcttaagggaagatgctctgaaaatattattttcccactttctatttcattctatgaaataaagcaaatggaaagtctgtttatttaagacactgtttctacaagtattgatacaacttaaaaatctgtattattaaatatacaattgaatttaaaagaacagagcaggacattttcccagaccacttgtatctaaaataactcgctgtaaagaaggtggtatctttttatcgatgttcaacaccatacccactaagcacaaattctcttgaattgttgaaatgtgtataatgagtattatatttaaactacatttaatcaggtacatataactagtaactaattattagaatactccaaaatatccaaaaatatatattccaaaaggccagtccataaaagaatgcttgtatcttccagcattcttttagttttgtaaagcaactaaagacaaacaggatgggagaaactgttaaaaggtacatgtgtggtgttctattagatagctagctgcctctgtaacaacagctatcactgtaatcaggaaagaaacaggacagtcacttgagtcatgtttctttatttttttaaagtgcttcaaactctatttaaggatggtgctggcactgctttaatctgagtactcaggaggcagaggctgtagaatctctacgattttgaggccagcctgatctacagagcaacttccaggacagccatggctgcaaagataaaccctgtctcgaagaccaaaagaagtgccacagcttgagagtagccactctaactgtacagaagttcactggactctgggtctgactaacaccactgcatagtttttgtttgtgagatcttatgatcgatagtcatcatttacatttaccatagctacgtgccaaacaagacagaatttcatgaatgcttcagattgtattccattcacctcttaataatggtatagttactactaaatatgtgtgtacatacttagtacatatacacacacacacaaaaaaaaagtttaatttctcctgtggtcttttttcaaactgtcagttatagtaactccgcgcttatccctcagcctccaatcttcgcactgatgcagtatgtcttatactgccattacaacagttttatgaataagttacctttttgatcacagctctctgctctccaacccactcttatacagcctttctgttagactgacatttaatggagagaactcaatctttactgtctcacttcagagtagacctttacttaggtcatcactaaagactgcaaacttcctgacgcccagcatgaatccctgcttcccactatagggcctgctgtaatactatgtatctccttatgactccccccaccccttaggcttcaccttgtatgcatggttagcctacccacaatggctaactttatattttcatcttttcaaaacaaatcatgctgaaacataccatttcatcggacaagtaagcaagacggtctataagttcagggttagcagtcaggctctttacgtattcttcacctgaaaaataagttactatttttaaattcaagtacctaggcactgtattgaggcgtgaggaaacatggatggttgtcttttgacaggacacctgccatttttttttaaaagatttatttattatatttaagtacactgtagctgtcttcagatgcaccagaagagggcttcagatctcattacggatggttgtgtgccaccatgtgggtgctgggatttgaactcaggaccttctgaagagcagtcggtgctcttaaccactgagccatctctccagcccgtcacctgccattatgaataaatggaacaagacccatgccaactgtgatcctgactgaaacagagcaatgggtctagcacatgcacatcttttactatgtcaactgcaaagaatgaggagaaacctaacagccacaatctacaacttgcttccttagctcactgagaagtttaaaacgtaagaggactgatggctcggcagctagacacacttgctgctttacagagggtctgcttcctgttcccagcaccctcctggtagttcacccctaccccttagcccagggtttccaatgcctacttcttacataagggaagtcacccacattaaaaattgaaaactattgtttcaaatgtaaaaaggccacatgagatcacccaggacaacgcagctgggtcatgtgaccgcgcagcctgatcctaatgtttctgtacagcgggacacaggcttggaagcacccacactcagacctacacgtgaaggctggtatcccctcttgcacagctttctctttgttcttcctgtcattggttatcaggataacttgcagctgactgtctgctgccaccctcttcaggtgctcgttgtaccacttcgctgcgactcggatggctctgtcattcctgtcattggcattctctccctgctcttgctcgatgtaggtttctctaaatgtaaaagcgacaggaaacacaaaacaaaagctagccagtggggtcaaaacttctgggacataaatgttccacagccactggagtttaaggaggcacaatgaatgagcagcccacaggtggacacactgactatctatctatctgtctgtcttgtctgtctctctcccccaccccctcctcctcctctctaggagtgtgtatgtttgtgtgtctgtgtgtgtgtgtgtgtgtgtgtgtatgtgtgtgtgtgtgtgcatttagttcctgcggaacttagttccaagttccatgttcctgaacattccggttcaggaaacttggaactgacaggagagtgctatttgcacatacttggcataagcaggttgcaaagcacctacgatgcataagaaaatttcatacaacaaaatactcagttcaaaatgttaataatgtcaaagctgagaaagtgactttaagcatcatagatacatattatctactgtttaatataacaggcagctcattatgtttagaaatttaatttcaataaatcagatgtaagataaagcttattaatcacaaactcccacatttttctcctatatatttgtcactcacataatatgggattacaggagtgtagatggttcttatcgccaaagaatcaaccattcaactcaatagacaacttaaagggagcatttcagaagtaaaaggacgactttagcggctagatcctggtttagggtgtgacctcactaacactgcgaccttagatgagcctatgtaggtagcactgtcttccacacaaccaggtaaccaccaagcagcacaggaagctacagcctgtgtttgataaattcctttccaagaagtctgttaaatttaggtagccctgtggttttgtgatacttacttatggtgctcattagtgaaggtatagaaatgcttttcctggttattggtcacatccctgattcgcttgtagatgggggcgctccggtttctcacttcttgcatcactgtttgtagcacaatgacatttctgatggccgggtgttcgaggacatcaatcttaaaaaaccaaagccaaatgttaactcccccgttttcagttctaccttgaactctctgcccagcctgaattcttgtgacagtttaaaacactgactctccgttaggccaaagtggtacttggctgcagaaaaaacttgacaaagtcactaaggggggaccctgtaggcctgagacgatgacaagcacccataatcggaccacagagtttgcaataccagagctattaataagtaaattatgctggcccacacaattttttgttcgtaggcacttacaagctgcctgggggtcgcaatctggaggccacagaagcccaggtccccggcttccaggcacttataatctaaagtagaagagacaccaggggttagaaaatgtaacgtgtctaaaaataagactccaagaaccgaaaaaaaatatatatatataaataaataaagtgacatcagggaacggtacctcagcctggatggcaggatgcgagcgagggtagccacggtacttgcctctctccatccaacatcccaagacccgcctccccggtccccagcgtccctgtctgccacgccccctcgtcaccacgcggccccgcgtccacgcacctggtgcagcagcacattggtgtccggcagaaggtagtgcggccacgggcagaggctgctcgcctggtcccggggctgcagctccagggccgggcccgcgtgcgccccgccgcaggccgagcaagccggcgcgccgcagccgatgtcatcccgcaggtagtgctcgcgcacgatcttcaccacgccgcccgcgcgggtcttcttcaagaacgtcttggacctgagcatctcgcctcgcggcgtgggatcccggccgtcagctaagaaaccgaggcgcggccacgcgcattcccgcttttgcccgctggctggtgaggtcactctcgcgagaaaacacgaaggcgcgttcgttccccgacggtcgcggtgattgggcgagtgttggttgtttcctcccgccggtgggcggggctttcctctggactacagctcccagcctgcaccgcttccgactggcttccgggaaggagtgagcttgggtacctgcgcaccccaggttcttccgacttcttctggggcacggcgtgtggttgtcttggtgaccgatcctaacggtccggtagccccgagatacctgttgaggggtggcagcctgagctgctgactgaagacgccattggttcttccaagagtccgggtgaagctggtgttatccttatatgcggagttactgaccattgagaggtagcttccaggaatccctttccctttctttctcacgcggcgcagagatgctaaaatgtaggaagtttagaatgtacggatttcttaatcaaagagggagaagccggtccctggtccttggtaactcacgcaaggatttgttttcttattttactttttttcccccccaatcctttccctttaaaaaggaaagaggcggattgtactgaagctcttcctgttcccccccaccacacagacctccttctttagcgttcctcttagagaaactgaaatagctagttctataactattttactaaatcgtgtcgtatttaaacaagggagttacaaaaagccttgtgaaggctaaaatgtgctattcagaatattcgagtttgtacccttctaacctctttaggtttttcaagttatttaaaaatgcttttgtcgcactctgagcctgttttcaaatttttcggtgatgccttaactgtaaaactaaacctggcatgtaagtcttgctttataaaccctccaccgacataccaacatttttctctctgtgtccagatttcaatactacttctgtgaggaccttcagtgacaaaaatcaacctctccttgagtttgaaacttagtattatagggctatcctttctattttacatgactttatttatctgttaccttcaagtaagattcttgccccgagacacacacacacacacaggacaatgggtgagttcatgataggatttagtgagtctgtttgatttgaacactaatctggcttacatttgggaccttccaatacctaatgatctaggcgatccttggtgtctctttaatgctctgtatgccctgtagtaggtttttttttttttgtatatttaactttatttctttttattctacagaagattgattcaaataataaaatgtctcgcaaaattgccaaggaaccaaaaaaagtaaatatctctagttctctggagtctgaagatattagtttggaaacaaccattcatacagatgatgtctcatcatcagaggagcgagaaggtaaagtcaaaatcaccaggcagttaatcgaaagaaaagagatacttcataatattcagttactgaaaatcgagctatcccagaaaaacatgatgatcgacaacttgaaaatggattatcttacaaaggtaaggtcagatgcaaactgttattctcttgaaactgaaaaggaaagataagttggtgtataggccgggtgcggctgcacatgcctttaatcccagcccttggaagcagaggcaggcccattgctctgaattctaggccatcctgatttacatggggaggtctaggatagccagactatgtgatttttctgtctcaaaaacgaaaaaacaaaacaaacaaacaaacaaaaatatatatatatttggaatttaaatgccacacttcatactccttgtccaatgttgcctttctgcagtttgcgtattgaaatggggtgttttaagtgtatgagtgagttacctttgaaggctcaagttttagagtgtgacattagtggaatatgtattttcttaagaatgaaaatgtagccaagttttctgggactgactggtctgataggaagagtgaagatcataactgtattgctgaatctcaattgtcctttctttagaagtcggatttccttgttaaccttcctacacagttactctgtctgagaggtactgtgtcatagaagtcaattttaggtgaccattgtctttagcaagtgcgttatcctttagtggcggtgaactagttgtctttttgccttgtgtggtacttagtcccagggtagttcatggaatgcctggtagaggtgaaacgagccctaagaaatagtgactggcctccagacacatctctgcagtgttacttcttctgttcctaagacagttacttgtttctgacagtgaactttccctcttcactctccatctcagctcttccggcaaaagcccgtgtccagcagtttgtttacgttgttatacttcttcttgttaacttggtctttcattttagctctatgctacttaatatgatatgcatattaagatactcagcgtttctctactagaagataatgtatttctttggggccaatgagataacttcatgggtaaaaatgcttaaccgtccaagcctggggacctgagctccatccctgggatgtagagtgaaagagagctgactcatggcacgcacacacacgcacacgcacgcacgcacacacacacacacacacacacacacacacgcacgcacgcacactccacgacttagtaggaagaaggagagggcgagagagatagctaggcagttcacagagcttgctgctcttcccattacaacactggctcagatttcagaacccgcaatttcagaggattcagtactgttttctggccaccgagggcaccagactgaaacatacatatgtgcaagcaaaacattcagactcataaaagttaaataaatcataaagtattggtttaaaatttgattatttacttatttgtgagccgcttgggatcaaacccagggctttcagcctgctagatacatgctctgcccatgaggaaaatacatgagaaagaaggaacaatttcttaatggggccccttcaagacctcaaggttttaatgcagtaaagaaatagcacttcacattaatgactgagccagtagtacacattaggctatagctgttattcttgccttgctctctctgagatgctgaaacaaaaaccttaggaatgggaatttgttttcactgtgtggcagccaatatatccaggagtgggcgctggtcatgagttctgtccattcagggtcttctgcctcttgctgagtcctcacctggcagaagggcggctatttttctccatcagtctgtttcattagggcagtcactcctgtcctaggcacactgcctgtgcaacctaagcattccccagacggcctcccctcaactcctatcacattggtgactggttaccatatagggaagtagatatggaccaaattatacatgtacacacacccacaaacacatgcagacttacttactggttttgttcattttatctctctcgctctacatttattttgtgttctgagagcacacatgctgtagagcacatgtagaggactcttgtaggacttgctctccccttatttttcaatttagtttttgaaaatttcaaatctgacttcagtacgtgcatccttccccctcctctgccctctgtccagcttcggtgtattccctggccccctgcacctgcacccacacccccaaattcaaggcttcttacttggcaagaagttctaaaatgtaatagtaatacttgatcaggaggtaaccaacagccaaccaactggattccagcccacttagtagaaggactttcacacctggtactataagcatagccacctaacccttggctggcgaggccatggacctagaggaggacctattgccaccatgtccctaaccactacaattcctagctgcattacaacttatccttgtacccacagatgaataaatgtagctttcaccccttgtcaaacaggctttgttttgcagcagatcacaatggagaaaacaactgaccatggggagtccggctcaactgatacatctgtgatgaaacccctgtatacctaaggcctagggaacatcttggaagaggagggtggaaatattttaagcccagatctgctggttctttcctttcactgtgtggccttcagggatctaactcaggtcatctagattggcaggaagcagttaccaccaagccatctcaccagcccatgtttgtcagtgtcttttaatagactgtagggaccctgagtgcaaggacagacttgtattatgttactgctggattccagtactgtgaatagtgtctcacgtacagtgcttaactgtttaacctcattctgtccacttaggtgagcattacagactttgacaagaatagttccactgagtagtatgggacagatgtatatggaagctttaatctgaaagatagaagggaaatggtttatagcctaggagtaatgtgatcaaggcagtgatgtttgttgttttgtgtgtcggaggctgggtgtatttgtttagtggtaaaggtgatccaggagagaggggtcttgatgtaagaggaatgctgttagactcatctgcttgttaatgtggagacaggaactgtcagggttaaaacaaaggggaaaggaattagactcgcacaggaccaagtgcataggggtaaacagaaagcacaggctattagggaactggagaatttatatggactgagccatgtgctggtttcagttagtcacaaagcaacttgacaaaaatctctgggagggtactctgctacaatgagaattttttacagagacagtgacttgaaagtggtatactcttgttacacattttaaaggcaagataaaggaagttgtggaagtttgtgaaatatcaggaaaggaagttggtgtgatagtgcagacgggcatgtcaagagagcccatttatcttgttaattcagagaccatgaggttagtggattgagcacttaattgttttgttctgaatgtttgtgttttcacctccatggcagttactggaggatgcacagtgctcaggttagctcgtgacttacagtgtgagcagagagtttacatgaagttcccatctcagtgagctctgtgtgtaagctagggcgagagtcatcatcgtactcgtagcctggcagaacatccatatgacggtagcttaacccagaaccttatagacccctattctggttctcttgagtggtttgtgttgttgttgttgttgttgttgttgttgttgttgttgttgttgttgttgtgctcactgaaagctgaacttagaactgactagattctctctgtgcagattgaggagctagaggaaaaacttaatgacgcccttcaccagaagcagctgctaactttgcgattagacaatcagttgactattcaacagaaagatgccaagtaagacatgcttttcacaaaaacctaacatctatttatcaactaattttaatcttgcttatgcattttgcatttatttatagactataatagaggaaatttaaattagatatgcttatcttcacagctagaccaccaatgggcaggttgctttataacgctgtacaaagcacacagttaagattcaggattcattccacagatactggcctggataggcaacctatagattacaaaaggagtctctaagttgaccacaacttggtgtgtagataaacttttcttcatccactctagaaaccatcctggattatcccggctattggatttcactgctgtttttatatacgtagatattacagtgatcaagagttcaaggtcagccttggctacttgatgagctggaggccaactctggctaggtgaggtgttatctcaaaggagcaggcaagaaacaaaatatcgttgtttactttcaaatgtacctatgccaggtatacttatggaatttatttgtttgtttttctgagacagggtttctttatgtagccctgactattcaggaactagctctatagaccaggctggcctagaactcgcagagataggcttctctctgcctcccaaatgctggaattaaaggcatgcaccaccactacccaccatactcacgtaacttaacgtgacataaacaatgatattttagtagaaaaatatgcattgtttctagaataaattcacaggaaacactcaataaaagtgaataaccttttattcccagcacttgggatgcaaagacatgcagatctctgtaagctaagtctggtctgtaaagtgagtttcagccattcagagctattgagcaagacttgttgggaaatcagataaataagtcaataaaaaaaaaaaatcagtagtgcctggtggtggtggcgcacgcctttaatcccagcacttgggaggcagaggcaggtggatttctgagttcgaggccagcctggtctacaaagtgagttccaggacagccagggctacacagagaaaccctgtctcgaaaaacaaacaaacaaacaaacaaacaaaatccgtagaggcacaataggtttaaagactaagcaagaacacatccacaaacagtttcttctcagatttttgttggtgctgtttaaggtctcttctctagactggggaagtggctcagaggtaaaatgcttgccagagaacccgagtttgaatgctgagtgaaagctgagagtggtggtatttttctaaaaacccagcacagtgagggtgaaggcaagcagatcccagcagctcactggccagcaattctaggcaaaagagcgctgtttgggttcagcgcttgctcctgtttttagaaagcaaggggaagaaacagctgagaaggacattctagagtcagcttctagtctccataccaccaggatggctcagacttaccttatgagggaggctcagtgttactgtattagagatgcagtatcaggatgaaagagaaatggaaattagtaactaggccccaaagctgacacagaaagctttaaaactttagcacagtagttatcaatgttccgaatgctctgacatttgatatagttcctcttattgtggtgactcccaatcaaaacattattttccgttgctactttataactgtaattttgctgctgttttgaattgtaatgtaaaatctgtattttccaatggtcttaggtgatccctgtgaaagggtcattcaaggccccaaaagtgtcctgaccccacaggctgagaaccattgtgtcagcagattaaatgtataattttgtgatttgaattttttaagttattacttaagaatgttgattctctaataatttgggtttttatatttactaatctgtatggatttgctacttcatatttaattagatccataagtcagcattgtggtagccgagaatactatatggaactctgaaagaagtctcagtgattttaatgcttgccataaattctcttaatgtagaaaatatcaagaactaatgaaacaagaaatggaaaccattttattgcgacagaagcaactggaagaaacaaaccatcagctgagagaaaaggctggagatgttcgccgaaatctgcgagactttgagctgacagaagagcagtatgtgaagctaaaatcttttcctgaagatcaactctctattcctgaatatgtatctgtaagtgtcgtgcatcatctggacaaaactccaaagctcagggtagtagcacatactgtaatctctgtcctcaggacatggagataggatctacagagtgggttagaagccatccctgtgtcagaaacaaacacagtaaaaagaaacccaaaacggctacatctaatcagactgaagttggcttggcatttttatagaggcattcgttgtgtatttgttttttctgtttgtgttttaagttggcatatgaagtaattccttaccttttgtgcattgtgacatgtgttgctcatcctcctctttgtgcccacccctgcctcctgacctcctgacctcctgacctccttccagctggtgcctccctcccataagtggtccctcttctgcttcctaatcagtcaccctctctagttcccactccacctaagaattcttccctctcacaccccctgcctaggtttggagttacatacatttaattgtaaattaagtttcacctaggagagaaaaggtatttgtctggctgaataaaggcaggaggtgggaaaggagatgcatgtaggataagtacacttaaataaaagaaaggagaaagtggaggacttctatgggcaaaaacaagaaagaggttagaatagaaaaaaacttttcaggctggagagatggctcagcagttaagagcactgactgctcttccgaaggccctgagttcaaatcccagcaaccacatggtgactcacaaccatctgacacctcttctggtgtgtctgaagacagctacagtgtacttacatataacaataaataaatctttaaagaaaaaagatctcaattatgaagaagttaaaaaaactagataagcataaggggctagaaataggaagatacaagtattttagcaatgtgtagtcagtggagcatgacaataaaaggagatatagagacaacatgggggaacccttaaggggaaaaagggaaatatatatatgttgtctttttacatatatatatatatcctaatgtaaaaatagatatttatttgtagaattcaaaaataatttctaatgctggaaaacacaaaaacaaaccaacaaccaacctgaaaggtgcaccaaaaaggggagggggaatcacaatatacaaaagattaaacaaaaaaaccgacgccctgcagtggtgtcctttactcccagcactcaggaggcagaggcgggcagatttctgagtttaaggccagcctggtctaaagattgagttttaggacagctggggctacacgagaactcctgtctcaaagaaaccagaaacaaacaaaacccacaacaacaaaaaccaagcaaaaagggtgacatgtcagagcagctgcctggagggccctcagcggtcagagacagccagttccatctgtggagacacagtcacttgctcgtgtggactctgggcgttcctgtggttaatgctgtgtaggacactatagagaacacatgacaggattccccttccttcctttcctgggtagagtttccttttatgctgtagccaggccgtaggcctctcctgcccgtgctttgcactttctaggaggcagtttcttgcagtctccctagacacagcccatcctgccctctggtgtggctcaggttctggttggagatgtctcccaagggtgttaggaatttggccacagccggtctgtgcaggtagagaacctgcctttgtacttgcctgacgtgcagagtttgatcctgttggaggcatacagctatgggtatcagcttcactactggaccttcagcattcctgggctctaatggtgaatggggcatcagtggcttcggcagttgagtgatgtatgcagcgacataggggccagagctgttaactttaggattctttttagttgagataggttgtggccactgagggcaagactgtgtttctctgtccacttctctgcctgagcggagcccccagctgcctatcctcccctctgaccggtttccactcaccttgctctccactactgcctgccctcttgggcttttccccatcctgctattgcggcagtctaaactgagcctcactggccagggttttttttgttttgttttgttttgtttttttctagacagggtttctctatgtagccctggctgtcctggaactcactctgtagaccaggctggtctcgaactcagaaatctgcctgcttctgcctcccgagtgctgggattaaaggtgtgtgcctgtacgccaccaaggcccctagggtcttcagtttgttacagtgggtcctgtctcaagatgactgttacttcccacccactaagtcatataaaaagtcaacagtgagatctccctccactgcgaagccactgctggagggatgcgtggccactaaaacccttaatatcacttgaggttcttgagggatttgggcttatcctgagggtaggactgctggcattaatttggggtaccatttggaagtcacttttggtcactcaccctctcctactagagaactgttagtgtaaagctatatttagcttatatatgttatatatgtgtgctggtgtatgtgcacatgggtgtgaatgcagtagaggccacaggacagccttcaatgttactcaggcataaccttgctgtttacttattcattcattcatttttgggacagtctcaatgacccggagcttgccatttaactaggatagtgaagcccagggatttgcctgccataccttcccagcactgggataataaccacgtgccaccacatctggcttcgttctatagggtttggatatttttatttttgatcttttcgagacagggtttctctgtgtagtcctggctgtcctggaactctgtagaccaggctggccttgaacccaaaaatctgcctgcctctgcctcccaagagttgggattaaaggcgtgagccaccattgcctggcttttactttctttctttcttttttttttttttttcagctcacttcttagtagtccgtgcgctgtctttttctctgcattgttgaagtattcttttatttcctttgtggatttccaagccccttctctctctggggtagccttgtttgtcttactctgactctcctctggatcatccaggaacaagtttagacttaccttacctaaagagtattgcttttgaaacacccaattgataatagtttttgaccctcataaaaatggaaagtatatttaaatccaaaattctattgactccatagtttgcaaaatgagttattttatagtggtgtataacattctgtaaagggaaactctgaagaaaaaaaaaaagatccaccaggtgtggtggcacacgcctttaatcccagcagaggcaggcatatttctgagttcgaggccagcctggtctacaaagtgagttccaggacagccagggctacacagagaaacctgactcgaaaaactttaaaaaaaaaaaagggggggggggctctgaggatgagccagattaggattgtctggaattaattagggctagtgggtgagagtgggatgtttatggttagcaaggggtaccaatgggggagaatcttggtatacattagttcagaatctagttttctcaaacaaacttgtacttaggcttaatctttggtttgagtctcaagtcagcaatcccttctagcctacagagcgtttgtttttatgggcatatccattaacacttgtagtattggaaattaaacgttaaggaaacagattaagcacaaacaaggctgggtgtgctggtattctaaccgtgcttgtcccagctactgaacagactgaggcaggaggatctcttgaacccaaacattcaaggaggcagcttcagcaatgaagcaagacctccactaaaaacaaataaaatacacaattagatacaacatctatttgctttaaaagtcccagtgtcgtcataaattgtatagagaatgagagaatgagaattaaattgaacaagataatacttaatattactatgcaaatacgttttatttgagaattcccttaaagaattaagaacagcgaacggggcaagagccagaaatgcccaaagcccgcactgacagctcttgcttttttatgttatgattttaccctgagagcttttctgttgtcctcatttataaaagcaataatctctctctgctgtagagattaactgagtttgtaaagcatatgttaactgtctggcacagtgctctgcccctgaggttttgtaaatgcggaataccacctactgtcttgctggaatggtaattgttcttggttctcagtggaccaaggtttctggatcagtgacttgaaagaaaatcatatgggagctttttgtccaggtttttatttaaatgggtcagttagagcttctctgcccaatatctactgtctaaaagaattcttgtaagtgccgtcactgacgcttcattcacagtagatataaagactatacagctttgccttctggtttcttcgtattcttttactcttttgtgtgaaatattattccaagtaattgactgctacagatttcactgccttaagggccaactctatacttgcttcttactagactgggtatctctgcaatgcattcatgtatttaggacctttgggttatgtgcctccgtgataagtaatccctaattgcttgctctcgccttatggatggcatcttggttctgagaaccttgtagggtgggatacctgggttataacaggaaaaggaagagtgaggagaaaggcctggattgagtggaagcagtttctcccatcattgggattcattctcaggaccccctgacatcttcaggggcagccacatgggggatgttgccaagatcctgtagttagagcaaagaataaaatttatctcttaaagtgatgtttaggttgacagagcattatataagccagataaaaatccctgccctcatagcacttactttggtgtagaccctaacaagcagcaacttaaaaatggagtgtgtgggatggacttagtccaggtgcttcggggaagatgagtggggatgaaggatacggagcgcagttacgtttgcaggatagtttgttatttacattcaattagattcattactgttagatctgtggggaatgcattccaaggctgctagtgggtagtgctgagtgtttggcagtatattctgtttcctgtatatgtatatctatggtgaagattatataagacattgcaaaaaggcgaccaaaaacaattatagtagtataccttaataaaattatttgaaagatttccaaaaatttccagttaatatttttaccacagttgaatcagagaaagtaagtggcagacagtgaacccgtccaggacggcctgctgcatgcaagcagcaatgcttaattctcatttccatgcaggattgctcagtcgactttttttttttttaaagattcgcttctatgagctcgtgaacccattaagaaaggaagtctgtgagctacaggtgaagaagagtgaactctctgaagaactgagtacaagtaaaggccaactgaagcagctgacggaggtctgtaatgtgtctattactcttgcaaagacattgcagcttttccatagcagcttcttaacgtctgtgcaggggacatgaaagtggcagaaaatgagaccaggggtgctgactgctcagtgcttagtgagtcagaaggaagaggctatcttcatctttaaaattagcatgataaatatggtttaacctctaatccatagtatagcatttgttattgtattgtttcagaaccaaatgcttttgagatcacagaacgaaccatatctgaatgttcttgtgtaataaatgtgcacacaagtgtttataatttctctagctttcatatgtaagggctctcttatgggtgtaggacgaagagaatgtagttgacttttcttattagagtcctaagttgtcaggacagtcctcattattgctgatgtataagtataacagcacctcatgtgtttttagaagaatcctaatcatataaggctctcatgcttacaacttttcatttacagaaggctacactggtcattagtttgattataatgttggccaaatatcctagaataccatcatgtacttatagttgactaaataggaaatagtggtgtgttggtgtattttcctctctaacagcttttttaaaaaatgggatagctgtttcctccaaagagttcttcagactagaatgaaaacaagtttacaagtagagtctacagcagttgtttctttttatttatctattttatgtatatgaatacactgtggctgtacagatggttgtgagccaatcatgtggttgctgggaattgaactcaggacctcctgctcgctctggctgtcttcagacacaccagaagagggtgtcagatctcataacggatggctttttacttttcttgaaaggttttcttcagcttaaagtagtctgtattcctatgcaccatacaataggaggagaagtgttttattttgtcgttaacgacatgaaagtgcatcggtggaatcagggcctcactgaggctactgtcaggagagggaggtgctgctctgttccacaggaaactacatcgctctggtaaatcgtggggcagggtgtactgttagcagctgcaattagaataaacttactacgctcttaataaggtatggcccacgtcattcatgttacattattcgaatggtctcttcgtgcaacagtttagtaaatcaggctccacacacttaatgttgggtgtttaaagggaatggtgtggatcacattaatctctacaatttaaaaccttgataaaatgtgaactttgagaagtgcagtgactacccgtggcctaagaatcttaagatatgtcactggcaaccatgaaacttaaattcatgtgtaacctcatcattcattaatggagtaacgagtgtcgagctgactttttagagggctgttcaatcgcctgctggaatctggagaccccgggaactgtgggctaatgagccaagccttgcatgagcgtctataaggagtgagagttggagtcggtgactagtaggcaagtgtatgcctcttgggagtgccaccagcttttcaatgtgcatgtggtatttcacgtaagtggtaaccacttacctatgtgtataaaaatacaggtatttcaacatataaattttcaaaaggcaatcatgacattccaaatttttgtactaaaatttaacaccttttaaaaattatagtaaggatacatttcacattgaccaagcatgctattttgaagtgttcagtaatacctctagaatttttctgtcctgaaacactgaagctccaaaccccttagacactaatctaccttccctctccctgcctgtaagaagcacttttcttctttgtccctatggttttgactattctagatactttatatgaacggaatcatgcagggttaacatgtctttctcttagtgtaaatagtgagattcatccctgttttaatgcagtgtccttctttttgaacattctcaatatacaccacacttcttctccatctacagcgagcatctgggtgggttaaatgtcctggcaatatctgacagacttaagaattgttaacttggtttctgagagaattgctttgctcctcagcagttgaaggataagaaccaaaatataagacagaaaaggatcacaatgaaaatataaacattctctacagaatgtttagtctaatgttatgtaatattaaatactttaatttattacattgctaaagaagaataaatcatgatttcaaggttgctttgtctaggtttgtctgagtgtgcagaacccaactagtgaggcagttgaggagcaattttagattttaatgtaagttgtcagtttatatatctgagttagtatgtgcagaatttaccaccagccgtagagattatagagtcactcttattacagaaattttaaagcatgcatactattagctgacttccaatgctacagtgaacacttgacataatcaaattacaaatagaaatgctttgttttgggcccacagtttttgggggtttcattccatggttggttggcctggattaagactacctactatggttgggagtgcatagcagggtgaaagagctcagttcatagagagagggggggaagagaaccagatctcacaatcccctatgagagtgtgaggatcctcccatgagagagacccttaaagggttcccactacctccctgagagccaagccagaacaatgtatgtacctcctaacacattcacagtaacttaaaaaaatggtatttacagtaattaccagcataagaaggacataatttctaccattaacactgaggtctgtcttatacacatctgtcctccaattgtatcttctgagaacattctaggctctcttcttagagtattagcagtttcttcatcctctgctaaagactgttctattgtgttttctctccaatggtcatctgacatgcttacattttagagacttataaataaggccgctacagtatctgcacatggatttgtatgtgcatacattcttttttcttttagggaaatccttttttttttccttaagatttatttgtttgtttatttaatgtatgtgagtacgctgtagctgttcagatggttgtgagccgtcatgtggttgttgcgaattgaatttttaggacctctgctcactccagtcaactctgctcgctcagtcccagctctctccggcccaaagatttattaattattataaataagtacactgtagctgtcttcagatgcaccagaagagggcatcagatctcattatgggtggttgtgagccaccatgtggttgctgggatttgaactcaggacctttggaagagcagtcagtcagtactcttacctgctgagccatctcaccagcccagggaaatccttaagcatgttttggtttgctctttttttttttaatgtattttcctttcattgttcattaaatcttttatttttaggctatttattataagtatgtcatgacttatgcctttgaggtagtttaataattgcttaaaatcatggcactaatttcaatgtcatctcagtgtgtctctattgattgtctttccttttaagcatgtcacatgatgctatttttttcaattaactttgttttttaatacatcaaggagtacagttaggtactatcatggtgagcaagctgtgtgttaagttccctctggaaagtactgatttttttttttaggaaattagattccatgtgcccatgtctgtttgatagcactatgattttaattctgatattttggcctttgtggtctgtagggagtctgtcctcatatatgtcctgatcaggggctaagagcctgagcagagagaagcagagagcatgcagtttctcttctctggctgcctctggctgcttcctccctcctctgcagctgcagtggtcttctgaccctgccaggtaggaagaaaggctgagggctttacagtccacctttgctatacagcttgacacacagtggactggccctcattttaaacaacactgaaacaaaccagcaggcccgggaaacccacgccagtgctcctctcttccacgcgctgatgtgctcaacagcatctgtctgcttccatccttttcctgggcctcatccttgactgtggagtaggactggtcagatgggagcttgtttggccattaccttgggcacagtggtactgtctgtttacacatgggacagagaacgttctgtgtgctgtgaagctcgtgaagactctttttggccttgcgatctcttaccctaggaagagtctttttcattgcaaactaattttcccatttggcatgaatgaattatggatgaatgaatgaatgaatgacttttttcaccattacatatgaaagaaaatactggaatcaaaagttttaaaaacataatcagaatttaaagaaaacatgttttagaatattgtctgttgatttagttagtagtttggactcaaaggagaggtctcaataacaacttggtaaaatttactaagaaatgctcagacgtttattagctatgtctctgaattttgagactgttaatacgaaattaaactttcatttttgatttaaaactattcagcagatccaaacatcagctccgtgtgttttgagcacatggtggcagtatacacccatctatctttaaaaggacaagcaaacagcaggttgtgttggtcacttggaacaagcttggttttgaacttggactgcactaatttgccttttccatttctaattttcagtcagctaacgaacacagcaactgctgcttgttcctagtaacacccaggagttccactgctgtacaagataagaaaaacaaaaacttttcttccttaatagatgatcttcagataagagattgctcatttattataataacttcatagtcaggcctaccgtaacattgagagatgttaaagccacacgactgcaggtaatttaacctgcctgtttagacagtcagctcattcctggctggtggaaggtgaaaaagctccagacacttactagactaggactcctgatctttagaaaagaaatgacctcccaaaatgccatttttatatttggttttaaacacccaattacttccctctgacctcctgagtcctgcacatacatgtgtacatatatacacacacatacacacaccaatggaaatttataataaaagtatctgtaagcacttatacattaaatatcataagcatgtttatgagaacacaatatagctcaaagtaagctataatcctgctacacttagaattctcagacttgaaataaaaacagaactacattttgccctgtagcatctatatattccaaataattggatgtgtgactaaagacatcactttcaataaaactcagcatcctagtgtgacaggtgcatggactctgaacatggatcatttgaaaaaagacgaggttttgtttgctcatttaattgatgttaaaaacaaactggacattttaagattaaatttcagtgtttgattttttatttttcactttgtctttgacataaagtaacatagtttaaatatttgactatgtaacacattagaaagattgcaatcacactttacagtttgttattactaaatctcattttctacatatgcctttaaaatctattggctttctaaaacctgttgaaattttacctataattgcaatgactgacagttaaaggtgcccacacagtgaaacgtatgtggggaatctaatgctatgagacctttaaggttttcatcagaatagaagcctagttagttggatcatcgtctcataggtgctgtgtgaggaaacagtctttaaaagactttcttatgtctgtgtgctctgtctgcgtggacgtctgcatgcccgaggagcacagcagatgcctttacagatggtcatgagccaccatgtgggtgctgggaattgaactcaggacctctggaagagcagccagtgttgttaactgctgagcaatgtctccagcccactgtatttacaatcttaagtaagccctccagtgcttttcagttttaatttcaaggacaggctcggagtagttttttgatagtgaggtgaatgttgaagccagtggccaagagggtaatcctcattttgtagcaggggaaagacccttcatagatacctttcaaatgctgtagattaactcctaagatgctatgaccacttctttttgttggtcttaactttcccacgtgttttgataaggtaagaataattaatcttcgctgtgagcattctggttagtctgtcttccaatgtggtctcagtagtaaacctggaacacgtcacagagggtaactcttatccagcttctgcatagctactcaattacaaaccctgcgttctttcacacagaatacagtgtttcttagcccaggctctgaaggcatatatttgatcattaaaaatacttattgcattgtttatcatgtgtgcatgtatgtacaagggtgcatatgtgtataggtcaaaggacatctcaggtgtaaggcttggcagctagccgctttactctctgagccagctcactggccttttttattgttgttaaactgtataacacttagtgttttcagtaattagtagatgtgtatgttcagtgctatgaatggatagtttgtgaggtcattgtccagactgagacaggagcatggtgattttgaggtcatcctagggctgcaaaatgaaagtctgtctgcaaaaccccaaaacctaagcaaaccaaccaacagtggtctatataagttgcttagtgcaaaaattgaaaaaagttggaaaaagaattatggaaaatgttggcaggaaggtaatactaatgcgagatagatgaaatttaaaattaaaaccttaggactgagcaccgggaccccaatggagtagttagggttagggattgaaggagctgaaaggatttgcaaccccataggaagaacaacaatatcaaccaaccagagcttccaggatctaaaacaccaaccaaggagtacacatggagggacccatgtctccacccgcatacgtagcagaggatggccctgtggccaccaatggggaggaggggcccttagttctgtgaaggcttgatgccccagcatgggggaatgccagggctgggaggtgagagtgggtgggtggatgggtgggggaacacctctcattagaagcaggggggaggaggaatgggatagggggattccaggagggaaaatagggaaaggggataacatttgacatgcaactaaagaaaatatccactaaaaaaagctcagtggttaagagtgctgactgttcttccaaaggtcccgagttcaaatcccagcaaccacatggtggctcacaaccattcgtaacgaaatctgatgccctcttctggagtatctgaagacagctacagtgtacttatatataataaatgaataaataaataaataaataaataaataaataaataaataaataaataaataccatataacaataacaaaatgtcttatggcaaaacctgatgttatagacaggaacctttccatagtgaatggcataatgtttataaagtaaattgagagcttaatataacacagtaagcttggaagtttaatttgcttctttatcagaactggggtagatgagatagataaaatatctgaggcctagaaggactaattttatcgatgctttgatacagctgctataaggaaagcctaccagtccctagccagagactgggtcagtttaagcatcactggaaagtttgctagcccactgtgtgtacacttggtcacataggaagagacaaatgcattttaggtacacggtttatagttcctatcttatcataacttagtaaagcagacaaagagggaattaaactttctcaacatatttctgttggctcaaagaatttaaaaaggaaagcattgaaaacaagaatattttatgtcacagttctcaaagcatatttaaaattgtaccaggaaaaaaaaactttggccttaagtttttttttattactacacaaaaagataaaaataaagatatgcactcctcatccgtggctgcaccaggcctgtgagccagcacttcagaagctcacgccaggggcacctagtgctcgaggccagcttgggctgcctagggaaacagttgggaaaaaaaagctataaaaaacacaaaaccaaaaaatgaatagaaataaagtattggaaatttagtggttgtgtacatgtgtgtatgtgtttgcattaacaaacttgaaactgaaagtgaagtgtagcttagcatgggaatattataaaggggagtgaaagtgctcactaacctggttactaccgggttcagaaatggattaactcaggtgaggtcacagggcagttcttaattcatagttaactatagaagtttaagggtagaaaattctgaggtagcataaaagcaaaacaaaataaacttataagctcattttatttaacccattgaaacaaaaaaattcaaaataaaatgtttacaaatgaattctaccatcatgcatttattttatgtgtatgtgatgtgtgtgtgccgtgtgtatgcagatgcctgtggcggtcagaagagtatcaggtcatctggccattatatagctgcagttagcatgagctaactctaccagggctgggaagcaaaccagttccctctgcaagagcaatcaatgctctgaaaggctgagtcgtctctccagcctgaatcctaccactataacaaagtcatgatactttataggattagttaaagtaatgtatcatcaggtgggagaagaatggctgtgtgaatatgtctgtagcgctgagatttttgtacttgatgagtccccactttctttttgaatgcagtattttcctcatgtgcatctctagcaagaaaggtaatggactcaatgaagaaagctataaaatctgtgctgggaagattgctcaacctttacagcatttgccttctctgtacacgaaagagacagagtcctgatccccagaacctatgtaaatgccaggtgggtgtggcagcctctgcagcttaatacagctttccccagaagctgtcggagtccactagtgctgggtttaattcccagcccagcctgctgcctccttacctacgtgcatgcgctcactcacacgcatccagccatgcacatgcacgtgtggacactcatgcgtgcttatcacacagacacaggaagcaaaaaaacactacagaatcacatttttagcatggaaataaccatattttagaaagctttcaagtttctaatagtattgttccatgattaatattattaagcaagagcagttaaattatatgccagggttttttcttttttgtttgtttatcatttgggagattcagaggaaagaaacataacacagaattaagtgtgagcaactcgctttagttgatgcaaaaaataagtgctccaggatctcccaggaaagtatgaaagagaagatgtggctagggggtgtggaatgtgggagaccaagcaggagctccatgtaaccttaccacttccacaggcagctaagtgtgctgttggcttgaaaacagataaacgtcagtggaacgacatctgtccttacattttgtatatgataacacaaaactaactccatgtaagttaaaaatgttagaagaaaaaaacacacaattactctaacagtcgcttgttgcgataagtctccaacccaaatatgccccggcaatgaaaacacaactcaattaatataaatatatgctgtgcacctatattgggcagatctaccactatactaccatcttctccatataagagatggtttctccaggctgggtgcttctgctccacttttctttttcctccttctcaattacttactttctttcactctctctctctctctctctctctctctctctctctctctctctctctctctctctctctctccctctctccctttccccctccctctctcattttctcccaaagccttcagccccaccttcccctctttctctgcccagtcactggccctagcctttatttcataaatgaaggtgggaagcaggtttacaggaaatcacctgagtgctaactcattccttattcaaagcccctcacaggagaacagaattaacatcaaatataattagccccagggctatctgctgtagtcgctgagctttcaacttacagttaacatatttttagggaatctaagaaagaagctatttccatttataactggagtttaggaattcatatatatatatataaaattcaaaaagattaacagttcttgtgactcttgatatttgaaattaaatctgttaaatacttaagagtttatgctcattactcttaaatattatagtcgttcttagaatttagaaatcactaggtcctaactttaatgcatttacaaagaagacattcacagttaaaatattttgatagttttatttgttttgtaatttggtgtgttttacacgagctgttagaaatagttctctcaaagcggttcacagatgtcactaaattgtgagtggaatccacattacaaaaaaaacccttgaagaagctctcaatgtatgctgttattaaagctctaagtgaatgcgagaattagggagatcttgttgacctgaaacctgatacacatattttgataaaacaaagaagctaggctaagatagatagctcatctgtagctaggggaatggggcatgtggtagaccaagcaagaactcagtataaacctcaaaactagctgttctaactggaccctagtttagtccccagcgcgcgcgcgtgtgcgcgcgcacacacacacacacacacacgaggcagctcacaaatgtttgtaactccaactctgggggatctgacacactcacacagagaaagatgcaagcaaaacaccagggctcctaaaataaaaataaataaatcattaaaaatatagtcagaaaaagaaatcaaagatggcttatcttgaacacacaccagaatatttgcagcccagtgtatttgcagcccacagagcacctgagcagtctagccctggagctcagctgtcagtatggccttcaaccatttacattcaaaatgactcagatgcaggccgtctgcctcactgagtacagccagagtattgcatgttacaacagagcatctctcattgcagggaggttagagtaaactgcaggccgataaagcaaaactaaaggttgttacttccgttggtagggtaacgtaatgcctttctttttcctacctatacttgttaatacttttactgctaatctcaatggcacagaaggccagaaatccatacttttgagacattgatatactcacattctttgttgctatgtgatattttaaacatgatatattaggttcatctctcaaatattaagatggaatttgagctgagtatggtggtttgtgactgttattctagctgtctgtcaggaagccaagggcaggaggattacaaattcaaggccagccttggctatatttttagacattgtcttgtggggaaaaacttagatttggatcagtatctattgaaaaactagtatttcaggtttgtttctactgtatgccacctagctataaaatgtgtcacttaaggtctcagcacagaggttttgccataggttctgccagatctgtggagtagaaaatcatccagtaatgagtgggctgttgatcagttcctatacactgcttttggtggtgctccggacattgttagttttggtcttagttctttgagacagggcttctttgttgtggtggtggtggttgttttttaaagctctggctatcctagatctcattctgtagaccaggctggcctcaaactcacagagatttgcctgcctcttcctcttgagtgctgggattaaaggcatgcactaccagcaccccgtttcctgtatactttttgcagggctatggttagttgacagaggtcacagatttgaactctcatcataatccagtgtccagatctgaggagagtatccttttttcatctagattatattttattttaaaaatgtcttcaacattaaactagtaatgtcttaaggagcttaacaaggacaaagagtagactctggcagcagagctgacccttggcagaagggcagtctgtagcagtcaaaggtgagttaggctcctggctcttctcatgagttagctccttggatgaaaagtattgatcaagtggaacttgtagagaattctgaggaatgagttctcactcttctaagacagttcaaatgtaagctgtcgttcacagagtatctttccagtgtaaactgcttctgattgaactcactgacctccaggccctttgatgatgccaccctcccagtgtcctcagtggctgtttggctatagtcaggagtacttcatgtgctagccgtctgctttgacacataggttaccactttttgtctgttttatgtgagagactgcaaattggcccagatggcttagaacctcattccatccaggctaattgccacttggttccatggctgctttttttttcttttctttttcttttctttttttttttgggggggggggaggcagcctgggggaaggttcaaaacaaggtttctctgtgtagtcctggatgtcctggaactcactctgtagaccagactggtcttgagctcggaaggaaatccacctgcctctgcctcccaagtgctgggattaaaggcgaatgccaccactgcccagctccatggcagcttttaaatgtgcctgtctcctttcctcattgagtactctttacttctcataggcgcgttcagactggatgtctcgttaccaatgatgttcttttatttaggttagcttttgaaactgaatctgccgtgcagtctagcctgccacacctccctaaggatgctgaatgcagttttgcaccaccacagtaaactgtcagatgatattttaaaaaatatgtattcgagaaataattgtaatgattgttttaggggagagaggtcagaatcaactttgatttatgtacatatgatatttgaagccatgaaacctataattaaagttgggtttgggcagcaagttaaattagcttctgtttagtggttgtatagttactataaaatagattcttcaggaaaacaaacttgaaattaagaaacggacaaactgtgtgatttccagatcctagactttaaacctggactcctatgcaaaccattcagccctccaggctgctggtcccttgttttgtttcactgttaacttactgtttctatgtttcatggtgatttttaatatagatgtgtcattacactgtgttctctttggttccctgtcaccatggtcactaagttagtaccagctcctgcttgctttcttaccagtttttccactactctgcttcccaccctcttagacacgtgcgcgcacacacacacacacacacacacacacacacaccccacatacataaatacagacacatactttcaactctagattctatatattaagaaaaacataatatttacctttcagttataatttataatcgatgctatcttcctgcagatgtcatgatttcgtagttctttgccattcaagaaattccactgtgtaaatgtattaccacattttctctatctgttcatctgttgatggacatctaagctggctccatttcctgacttgtgtaatagtgcaacaatggacatgaatcgacatgtattcctctggtgtttcatcatggccttatcttgaaaggaagattgtgatagattttctccagtgtatttttcatctctgaaatgctgagtatctaaaatagctgctgttgtttgggcttaagagaattggagggtggggccccattcaagcctcttttttaaaagcttgtgatacgtagagaaattggaatggtagagctcaattttttgtgaatcaaaacctcactcatttaacaacagatcaagcaatagaaatttctttcatgctgcctctccaccacacacacacacacacacacacacacacacacactacatataatattattgcttaagaggtgatatgttatttaatctttaattttgtctgggaaacaattagttgctaggcatatactaattttgaagtaaccctgtctatgtttgacttacctatactaagccctaggactctagactctatctttcataattagtttactcgttaaatatttctgctataatgactaagggttactgggtatacagagaagatagaacaggcctttaaggagcgcagggttatgtgtgggtatatggagagggtcatagataagaccattatagcataaaattataattacagatatagtattttctacatggagatagcaaacaacttgaatgtgtgtgtgtgtgtgtgtgtgtgtgtgtgtctcattgaccttggcagtcaaaagtgtgttgtgttccaagtacacaaagctatcaagcagtggcagtctccttgatacctcagattgcacttgtttcccctttgtaattgctttctcatttcaaaagagaaaacggtacttggctgttgattcactcagctgttacctagaaatttccactttgaaaggggtgccaaatgcaaactttgtgtctacttctttttctataaaaatatttataatttttttgcatctaattctatacattgtcctctcttgcttcttccataaatattacttacaaaacttttatataaaagccacagtactaggtgctaggattatgagaaacttaatcttttgcttatcttgtgggaggcaaagaatggctgctcctagcacatgcaatccacttttcagtgatgagagaacgtaaggtggacatcttcccacagaacacaggggagaaagcagtggggaatacagcaatagtctactgccttttgccttatccacagaattgtgtagctataaaatgtggatccattttgaggcagtacactattttctgttttccaatgctatggtagcgaggtctaactccataaaccaggctttgaagtccaactgcctcacctcacaagtattcagcttacagacatataccaacatatccaactcttacctttagttcctaagagtacccaaagcagatcttcctaccccaacgaacaaaagttgtaactctaaagagagatttgtttacacttattggaaaaaaagtcatacattatattgttcattgtttttctcctccccaattcctcccaaatccaccagctccctactcaccttacttttaaatttttctttctttctttaaaaaaaaaaaatcaaaaaacaaaacaagaaatagacataccataaattggagcttgaaataaacaagaaaaacaacaatcattttttaaatcccaaacatgtaaaatgagataaaaagtctacaaaaataccactggcttcatttttgttggccatctaggtatgaagcattgttaatacttagtgagattctactccattggaataaagccgttgcttcttttccagtgggaattaattgcagacagtgtcttggtcagggatataaacccatatcattttctcctcttattgctgtaccagtttgaggtcttttccaggctgccacagtctctgcatccgtaagatactctttccttagtcatccgtcacctctggctcctataaatcgttctgtctcctcttcagcatagatctaaaaggatactttttacttgaaagaaatttttgatttaagagaaattcatgatataaagtatgtgtttctacactgaacttctggctgtatttccctatgaggcatttatactgaaggaaaaatcgtatatatgtgtgtgtacatgtacatgtgtgcaaactcttctccatggcattgtacatgtacatgtgtgcaaactcttctccatggcaggtgcctgtacttcccatatttcaaagtcacatgttgcagaatatctgatcatactatgaaccctgagattgtgttatttactgggaaaaacaaacctgtttctagttgtggtttggcttgccctttaaccagtctggctagaatacagacacacccttagtacacaatcaatgaaggtgaggttagtttgtaggaggaaacatccatgtgtgaaagtgatgcctaattgagtagcagacaaagtgacaaatcagaaaaagacttgacagagtaggatatctccgactctcaggagagcagagagggaaaggaagctccttaaggggcagttttaccgggacagttgtacagaggcaggctgcagagagacaagctagacagaggtgaaaacagaacaagccagagaatgcgaagcagccagaagattaggacagattactagagttagtttggggccaagcagagcaaaagtcagaggccaagagagatgccagatagaatcagtcagcttggagagttttgagccagaacagctgagttgagccaggtagccagagatcagaaagatctagaaagggtgagcttatttagcagtaaatctcagaggctgaaacattctaggctagattagattgtatggaggccagaagcttccaggactagcctaggttagcagactgtggcaaataaacctccaagacttacgtcaggtgacaattaggtcaggtgaatgaaagttaaagatgacgtcacgttcagatgtgactgtctaagcgtttgtgcttttatttccctccccactgtgtttcagttctttttcagtgctgtggatggagcccagagctttgcatgtgctaggcatatgctagacatgtgctgttttctgagctatatccccaggtcaggtctgcaggtttgtacacctttgcatatctcccttcacatcggcatctgcttctctgcttgtgcacatcatcagaatactcagccacagttctcagctatgtgtttataacaaaatttctaattcacatggttgaatcagtccaaaagtatgttttctatcctcttaactgccttatccatctttaacatctctcttgttgatggcctttaatttcaactttctttttatcaaaatagcccaaggcacctctgtttgtctagctgagcattactggggagaaaatcccattagcagcaccaagtacttctaattcgttgttagcagcctccagtggggcaccgctgggcttttccccctgatccttccagtctcctgagagctgttttaggccttccctcccttcctctggctacaaacctccaactcacacttctcacttctgtcaactcacttgatgcttcacttgacaaagaaaatgggaattctctttagaggattccagcctggaagcctaaacatatacctggacccattctgatttatttgtgtttttactggttttgtcgggaagtagcagaaaacgcatataggaacggtctcaggcagggccactgttgctgtgatgacacatgtcggacaagagcagaggaaagggtttatttgcttacacttgtacgtcacctttcgtcatcaccaaaggaagtcaggaagtcaaacagggcaggaactaatgcagagccatggagaggtgctgatttgctgcttgcttctcgtggctaactcagtttgatttctttttgtttgtttgcttggtttttttatttgttttctttttattgaatattttctttatttacatttcaaatgttttctcctttccaggtctccccttcaggaacccccatcccatcctcccattcccctgcctctatgagggtggttcacccacccacccactcccttcctcctaccctggcattccccgacattggagcatcgaacaccctcaggcccaagggtcgctcctcactgatgtccaacaagaccatcctctgccaatatgcggccagagccatgggtccctacaagtgtactctttggttggtggtccagtcccctggagctccagaggagctctggctggctcttgacactgttgctcccccaatgaggccgcaagccccttcagccccttctgtcccttccccaattcctccatccaggaccccatgctcagcccaatgcttagctgtgatcatccgcctctgtatttgtcaggctcgggcagggcctctcaggagacagccatgtaaggctcccttcagtaagctgctgtgaacatactggaacatgtgtccttgttatatgttggagtaagaaggtagactgtactgtagcaaatgtttttaatacatctgtacacgtactacaaacaataacagaagactatctttatgtgcataaactaccacaaaattggtagaatacttgcctcgtatccaggaagctttgcattcaattctcatgagcacagaatctgggtgtcatggtaccgtgcctacaatccaagcatcgagagtggattcgggagcatcagaagttaagttcactcttagctgagtagtgagctccaacccagggatggaatatactgagaccccatcttaacaacagcagcagccgtaatgacagtgcctgaccttaatcccggcagcagggatgtagaagctagtccggtctgcatgtcatattccagtccaatcaggacttcataatgagaccatatcgcaaaacaaaagttaaaaaaaaatcacaacacaaggctctaaagtgcccatgagtgtttcggcctccacttctctgtcttctgtccctacccttggattcttacagaactttgctgggtgttttttgttaggttgttttgttttgctttgtttttccttcaggaactatacactgtttactggttcatccctttagagcaatgtttctcaacctgtgggtcacaacccctttagggctcattggacaacacagctatttatattatgattcattacagtagcaaaattattgttgtgaagtagcaataaaaatagttttatgattgaggtcaccacaaaatgaagaagaactttattaaagtgtcacagcattagcaaggttcaggaccctgactttcctgctgtttctgtctcctaactcttggggttacttgggtgttttatcttttgtccaccctgtaagtttttgcaaattttgtattgtgtgtatatttctctgaattgtatcatagtctttatgcagttagtgtactatatatttgtctggatccattagtcaaagaaaacagaaaatattatagacattaatgtggtatacattctgtaagctctttacatgtattagtaatctttgcaagaattccgttaggtaacactgaggcttagacaaatgtcatattgtaaattactcaacttctagaaactaaattctggactctacctcttaatcacagagctgtcccctctcctggcacagttaaatggccaataatgttcagctttggcagaactgatcttctcttaggatataggtattaaatgatgtacagcgtgatcctctggggggggaggggtaatgaagcatcctcagctaaatcctacaacaagctcagtagcattccattctcacaaagtgagagccctgccgcaggaggctgcgatggtcacccaacgcaaacggccctgtcttgagatttctcacaggtgcctttcaggcagatcttggatagattcggaacctgctattcagtggttgctttgttttgttttgttttttttttatgttttcaagagggaagaaactgtcttactcattttagtatgtacaatatctagcccaaaccagacatgtagaaattaatattttaaatttaatttataaataatcttgtgaattcaagatgacctctctttgagtaactattataacctatttagacatgttttattttacttataaggacatttatatgtccgtgtgtgtgtatgtgtgtgtgtgtccttatatataagaacatttatatttccttagaaaaaatcagtacaaaatatgatctattgtgtttactttgaaatatgaaattcttcatttgatttacagacatatgaagaagatcgaagaaacaacgctgaacttctaattcgatgtcaacgtttgaccttagaattagcagacacaaaacagttagttcagcaaggtgattaccgtcaagagaactatgacaaagtgaagaggtaaatagttagggtggccgtgggaattctcaattctcgtactcatcacagtcacctgcactcgtacaacgcacacagtaatgtcctccacttccttctttgtgtaagcgcatgcagcttgatgggtagtgcagatttttagtttatgtagaaattgctaccaccctttaaaatgtaagaaaatagaaccctgtaaaatgccttgagaatatttgctaagtgttattggctagtatgtggtatgtattggtatttgccattatgcctaaatatagtaataatttgatcttgaaatctatgagaaagccgggcgtggtggcgcacgcctttaatcccagcactcgggaggcagaggcaggtggatttctgagtttgaggccagcctggtctacaagtgagttccaggacagccagggctacacagagaaaccctgtctcgaaaaaccaaaaaaaaaaaaaaaacaaaaacaaaaaaacgaaatctatgagagctgtgttcagtagactccttaataaagttgaatttcaaaagaaacattttataattttttattagcagctattaataatacatagtttcattatgacacagacatacatatatatatatgtacatatataatttttctaatgtgtccaccccttagtacctaccctgtgtcccttcctctcctactgatcctctcttcttccagctagttcccaagaagcagtttaaagtagtttgagatcatatgctgatacttacaattgatattttgatatcatattttcttctctaaatctagcaagatgataaataagatgagaaaaggtaaaatcatctgagtaatcccgagctccctgactcatttctggtggctgaaacaagatgagtcacagttgataatcatcaaggttgtgtgataaaataatgggtgttcactatagtattttttatgtttttacttttataataaaaaaattaagaagaaagcaaaaccttgatttaaaaaaataagcaagtctatctgttaaaaataggaccgtaagaaagaggaaggggttccagcccaacctttggtttatgaatgaggtttaaaactatggacaagccacgtatggtggcaacagtcttgtaatcacagcacttgggaggcagaggtaggaagatgatggcttcctgagggcagcatgggctacagcagaaatcctgatccaggactcactgtggctcactggccaagccctgggatcctgggttcactcagcagcactacaaagaataaaaggagaagccatgaaaatagaacttaacctgagcacatacccctgggtaaagtctcccgaatgtgcaaaattaaccagtatgtagatattatgttatctctagaattcaaatgcttctgaataaggaatttgtttctacataaaattctatgtggcaactaaagccatcaacttatatctgagtcacttttgtctcagcagctctacagcctctggcagaacataatgttctcagctttattttttaatttaattcccttgacccagtgtgttctgatttctagtaacaggaagtgctatttcaaagttaataatttgggctgtgatcattgctagttcagcccatgtttcttggcaaggaccagagagagggaaggtggatgagtgtactacactggacaaaatcacattgaaaggtttagttccagttaataccacagtggtcaactgaagaacctcaaccaatcaaatatactagaatatagtatactcctatttataacctaaatacaaaaagaaatactgatgggggctggagagatgactcaatggttaagagtactgcctacccagaggtcctgagttcaattcgcagcaaccacatggtgactcacagccacctatattaggatctgatgccctcttcaggtgtgtctgaggacagcaatggtgtactcacatacataaagtaaattcgtcaaagaaatattaaataataaatactagccgggcatggtggcgcacacctttaatcccagcactcaggaggcagaggcaggcggatttctgagttcgaggccagcctggtctacaaagtgagtgccaggacagccagggctatacagagaaaccctgtctcaaaaaaccaaataaataaataaataaataaataaataaataaataaatactgacaattatagttataacccactgatagactatgaacctatgaggggatgctagcagtaaatggggaaagatctgaatagtacatttcagctaatgaacatctgtgtatggctggacggctgctctgtagcctcactgatctgataatatttgattcagaattgtgactgggatctgcagcctcaggtaaaatacattaagaagtaggccacttgtatcatctaaaaagcatgaagaaagcagttcccctgtggcggacggctgagcttgcaggccaagttctaactggggaagggggttaggagcagctcgtgtgctcagttttagagatgccgactgaaggtttggccgctgttcttaggctcacagttctgggagacagctcatctgaaaggagagctttaaagtacacaggttaattataagccacgtggaagagaaatagtgccctgctgcctgctgcttgcccgtgtgctgctctgcagtatcagttataaattctgacagggtttaccctgagaaggcatgactctatcgttcggttcttttattatttgttaagtttcttctagctgtttaaaagtgttggctttaagggaaggttgaaggtgagatggctatgcttgtaattatagcatgggaaaaccagacagcagtgttgccgtgagttcctgcctagtgtaggccaagtgaggccatgtctgaaacaacagtgggagaaatgaactcgtaccttagagcatatgtagtttactgcttagcgtaacttagggattgacgctttaacactaacgctcacagacacacacagaagccccgaggctcgggtcagcttcctgccgctcagcgcctgcgaatgtggaagaggtgtccgtaagtcacgtgtgtttgtgattttattttcatagtgaacgcgatgctctggaacaggacgtactcgagcttagaagaaaacacgaagtacttgaagcctctcacatagctcaagctaaggaaaggaatgaattatcaaaggaggtaagctcccgcttcaacccactcatgctttatcacatactgaggagcaaatagcccaaggtaaaatcttatttttctcctctttatgtagttaccagaaagaaggaaaaagacagacagagaccagacagagagacagagacagggaagagaaagactactaagaagagacttagcaggcattttttgcattaacaattgccaagaattatctcttcgtaaatggaaactttctagccggactgtgataatgcacacctttaatcctagcatccaagacaggcctatctctgagagcacggtcagcctggtctacagagcaaattctaggatagcaagggctacagggctacacagagaaaccatacctcaacccccccccaacacacacagaggggtggttgggtacaatgcacatagtaaacaaggtaacagaggcagcctggagaagtagcactcactctgaactgattcccataggtcagcagcctgcagcagacagtcaccctgctgcagaaggataaagactacctcaatcgccaaaacatggaactcagtgtacgctgtgcccatgaggaggatcggctggaaaggctgcaagttcaactggaagacaccaaaaaggctagagaagagatgtatgagaaatatgtcacgtccaggcaagactcgttgctttcctagtagtcgatgtaaatgagcactttgtgggtggggcagaagtggtctctgggaatacagtatttaaggtctacactgaggaaatccttctcgtttgtttccttcctaggttttcttttctacttgatttcttagagatactgcggtcttccagtaacaacaaaggcctgcttcttctgtagttaatttttttagttagtatatatttattattgtaaaattattcctatatgacatcatatactgtgttcacacttaccacttccccttactcccttatttctcctaccaacagcaccattgttactttcatcccttctatacatattttcataacataaattctacatgtgagaggattttttaaaaaaaaaatctgccaggtgtggtggcacacgcctttaatgtcagcacttgcgaggcagaggcaggtggatttctgagtttgagaccagcctggtctacagagtgagtcccaggacagccaggactatatagagaaaccatgtcttgaaaaccaaaaccannnnnnnnnnnnnnnnnnnnnnnnnnnnnnnnnnnnnnnnnnnnnnnnnnnnnnnnnnnnnnnnnnnnnnnnnnnnnnnnnnnnnnnnnnnnnnnnnnnnnnnnnnnnnnnnnnnnnnnnnnnnnnnnnnnnnnnnnnnnnnnnnnnnnnnnnnnnnnnnnnnnnnnnnnnnnnnnnnnnnnnnnnnnnnnnnnnnnnnnnnnnnnnnnnnnnnnnnnnnnnnnnnnnnnnnnnnnnnnnnnnnnnnnnnnnnnnnnnnnnnnnnnnnnnnnnnnnnnnnnnnnnnnnnnnnnnnnnnnnnnnnnnncagaagagatcccattgtaatggttctgagctaccacatggtggctgggaattgaactggaaccctagacgagcaaacagtgctcttaatcccctgagccatccctccagcctctcattccctttttttgttttttgttttttgttttttaagacagggtttctctatatagctctggctgtcctggaactcactctgtagaccaggctggactcgaactcagaaatccgccttcctctgcctcccgagtgctgggattaaaggcttgcgccaccacgcccggctcattctcttatttttaatgaattatatatacatatatatatatatatatatacacacatttgtacaaatataccacactttattttattgttgcgtgtatggtatgtgggatgggtggcatgcttgtgtcacagagcatgtgtggaggtctgagaacaattttcaggagttctctcccaccatgggatctaaggatgcacgccatcaagcctgcgcaacaagcgcatgtagctgccgagttgtttgcttgacttccctcgttttctttatccattcacctgttgacggatgcgaggctgggtgcacatctgtgtaatatgctgtcttcctgagtggtcgaactggagcttttcagtttgttaagggaattctatactgatttccacagtggccgcatatttacactagcacacctgtgtaaggcttctttatccaccctactcagaccccagttcttgctaggatttttatctgtttttcatgatagctcttctgacgagaaagaggtagaaactgattagaaagaggtagaaacttggtacagctttaatttccatttcctgatgctccagaggttgagtatctttcatataactaatggccacttcgacttctcttctgaaattgttaaattgaagtgagttggatttgtttagtttgtatagttttttaaacaaattgtcgctatgaactccctgtcagctgtctggtgacaaagctgtctctcactcttgggactttcttatctccattatttgtttccttggccctgtagaagctttttgattgcatgtgatcccgattgttgattctttttattccctgagttattggaactcttttcaaaaatgatggcacacatctatattttgaagtgttttcctttattttcttatagtagctttaaggctctgtgccttacattcagatctttatctatttcccagaactacttgtaacgataagtctgtttcttttaggtaggatatgtgcgtgtgatttattttctttcaaggattttggctggctggctggctggttggtcggtcagttggttggttggttggttggttggttggttggttggttggttggttggttggttggttggatggtccttcagttggttggttggtttcggatttgagcttactcagtattgtgtgagaacaaatgttgttgggcttggggtcctctgaggagtcagtctctccttccctcgtgagttctgggtgtcacactcaggttattggccttgtgcagtaagcaccgtgacccgctacgtcacattgactacacagaacttacttcccattgctgggtggagatcatagttcagtggctgagtgcttcttaatatacacaaagttccgagtttagttctgagaacttcaaacaaaaaaagtcccttgaccatgatgtctttttagtagtttttgaaagtctgtacatatctctagaataccattttaaagaaaatgtccgcatacttaggcttggtatccttctgactgtgtgctatgaaagacgaatgagacggcactcattgcaacgttggttttcagatcccaggtcttggactcagactgcctgcatctcacgtcgaccttctctctcttgctaaatatgtactgctatgctaatagccctcataatcctcagactatctctattgatcagcaaaactaaaatgtcagcatttggtgatggagagatggctcaacggttaagagctgtttttcaacactggctgtttttcagagaacctgtattcaatttccagtaccacactggggctcacaggtgacaacgctgtcaccatctgtaaatccagtctgggactctgacaccatctggccacctgagtactgcatgcatagggtgcacatagatgcaggcaaatatctatgcacatgaagtaaaaataaaagaacaatttttaagttaaaaattttgtctttacctgctcaacatttctgaaacagtgtttttaggtattctaaaatggctaagttttctaaacacactgtaaaagcatacttcatccaatatattaaaatcttacctggagaacaagagcttattttttttttcatgagggaaaactgtgactttttcttttgtctttgcagagaccattataaaacagaatatgaaaataaactacatgatgaactggaacaaatcaaattgaaaactaatctagaaattgatcagcttcgaagtgcctctagggaaatgtatgaacgagaaaacaggtaaaaagggagagagagattgagcaagcctgtttgggattataataattttactgaaattaaatgctgtttttgagacctctttcttcatagttgtaaatataaatttaatgggaatgttaacattctaaattctttgatggctaattacaacaaggcttatcatactttaggtctttcctaatgtgtctgtttcctgttacctcagtttaaagacaagaataagagaaaaattagtaaatgccaagacaccaaaagttatcccaaccatttctcttgtatacttgtgaaaattgaaatagtaaaatatgcaatgttatatattttatgtatcctgaaagatattatatcagataacattgaggaatatttttattcccacagttacttttgaattgttatatgctaggtccccctagtaactgggagcattggaagattaaatgaatgcacttatttcactgacagttgttctcatatgcttactctaaagttaatctggcatttaaactacttcctgctttctgtcttctcttgtttccttcctccttccttcacttccttcttcctttcttcgcttccgtttttccctttccctggtgtcctcatttttccacctaaacacgttaccaactagggtatcactcagcctaaatgggcacaatgatctgcagatgggcccagcaagccctagtgggttaggggtaagagatcagatcccatgttgaccagcttagtgggtagtgattaaacttgctaaaacattagaaaaataaaaggccttagtagaaactgaatttagtttcactggaagtatctgtgggatatccaaatagtagtgaattcacaaatcttaccttaccaagagaaaggtctgtgcatgacagagaactctggcaaagataatatgtattatataaataattactatttagttttgtggttcattcatttctcctaggcatattgtaggcattttgtaggcttttgtttacataaccttaaaatttatggcatagttctatagtacagcatgattttccctaaacaatagccattactatatattattttactatgtacttattgtgacagtttcgtgatgtttcagttgtccatcaaaaaacaagaacaaagagaatcatttcaaatacatcctagcatagcatacgtttacatgtattgactctctccccgactaggagagatagataggtagataggttggcaaagctgactagaaaactgggcagcaggcgaagtcagcagaaggatagtcagagcctgctgtgctcatccccagggctgctctggatcctcattcacagtgaatggaaactttctgtttaggcttcatttctgaagggacacaataccctgacaaaaaacagcttaggagagaagggttcattttagctcacaagtccgtcctgctgggaagtcaaagcaagccccatctgcaggtgagagcacgagagtaaattatgcactgtgagtgctcagcctgcactctcattacagagttctggggcctaagctgggaaatggggcctcccacatcaattaatgcagtcaagacagtcccctcacgcgccaacctgatctagacaacagctcatgtacactcttcccaagtgattctgggctttgttgagtgggcaattaaaactaaccatcataccgcctaaccagaaaattgatgggatcggacccaggcgcttcaaccacagggttttagattgacctgtaaggtattaacactgtgacacagttgccaccagatggcgccaaagtgcagcgcaatgctgtgccggctcggggacaccttagtagcttttgaatgtacaagcttgcttttattgtttttcacttcacaggactctgtcccggtacttatgtgactgaatcctcactatggcagatctgaaatatatctataacttctgtccctttaagtccttaacaaggtgtaagttcttttgaaaccttacaacttaaaatgattaaagaaagactttaatattccttataaaagaacaaaattcaagccaggtgtggtggcacatggctttaatctcagcattcaggaggcagaaacaggccaatctctatgagcatgtgttcaaagccagcctggtctacaaagcaagttccaggacagccagggcagttacacagaaaagctctatcttgaaaaacaaacaaacaattagttttgttttgaacaaggtaaattaagctggctgtgtattacattatgagttaaactatagcaagtctttagtctttagcctcgcctccttatagttgcattaccttttgaagagcgtaagcagctaagagtagagaaataccttggtagcaggaggcagaatgagagaaactcagttcagtggtaagaattattatgtaaataacttgcttactaggtctttgtaaaggctacagtccctcttgcatgttttgaaataagacattttccacaaattgaggtgcatacgttcaacgccagtattcaagaggttgcccaacccctttcttaaaaagaaaagacagtattccatgagtgaaagattttgagcaaaaagactaaacttaggtcctgtccctcacagcacttgctagtggggggaaagcgactgcctaaccgtgagttttctttcctctttataagaatgagctggtagaagggcccatgaggtctgaattaggaaggaaatgtgagaagtgcattgtaagtgataaaatacgtaatgagtataggtatgtttatgccttttgcctgtgtataataaaaatcatttatatgatgacaatttacgtaaaatggttattatataaaagctaactggtacatgagagtgttacattaaagtccactgttaggaaatctagaaggtctacacaatgacttgtttcctaagcacctctgagagataataaaggggcaataaactaaggtgcttgaatttttccagaacacacaactccctggaatgtgagatgttctcatagcacggaaaagaaactcgtgtagtccaggctgtgagtttcttaggcgcattcactaggctctgcttgctgcagagtctggaactgcagcagctcacagttgtgtgaaagggaggccgcagtgcagaggcgactgagcggtgcttctaagtgtggccattagtgcagtgttgcttcgtgattgtatttccttcctgttagtgctgtcttgatcacagtggactgtcccaaaggccacaagaagcctcagtgacaaacatgacatttccatagaaaattggtgctatgaaacagctttctatcttgaatctggatttatttacgagatcagttgaatctatttaacctgcccagtagatgaatttggagctagattacagagattccatcctacattttaaaagtgagtctcctcgttagtgcttcaactagtactcctcttgttcatatcttaccaaataaaatgtataattttgaaatttctgtgaaaatatttaagtctttttctctattttatctttgagtttttggtctttttagctggattattgggagtgaaggggtctgcaggtaacttggtggactgtgagcagctgggatggcctttgttgcagctctcctttgttattaccccatgtgcctcaggtggttcttcctgtcactaatacttactttgcgatgtgtaggctgtcccacatagactgaaggtgagttccccgttgtgcaagagtttacatacacatgctttgtgcatagttctgtgcgcagtgggggagcctgggagagcaggatgaggctaagttgttacaggaaagccttcacagaggtttctaatggactgatcagggctgagcctcgacactgatgcagaagctactcggctgaccacccaccatatttattcactttcattttaatagtaattgctgaccactgtttaaactgcagcaccttgatgaatcttaatgagtagttttgtttcgtaaatttctcatgcctatggacttctcttgtatgtgtgtttaatttcatatgaattggttacctactttgagttcatagtcacagctagaaagtataaaattccatgtaagcactatttttgctacattcaaagaatacctgagggctggcgagatggctcagagggtaagagcactggctgctgtccccagaggtcctgagttcaattcccaacaaccacatggtagcccataaccatctgtaatgagatctggcacccccttctggcatgcagaaggtatacatgcagacagaacactgtatacataataaataaataaatcgttaaagatcgggtaatttataatgaatgggaattgattatctcgctgctctggaagctgagacattcaatatcaaggtgctagcatttggcccgggcctgtttcctccatcctcacatggcagaaggccagagagcatgtgagagagcaaaaggcaggggacttgcccatgttaacagcatcaatcccactcagaaaggcttctccctcggagcctgctcacctcttgagtacctcttatgatgactgttacagcggtgattacatttagacaccactctgggaaggcatggccattcaaatcataaaactaattataatagaagaataggaaattatagcattttcagtcaatagtgatctcaaaacgtttcttctaaaatacatagcttttcttaagcaaattattaaatgagaatttcttttagatacagtagcatgttcctctaacactcgaactcaagaggctgaggcaagaagattgcaaagttacaggccagtcctaagctaaagatttcattttctaatgatgtttgcaccagtataaatttagattcagtccgttgatactaggaattttatctcctcgaaatgagaaaatatactccattctgttcggcactctgttttcacattttgtgttgaggcttttatgcttctgttatgagcaacttttggatgtacttacatatatttaattgtctactacacagatgacattatagtacatgttaaatgtgtatactttttataatattagaccattgttgtatagatagattattaggaacttaacgtaagagattctcattgagtattatgacttatcttgtacttatccaagcaacatctagtttatgctagtttctctgctctcattattatagtaccctcttttgctttaaagaagtagtccaagatatatatatatatatatatatatatatatatatatatatatatacacatacatatacatatgtacacatatatgtatagatagactctagtcactttagcagggatgcccacccttttatttccttttttctatcttcattcttccttccagtgtaccttcccacactactctgaaacagataggaaaattagatgtctacctaagagaagttaataggcaacagcatgaaaaaaatcatgaaaaataggttggcggtgaaatcttagctatatacatgaactttttgcatacgattgtttttaaagttcatttccagcctccttatctgtgggatctctatctactcatttgaccaagtgcagatcaagtagacttggaacaggctgtgtttgtatgaaaggtcccgaggcttccttgctattgcttcttaagcaataccctgcaacttacatagcgtcccattgtattgaattgtatttaacgtttcgagtaatttaaagtatgcagggaggggggtgtctgttgtaaatcatatgaaaaaagatgccattttattttcaagattttagcattcttgggtttaggtgcgctgggctcaggttgatgggatagagccattagaggatattcaaaaactaagctcttaaagatactgaaagacttatattataaaaactttattatattaaccagttggcagctcctgacatctttcaatgtctctaattacattttgttacattcagtttggatttttataatctcagccccattagtttatacatgctatagatagcctctgtcaatttttcaagtttctcctttgaggaacatttgaatccttgctatttgttctgtaattatatttattacatcctctaatgcatttaacatttggaaatggattattcattaattatgtggaagttattgttttatctgtatcagggatgcagtgcatctggtgttttgtcaaaccagtctaattttaaaagagcatggacactgtgggccatagaaacaaatacagaatatgtttgcaattcttttgagcctaattctgatttgacatctgtttgcatcatgatctagtcatgcagcacaaatctcgtaatgatagaatatcccaagggggaaatgcctgtgaaagaaaggagtcctgagaaaggcaacagaatgattcagagcataggatctgggtacagatacagaatagatttacacacaggctccacagtgtacattaaggtgtgaccttggactgagtctttgtatttcaatcctgagacatatttgtgaaatggaaatgtacaagttttgatggatagagttgtgacaagttactagttacttttctcatcatccctgtgaccacatccctgacagggagagagttaaggaaagctgtattctggctcagttattgctcaaagggattgatcattctgtcatcgttgcagacatcgcatcaggcaggagatggacatgggaatcacttttcaattgttgtgataaggcaccatgagcaagacaactgatagagaaaagaatttccttgggacttacagtgttagagagttagaatccatgaccaccatagcaaggggaaatgcagcaggcatggcactggacagttgctgaggactacatcttgatatgaaagtaggaagcagactgacctaactggttgaaacttcaaagcatccccccagtgacattcgtcctccaaccaggctacacctcctaagccttcccaaagagcccgcggtggcctttctaatccaaaccagcacagcatggaaggcagccgcagaggcctggctgttactgagggcctgcattgttcaggacgcaggacgcaggcagcaggcaggaactagggcccgctgtaaaacctgaggacctacctagggatctacttcctccaccaagcttctgcctcctaaaggttccacaaccttcccacacattgcaactagctagctaccaactgttcaaacaaatgaggatggggacatttcaccttgaaccacaccaagtacatatatgaagttcctagaacatctcctaggatacggtgagcactgtgtgtttactgtcggtgttcttgccagtcgaagactatattcaatttatctctctcacacttcatttgaaaaatgctaattgatagtacttaaagaaggataaagtatgtcggttgtagactagttatggaaggtataacagctaaggaagagaacaaaactacatggaaatcttgaagacacctagcgggaaagacaagtggtaaaaacccgggcttgtgaaactttcccctacttactttggtcttgtctttcagaatgtttttttttgttgttgttgttgttgttttttggctatttgtcctttaggttccttatatgtgtgccactttttagaaaatgtctccaaaaaaaaaaaagagccgggcgtggtggtacacgcctttgatcccagcacttgggaggcagaggcaggcagatttctgagttcaagtccatcctggtctacaaagtgagttccaggacagctagggatacacagagaaaccctgtctccaaaaaccaaaagaaaaaagagagagagagagaatgtctcttttgtttccttatgcatttaagagtaaatatctcctcttccatatggccttggaattttgtttatgtcttatcatatcacccagttagctggatgatgcagactaccatttgtccatgacaaaattgtactgttattctctagtcataactctttttatttgattctctgtgtcttgcctttctttctaacactcgttgtgagtagaaaagaagtgtacttagtgaatggggcttctccatctacaacttaaacattcctcttctagtactgccagtgggacccacttggaattctgctccttaaatcacatttaaaataatgaggctatttgtagaaaggagaattggaactaatttgtgatttactggctaaaatatgtaggtcatcttagattaaaaatagataaatgtttaagatacttagagaaattgtgttctctaaaatttatttttcgtggttttttttatttaataatggaatagtttttaaggtcattgcaatcatgatgacaccaaaaataattttttaattgctacttaagaaagcaattctgtttacaaaataacacaaaaaattgttactgttcttttgacaagagtgacctttagatcgatgttttaaactacgttactttcggctcatagctttggctaatgcctctctctctagtagttggtgtgtttgaaatgttacatagtctctgaaccgttgtgcagaatggctgcagtgagtatgggcatggcaggtctcatcactgggcgttggtatccagtgcgcagcacatgcatgcactcaagcctggtgagaagcgctgtgctgtgacgtaagcaacacgggctgcagaggagatagacactgtgtgcaaactatgacagtttacaaactctatgtcccagggccactgtacaaactgcctgtccttcactggactgcacgtgcaatcataagggtttgcacatacagtgagcacatcaggcgtgttaggtcctgtatttctttctctatgttacaactcgattgaggaaggagaatttttttaggttaagtgactcaaataagcttagttttttgttttgcttgtctgtttgttgtttgaccccaagtttcatctgtattaaaacataaagagaaacgcatgcccagtcatattatctcctaagtattccctgttgtgaccttctcccactggagtaatttccttagctgcaaccttgtcaacagttttagttcctgctgtcatcataagtggatgacgtatataatgtgggctcatattccttgagccatgaatattaaccatcatctcagcagaactccatgtagccattcttggagacacactggcttatgaccaactaaaattctgccatagaaaatgtttttatgtctaaggccaccccacgcagcctctgccccatgtcacattgcagaagctgagcagggttaggccaggtcagtattggatggaagcctgccattctggtccccaagccccggtctccatggcaatgtctagtctactgtaggcatggcttacatttaatctgttctctgtggccctctgtcctttggctcttgtcctcccaattcatcaacattctgtattaacttcattcttgtacagctaagactctagacctactgtgtcagctgttctttgccagtatttcagactttattctcatctatgatttctgccatttattctttacttaaagtatttaaaaaagcatttattacctgccattaactcgcttttcttgaggacattacagctacctcattggcttatggtaagactaaaataagataaatatatacacgctgtttagcctagccctcgacccatgaataaaagagctatggggcaaatattctaactgtgggagcagttatgcttccagctggcattccccataagtaactaaaagtaaccccccccagcccagctctgtctagaaacgcactgtttgacagtacctgtactgctgcgtgctgggacagtgctctccaagccatccccagtctctactgagtcctaagccaacttgtgaatctttgaaagatagatgcttatgcatttaaaacaactgagatgcatgtttgaattgtagaaatctccgtgaagcaagggataatgcactcgctgaaaagaaccgagcagtggcagcggaaaaggacgctctgggaaagcatgagcagctcctagacaggtaagagggagagaaaatgctgacgggcttcactgcatagtcccatgcgatgtccttaaagccagctataatagagcgtgcctataattccagcactgaagcaggaggatggctgggagttcgaggccaggacaattcctatctcaaaaaaatactatgtagggtgtgtgtgtgtgtgtgtgtgtgtgtgtgtgtgtgtgtgtataatagaactatggttttatttcagttgtgaaataacttaaaggcatgtgttttcttagtgacgtcataccagagagttccttataccctttcagtccatcttatctactaccctcaagcgtggacaaccctataatttctatccctgttatcagccttgttcttggacctaacgtcagtagaatcatacagtattcactcttggatctgcttccttgactcagcgtgtgtggtgtatctattctgatatagagaactcctgattatttctgtgttaacatattctcctgttggtaaaaaatcctagcacttgcaaggcagaggcaggaaggaagagttcaagactgtcctcagctgcataacaagtttgataaatggtccacctgagggacaaaaggcaatgtcttaaaaagtaaaaataagggggggggggaagatttgtgttttgagcatctagttttaaaacattttctgcttaaaagtattttcaaagaactattaatttgaaatgttctcagccccaccccacaacttctctgataatggtagaattcttggcaccatttgaactagtgtaagatagagtgtgcaggcaagttggtgatcagagtaacatttataccttactgaactagtttaaaagttgttagtacagctaggcatgtgtgcagccctagcacatggaagacagaggcagcatggtgagctggagaccaacctgggaccacatgcaatacctgtttcaaaaaacaagcaactcaaagtccacagtcagaatggaaacaactgccatgtttccaagaggaagatgttaggtttgctctcatttgcctcatttccttttcctgtgtgctgtagactggagaagcctttgcctgtctgtcttttagtctgtgctataattcagcaaggagatttactgctaaataagctcaccctttctagatctttctgatctctggctacctggctcaactcagctgttctggctcaaaactctccaagctgactgattctatctggcatctctcttggcctctgacttttgctctgcttggccccaaactaactctagtaatctgtcctaatcttctggctgcttcgcattctctggcttgttctgttttcacctctgtctagcttgtttctctgcagcctgcctctgtacaactgtcccggtaaaactgccccttaaggagcttccctttcctctctgctctcctgagagtcggagatatcctactctgtcaagtctttctctgatttgtcactttgtctgccactcaattaggcatcactttcacacatggatgcttcctcctacaaactaacctcaccttcattgtttgagattgtgtactaagggtgtgtctgtattccagtcatggaattagagataggtactacaggctgagccacactacaactacaaattggtttttccagttaacaacaaaatctcagggttcacactgtgaccaaatacttgcaacatattagtgtctgaatttcttgtttcctctttgataaggtttttcattgctcagttccttgcatcagttcctgaagtttataagatttatttttgttccttgattctcttatcccttgcagtcctttctttttctctctgaggtctgccatgtttgtatggaaagagtgttcatatttaagagaccaccccatatttttttccaaaatttcctctacgctcttaagctgctaatatatttgacatatattgatttagataaagttaggtttcagtctggatttattactttgtaagttaacacacgtgattcaatttcttcctagtagaggctttagaatcagtggtaatatggcgaacgtgaaagcattaagaaatgtcaggacctgatggaagagtatctgttccttctcagtgggagcataaggctatgggtggagctgataagaactcccatattcagagtacagtctgtgaagtctcttcttatccctccccacccccacccccaccccatttgtcctctctcttcgttacaaggcatgagtctaaacttaaatgccttgttcaaccagagagagtgaccctgggagtcctctaaccctcacaggtgcttcttacctgtacctgaggtcataaataaatagcactgcttggaactttccctccccgcatccacagctaaaaagaacatgtctggaataattttattttctgccttgaaagtcaaaaaatatacatttgcaaggatatatatatatatatatatatatatatatatacatacatacatatatatatatattcacagcggtttgataccctttcttttagtctttttttttctaaagatcagtgacgtgatctgtatagcattgtatcagaattagtaatagctatcattgtcactagtgtaaaattttgtgaaacaatacatactgaaaatatactgagcttttgttacatcaactgctgtagaaaatgtttccatgccatttcacattaaccaaacgactgtcactcttagaggatgcatttctacatgcatgcatatatatatatattagtaatataaaaatatcacaccctaaaattaaccaaacctggtctatacatagaaatggcctcctttgtacatgaaagaaaataaaacttgagacttgtgattcatgtaatttatgtcaaatagcccaaagggttgtttgtgagctttgaaacctgggactagaacatagcagaacaggccaggacatgcccgggcaggcccatcgttaagacattcctgaggctgcttggccataaagataaagaaaatgacatgctggactgtcctggcacctccctatctcccgcccttctgacctaagttaaatattatctgcgtgtacagtctgctgatgtttgaatggaccaatcatgtgaaactgtgccaattcctcccccagccccagccccttttctataaaaacccctagctttcaagcctcgtggtcgaatccactgtctcctgcgtgagatacggtttgacccggagctctgccattaaactacctcgtgtatttacatcaagacggttcgtgatccgaatctggagcagagtgggggtttcctcactaggttccttcagtacacagactgttgcacttcttaaaatctccaggcgagtagatgactgtaagagaaggtttgcttgttcttgtttctaatcctggacaggagcagtgagtatatcacaataactttcaccgtctatgaatacatatggttataataagaactgattaccaggttaaggatggcccttgataatatcagggtgttgaaaattctctattttcttcagtattgttagttatatatgcagaggcacacataaagacaacctgctcagtccacctagcatttcttatatacatggtatttaagggctgacactttgtgttgataaccaattaggggattgattcctggcaatgacactttctcccactctctgcattctgtagttgcctgcagtcctttgtttagggctagggcaccttgacatttccttctgttagcatgtctattgtcatccttggtcaagtctttaaaataaggcctgtgggctagggatatagtccccttggtaaaacaccttgtccctacacacaagacgccccaggtttaacccaaaggcccaggtgtgttggagcacgcctgtaatccgggctctaaggaagtgcagatgagaagagatgctaagggtcatcctcagctagggttcaaggacagccagggctccaggatacttacttcaaaagagggggggggggagagggggggaggaggaggaggaggagaaagcatgcatgaatgaggccttttcttttggcctatagtttttagtgctgtatttcaggtaatcatagctcttcctggaagttatgtaagttttcagactttgctgcgttagcattctctttctccacctcttgctctccatccccaatgcctgcctggaaacacacacattcatgtgttcctgtgtttattactgagtcatttcaaaataggctgcatcgaatgcatttatctcttcagggtgtatttcgtaagaaaagaaatgttcttacagaactccaaaaacatattttaatacaagaacatttgatagcgatgtgcttacaacaatgcattatcccaataatgttctttcgtagtacctttcaatgatcttttaatcacacatagatcagaagatagcttctcgaattgttcctttcttcctccatgaaggttccttgcatgatgcttagtgtgcttacccgctgagtcactcactgacctcatgttactgtgtgtacggtataggctgcagcccaggaacttgtaattctcccctccctccttggcctgcttcaatctcaaacccttcttgatcttgattttttacctaacccattttgctttcatggcatttggttcattttcatttaatgttacaggtatttcatttaaaatacaggtaatttttaatattaaaggtattcaaaagacatgaaagaattatagatttctgttgggctcttctactcacctttaatgctgtaaggtacaatcagcaatggttaaaactcagtggtaccgtgtttcctagctgatttagctgcacagcaagcattttaatcagaatgcctatccgaaactttgcgtaggcacttgaggaacacaactggtaattcacaaatgctgtttcccatgctcaccttccatgtcactgattaagacaataaatctttattgatacctaatactgtgacccaggtgctatgctacggtattgaatacttatgggtacattagcaatatcaccatttctaagagctagtttaaggacataaaaacagttatataattgtttgactataattgttaagtttggtaattactcagagataaattgtataataagaaattatggtagaggcaaggaggtaccatgattgagtagtgaaagaaaggccctttctgacacttgagcataacagccatgccaagtaaattctaatctttaaatatatctaattgtgtcctacctcttaatcccaaacagcactatgttagttcagcctccattttccttttgccgaacgaattatatctttgaactatgtctctgcttttagctcagacctctctggtctcatcactctacacggataactaagaattctaactgctattgacacctgtcattcacactgcttagcttttgcagccatccagggactcggagccttccagactctgtttttgtatgtgctccaccttccacagtgctatctattctgcctgttaggtgtttccaaggaaggaccttttcccttatgcctgtgtcttgccatttatctactaggtaagtagacatcctttcttttattaagactgaacccagtgagaatctatcatatcttgaacttcgttcagcaatatttaagagtcctagaggcatttgttttgttttcaagacagggtttctctctatagtcctagctgtcccagaacactcactctatagaccaggctgacctcgaacttagagacctgcctaactctaggggctttttatgtttatgtttctctgtgtttcagaagacattcctttgcctgtcattcatcgatgtgagtgaagaagacgtctgtaggaagggtgagaatctgttcctttcagtgttgtcagattctccgcttgcgctgtgtcctccctcgcacatgcagcttgggagcgctgtaccttaggttttgagaggactctgattctcctcctcggtcatttgtatcagagccagtgccagtcctagtctccaaagtgtagaaggatgaattctgaagacccttttaaaatatcttcttgttcttaatcatgtgtatgaatatgtatgtgtcattgcctgtggaggctagagaagttgtgtcctttggagttagtcacaggtgactgtgagctccctgatgcaggtactaggattcaaactcaggtcctctgtaagagcagtgcatgctcccagcactgagccatctgtccaacgtccaccattcactaagtcctagcaaactgtttctacttcctcttgaaatattagataggatgtcctggggactgtgcttcaatccaaatactgtgtcagattaaagccgagtgtggcacacctgtgatcctaacagtcaagacactgagctggaaataggccagcttgaattgcataattcaaagccaacctaatgaaatgctgccttcaaaaaataagcaaatttgacacatggacaataacattttagattacagcagtaaatgtaagcttccagagaagcttggtcagtaagtagatacatggggaatgctactagtagttcagcatattcaggcatcttgtttgattttcaggcagtctgtagtttaagttgagtgtgctacatcttgttttcactgtgcacagtacatagtaaagatagttcttttttccacttctctacattagcaaacttgttttcaataaactaactaccataaatctttctgtagtcagttttgagattcactgttagcattccgggtaaccaccatgggaataactgtgaatatgtgtggtatattcatgtatgagcacatatgcgttcagtttgctatgtgtgtgtgcccatgtggaaaccaaaagaagtcttcaactctctttttcacctaagtttgtgagacaggtctctcgctgaatctgaagttgaccatctcagctaggctggctagcaaacccccaggatgcacctgtgtagtcagccgccaagtgcgagagctctatgtgtaccatcatgcctgtctttacgtggtgctggggagccaaactcaggctcttatacttgcacagcagccttgttatccattaagctatcaactttcccagcctcctagaacctcctaggactcctagaaatttgctaagacattttgtggcattttttcatatccatactatatgggccaggataacaaaatgtcagagttactacatcagaaactacagaaaccttcaggatgacatcataaatttcaaagattttcatcagaccccattgtcgccagtttcaggatgaaaaggaggaattctacagtttaccccaggctgacctgagtctggaggcacttcttagcctccaaaatgctgggacaactgatgtgtgccaccatatcctatagaagaaactctttgtacacgagtggagggcagaggctgcagtcacatgtgcacctcacttgcttctctaccttatttctgaggcagggttggtctctcaccggagctcactgactcaggagacgatctggctagtgagttccaggggtgctcctctttctagctccctggcactgaagttataatataccactctgccccgtttgacctgagattggaaatacagctaagggggagcttgaactcctgagccttctgcctccacttcctgagtgctagaattctaagtgtattccatcatggttagcaaaaaaaaaaaaaaaaagaaagaaagaaagaaaagatttttaaggggaattgtgcagtgtgtgtgtgtgtgtgtgtgtgtcacatgtgtgcacccacaaatacatacactggcacaatgcacatgtggaaatcagagaataattgcaggaacttggttttccttccaccacatgggctctgtcatggtttgtatattcttggaccagggaatggtaccatttggaggtgtggctttgttagaataggtgtgacctggttggagtaggtgtgtcactgtgggtgtgggcttaagaccctcaccctaattgcctggaagtcagtcttccagtagcagtctttggatgaagatgtagaactctcagttgtgcctgcgccttgcctgcctgcatgctgccatgctcctgtctagatgataatgaactgaacctctgaacctgtaaaccaaccccaattgaatggtgttttttataagacttgccttggtcatggtgtctcttcacctagacaggctccaaacatcaaacctaagtcatcagatatggtagtaattccctatatccacatgaccacctccccagccctagaagaagttcttaaagtgttcctgtgaagaaatactcagtggttccaagaacttgctggtcttccagggtacctgtgtttggttcccatacctgtgtgtatgtctaaccatattagacagcttacaattgcctgtaactccaaatgacctctcatgatgcacacatacacacacacacacacacacacacacacacacacacacacacacacacacactatatgtatatatacgtacacagaatatacacgtatcaataaaagttttaaatcgttaaggggggcagagtcctcctatgccttctaaattaacagtcagtgtgagtttctgctcacactggaacttgcagagataatctctctgtgcctggctcattccctcttgctgtttggaggtaagtttgtacgtggctggaatagcctccatttaaagattagtgaatggggatagatgtatcagagaaagacaagtctaaaagacaagtttctttattagtatttggaaattggatatagatactcaaacagtaatttttttaatgaaaagaattaacatggttaatataattataagctataaaagatgagaagaaattttttaaagatttattttaggaaccaaaaaaatagactataatatagtcacaactaaaagttttttaagaaagcacaagattcgtgaaactaataacaggacaatagaaaaagataggaagaaaacccctgatgatgttaagatagatagtatagaaggatgatggtgcagttgtaaaagtaatggaagagaaatagtgggtggggagggcaggcaaccaaatcggtaatggaaagatgttataaacacaaaagagcaaataagaggagcaagtgagaaaatcaagcaggggaaaggcaatagacatagggattgaacaggctatatccatgtgtaaaagccagagtatgaaagggaaacaaacagtaaaatgaaagaggggaatccactgcctggttctgcattgagaactcacagactctgggcagtgaggaaaagacaggaaacagtggtttgtgtctcaagtgtctcaagcgtgagtgttagagaacagtactgaagtacccggctgtgtgtgccggttactaaggaaacaagtctggccatgcgggcatcctccatagcactctttactgatttcgagcagtattgattgaccatccaggctgagccaggcactctttcttttctttttttttttttaaggtattttcctcatttacatttccaatgctatcccaaatgtcccccatacggtctcacccactcccctacccacccattcccactttttggccctggcgttcccctgtactggggcatataaagtttgcaagtccaatgggcctctctttccagtgatggctgactaggccatcttttgatacatatgcagctaaagacaagagctccgggatactggttagttcataacgttgttccacctataggattgcagatccctttagctccttgggtactttctctagctcctccattgggggccctgtgatccatccaatagctgactgtgagcatccacttctgtgtttgctaggccccggcatagtctcacaagagacagctatatcagagtcctttcagcaaacgcttgctagtgtgtgcaatggtgtcaggcactgtttctagacactaggatgttgggttcaaaactggaaagtcctttgtcttcataacagcattcatatgacacaaatcagaaaatatacaaatcagcagtatgtaaacaccaacattgcaaacagactgtaattcagaaagcttgtgctctgaatggtgggaggggaccaggcagtgaggacctaggattaccctgaaaattgtaattcaccaatcagagcaagtgttgtagaactcataaatcaaaatggcaagcgtgtaagaacaggcagtgaacttttagtataaaattcaaccctaactaccattattatgttgcttataaaaggtaatcttaattgataaggataatgtataatgtcagcatattaattcaatgtaagtagagacaatataaattgtaactaaacttaggggctcgatagcaagaggaaataatggttgtagtaacatgtatagtattatatcccaaatagttacaattataattatgtctttagtatatcatagtctggtggttagtctaagcagcttgatacagtctggaatcatccaagagactctcagggaaaacctgtctcggtcaggttccctgtgagcatgtctgtaggagatcagcagagctgtactaattggcttgagaaaacatccctgtctggtggcaaaattgcctaagtgagggagggatcctgaggtgtgtcagagtggagaaagagctgagggcgagcatgcgtgtcgtgacctcttgactgtaacctgctgtatttccaacctgggctgcctcgaccttttttctttttctggcagtctgatggtttccttctcccgggaggtcactttattgatgtcagactttgtgtggacacctcatctttgtagcccacaacagcctagaactcttagacccaaggaatcttcctgccttgtcccacccaaactggatgctcttgaccatgggcctactttgacaccttgactgctttgcagtgatagactaacctaaatatttagcatataaccaaaagagaatgggggaaaagcgaggccagatcttataataaatgacagctagtaaagcatgcagaaagactgaacataactcttctaacaattataaatgtgacacacttactaggtatctgtgggaaaggaatacggcctgagtaagaaacgattctttcatggccataagcgacatgagatcattaataatgacatagtttaggaggcaaaaaccgtgcaggttgtaaagctattctaaaactgcttaataatatttgttttaaagtaattatttggagaattagaatttctagtaacaatgtgtatgcagtaaaatatgctcaagcacgtgaggcctaaacagcattctcagtggtagaacacttgcctacggaaagactataggttagaggcccagcactaactgccaaaaggcaggcaggcaggcaagtgggcccttacgtgcctgatatccaagaaagaaggagttcaccatcctagcttgggtctcagatgtgccaggatatcttggttgtttccagagaagatgatcacacttgaaaaacaagacttgaagctggacatggtgtacgtatctgtcactcagaaggcaagcatagggctgagatggtagggtagtgagttcaaggccagtgtgggctactctcaaatcaaacacaaactataaaaatggtttagagaaaggaaatcatttagattatggaggtactcaactccataacttcacaaactgttttacagttcctgctcaattcaaaattgataaaccaaggaataataactcagaaagctcaaacagtctgggctggtgctgttaatcagtacttttttattgaatacagcttaacagcagcacatgtaatttagggctgtacgtatagatttaggtgtgtctcaccagttagcttaagaatgtgttggtagtacaacccagatttctggttccttcctccatagtctctatttaagggggaaccatgttttggcctaagcccaggccaactccttagaggcagtgtatgaatcagtggagagggcgagttagagcaggtgaatgcacgagtggtgagaaggaagccagccatgtgctcttctgaggacttcttaggagcaacatcgtgtttgaaagttatagatgatacacagtttagtatacacattttgggatgtttttagagtcgtgactgctcagtatgaatgtgaactaaagcagagaggacaaacatgtacttatacagctcgccttataaatgctactgccccattgctttggagaaattttcataggtttacatttgataaacataccgtagactcccaaatagtgtataaaaaattgaaatgcagctaacgaaatcaactcataaaaactaaagttaaaagtaagatattttccacaattattttcaaatatgttatttactggaaggcaagtccagagaattagccgggatgaggtgtgagtgggtttctcccacttgtaaatgagctcttatttcctacagtgtatattttggtctacaatgactcattttcaacatggttccatttaactcctaatacatttttaaacttggcaggcatatttagatgaacattatttccaattttagacacagcttctaaattatattcaagttttgcagtcatcatgaagagttctttcagtaaaaaggaagtagaattgattggaactgtgtgttttcaagaaggaaaaaataccatctttaaatttcattatatataaacgctaagtgatatctgaaaaagctgtagttgtgacttgtgtagtagtgtttagtgaaagaaggaatcgaaaagaagtcataacttaccttggatagaacgcgttgaagtcttcaccatgcctagcactgtggaaatgttatacatggataattttttctgatgctgacattggaggtaatatttacatttttattcagactctattttggttacaaaacacagaacctattcttgctgagcagagagctacaggagtatacaagctatgactgagcccaccactcaggcagagtagaggcaggcagatctctgtgagcatgaggccagtgagtctctgtctttgtctctctctgtctctctcacacaaacacacactcacacacacacacacacacacacacttacacacaaagtaaatgggtgtgtggaggatttttatctttttactaaggatgtattttatatttaccatttattagagcagtataaatttctaacatacttaatttggctgacctatttagtattcatttttaataatatactttttgacattgtgacctttccattctgccttgctatatttaatactttaaagttgataaaacattggagttgaaaaaaatcatatcattgacaatagattaaaactcacataaactcacagagactgagacagcatgcacagggtctgcatggggctgcacaagtcctgtgcctgtgcatatatactatggcttccagtttagtattgtacagggctcctgagtgtgtggatgatggatctcagcgcctaagtctgcttcttgagcctttcctcgagctcttttcctactaattatttgtttaatcccgttccaatgtgttagttttggttttatcttattatattatattttattatctatttgctgatgacctgaaaaggggatggacctggacaggaggggaagggaggagcagagggagggaaactatcatcaggatgtattaggtgataaaaagatccattttaaacaaatgaaggaaagaacatattgtactcgggcaagacagtgaagacgctcaaaagacagtgaagagtcacacagtcacacgaagcggagccagggttaagaaagacatctgaccgttgttcctgttgttgtttggttttatttgtttgagatagtgcttcatgtagcacaggctagcctcaaacttgcttgtagccagtgcttgaactcctgatctctctgcttgagccacccaggttgtaggattacagttttataccgctgcctctagattaaagaagtattctctctgtttctagttcaattctactgcctgccgtgaattacattaagcttatgaaacagagtgtgaagcataactatgtatgatgtcatacagtaccagtaaataaatgtgtactctcagctatactaagtcctcaaatactctcaacacagcaaaactggaaaccaagctttgtgccagcttgctccttccaaacactctagggaagtcctcttcttagtttttcccacatctggtactccagatgttccttggactcattggcttgtggccacatctccactccagtctctgctcttgccttcctgtgcttcatatatgatccatgtgatgccatttattacctactcagataatgcaggtcaggctcctcatcttcacctacttcatcacactgaagaaaaaaaaaatcgcttttcctaataagaaggtatccccatattccgggactagaacctgggcaggtcctgtgggaagctgccactcagctcacacatggaccttttaatcctcatgaagtctagttagatgagtccattaattgaaatgagattttatttttaaatttaaccagaatttttatcagctaagtttagaacttattaaaattctatatgtgtataaattatcttctgaactttaatgacatactatttaacaaattatttactaattgttgaacaaaatgccacctcagatacttgactccagtttgtgtgacttatgacatatatttattggaagttaaaagttaccttccatctgattttttatgtcattttttgaggtgtctcatgcatcctagactgaccctgaaattgctgtagagctgggggtaaacttagatttctaatcctattgcctctgtctccacgtgctgtgatgccaggcacgtaccatctgctaagacaattttatgcagtgcttgagatataacaagggctttttacacgctagctatttatgctagctacattcctagcccaacctcccataacttttaatgcatttgttacaaagagttgaacctttttaacagacataatgctaaaataaattttgaggcaagctatattgacttcattggttttacagtggtaaggatagaacccagggcttgggacatgctgggaaaatcttcttctattgagcatcatcccagcctttgatattttcacacagaatagtattcctctgtcttggttagagtgagaagagacgccatgaccaaaacaactctttcaaaggaaagcatactaagggatggctcacagcctcgcagatttagtccgttatggtggtgagaaagaagcatggcagcctactgcagacctggggatggaggaactgagagttctacatcttgacccaaaggcagccaagaggaggttgtcttttgcaggcagccaggagggatctgaaattctgcactgggtggggggtgagcatgaagatctcaccccacagtggcacacttcctccaacaagaccatacctcctaattgtgcctgtgggccaagcattcaaacacatgagtccgtttttgtcatcgtgggaaccatgtctgcagcatacaggcagacctggtgctggagatgtggatgagaggtctgcatccagattagcaggagcaggaagtgagctgaaagtcacccctggtaacacacttcctccagcaaagccacacctactcccaaaaggccatagctcctaatagtgccacagttccacatgtctgtaatccccacattcagaaggctgagagacaggatattgaaattgggtccatctgatagagtacatagttcaggccagcttgagctacatagcaagacaccatctcaaaagttaattagtatattgctgtaaatgaagaaagagagtcagtatataattttgtacttcatacaattactagaattaaatggaatttattatgcaatttgaagttctcaatgattactctttatcattatcatccaattagttgattttaaagtaagatatgtaggtattatttttacaaccataaaagttatggaggttagaataagaatggtcctcataaactcatatatttgaatgcttggtcattagggagtgattccacccgtcagggataggggacgtgtggccttatcaaggttggtatggccttgtggagagagtgtgtcacagagagagtgggctttgggttttcaaatgctcaacccaggctctttagctccctgtctcttcctgctgcctgtggatctaggtgtagaactctcagctccttctccagcaccatgtcttcctgcatgctgccatgctgccaccatgccagtaatggactaagcctctaagctgtcagccagccccaatgaaatgttttcctttatacaaagccaccatggtcatggtgtcttcacagtagtggatcacagggtaaggcagaagtagatgaccttctacctagctctggtcaaggctgcttcatgcagctgaataggtaactccccattctaatgctttctaaagaagtgtctttcataaagcttaccgcatactctagctgctagcaattcaagatattataggtttcgtgaattttcacacttaaaaaatatatacccatgtcttagggtttccattgctacgaagagacaatatgaccacaacagttctttaaaaagaaaacatgtaattgggctggctcacagttttaggggtttagtctgtatcatcatggtcaaaagcatagccgtatggaggcagaaatggtgcttgaggagcccaaagttctacaactttgtctgcaggcagcagaagggaacagtggttcataatgggcagagcttgaggataggagaacttaaagcctgcctccacagtgacacactaactccaacaagaccacacctcctaagagtgccactctctattggtcaagcattcaaacacatgagtttagggggtccatacctattgaaaccaccacaatccatgtgttttttttgtttggggaggggggggttggtttggtttggttttgtttgttttttggtttttagagacagggtttctctgtgtagacctggctgtcctgatgtcctggaactcactctgtagaccaggctggcctcgaactcagaaatccgcctgcctctgtctcccaagtgctgggattaaaggcgtgcgacaccaccgcctggctcaatccatgtgtttttaaattgatgtttattaaaattttcatgaaaattgcacttcattttacaaatggaaaccttaccttacttgcaaataattcatacacatatgaagcacaatgaaatgtgagccttgagatagcttacagaagcagcttacaggaaaattaaactagagtgagtagtctcgcacttgcgagaatggattgttctgtgcagtagtgtgtgccacaaaccatgctcttccttacttgccttctaccattggtttaatcatatacttgactacaagtaaagagatgttaaatgagaaatacatgtagtaaaactccctgatttctatattgatcctaaagaaatgactcttaataaagctatatttcaacataaaccaccaaatctttaatttctgaaaaactgaagctatgaaacaaatgctcttaaaagaaatcagtgtgtcgccgggcagtggtggcacacacctttaatgccagcacttgggaggcagaggcaggtggatttctgagttccaggccagcctggtctacaaagtgagttccaggacagcctggtctacaaagtgagttccaggacagtcagggctacacagagaaaccctgtctcaaaaaaaaaaaaaagaaaagaaaaagaaaaaacgaaatcagtgtgtcagccagctttccgtttggttagttcctgtgttctttagagtccagttaaccagtaatgcctctctcatccgtagcaagtatcccccatctctaggcctctcaaatgttaagtgtcttagtgttttattgcagtgaacaggtgctggagaagtagctgagaattcttttttttttttaaatttggtattttcctcatttacatttccaatgctatcccaaaagtcccccgtaccctaccccccccacccacccactccacttcttggccctggcgttcccctgtactggggcataaaaagtttgcaagtccagtgggcctctctttgcactgatggctgactaggccatcttctgatatttatgcagctagagacaccaccagctcctgggtactggttagttcatattgttgttccacctatagggttgcagatccctttagctccttgggtactttctctagctcctccattgggagccctgtgatccatccattagctgactgtgagcatccacttctgtgtttgccaggtcctcgcatagtctcacaagagacagctgtattagggtcctttcagcaaaatcttgctagtgtatgcaatggtgtcagcgtttggaggctgattatgggatggatccccggatgtggcagtctctagatggtccatccttttgtctcctagctgagaattctataagaaagaggtctgagccagccatggggagcaagccagcaagcagcactgtttccggtgttgtgcagcagctcctgccttcaggctcctgcagtgatgtggaagggtaatccagatcagcctttccctcccttcccacgttgttattggttgccgtgtttcaccaccaccatagggaccctaagacagcccttattgtgttggtgtgcctgtccttagttaccagtttcagatggtacaacacttacagcttatatattatgccatggtaaagctacacgttatgacttcttaaccatatatttttagggatagaaaacattagagtagtattgaattgaattgctcaaatgttttataaactttcaatggaatgatagctatagttaattcttggaattcatttgtgtacaattatgaaaaagtcatgaattgtggaaaagttttgacttatgtcctttttatgaattttatttgtaaaaatttaatttgtatttaaaatattttgataatatttacaggtatatcttcacaaacccagacatgatggtgcatgtttgtaagcgcaaggcctgcagggcagaggcaggcatgtccccagggcctcagtagccagctgtattgtctgatggggagctcagggttaagttagagaccctgtgtcaagaaatcaggctgacagccacaaaggaagatagcctaactcaacctgtcttccatatgcacatggacaggcaaagcagctgcacctagatagacagctatacatacaacacacgcacacatctttctcactattttatgagcactttttatttttgtttggttttggtggggatggagcttagagttttctctctgctagacaagcaaactgagctacatccccagctgcatcctttaactgtgcatctaccacagccgggggtactaacctctgtgatggcctcttccctgttcgacggaagtctttgtgccttgactctgtctctgctgccttcactcatcaatgtgtgatgaacctaaagttcctttcctgttgactccagatattacattgctcgttgtctctacattccatgaaagtcaccattatgaagtctgcaccttactgagcacatcaacagtaaaaagcagcatctctcccatgatgtcagaggggaaggtagaggcgactgtggtacactcagatttctctttgttggtggcaaaattagaggtttttatgttcttgtgagtaggccagtgactcaattaggctattaaaattgtctagatttttgtactgattttaactcaacagagcatagattctagcacattgtttgttcttctgtttttcatttgttttttaagtgtttctagaatattgtcatgtctgtttgtaccaccattatcattatccaaactgtacatttttagaaacattaatcttttttatagctccgtcatacctaacctgtaatcatttctggtttctcttttcttctttccctataatttgcttttatcttatactgacacctagccctggaaatgatcatcttagctgactcgctttaaggattgccttttatcagatccgcttttgcgttgtagcctgctatttacctagttagcaatttaattttacaacacctgaaatcattaggtaatatgactgcttttttttttcctcagtaaaaattcattatgaatttccagtatgcccactgatacactggatgctaggagtccagatatgagctagacaagatctctatactccaaaaacaagcattttaattgtactggacagcattgccaccattttccttgtcctagctcacttaattgcccctaacttgaacttgactagtattatgttttgttgttgttgttgttgttgttgttgttgttgttgttgttgttttattttgtcccttgagattttatttggtctaaggcagagccattaaggtcaattcttagaaattctacagatagttgaggtggtcttcccaggctagactagatgagacaaagctcaggggtcattctttctatttggaaagaaatcttgggctggtgagatggctcagtgggttagagcacccgactgctcttccgaaggtccagagttcaaatcccagcaaccacatggtggctcacaaccatccgtaaagagatctgactccctcttctggagtgtctgaagacagctacaatgtacttacatataataaataaataaatctttaaaaaaaaaaaaaaaaaaaaaaaaaagaaatcttgtgaatgctccaggttaccaaaccctaggactctcatttctaaatccccagtgaggaattaaccagttctcctgcacttccgggccatttcttgcctaattaagatttatagggcatgtcttttctccagaagtcatcgtgactcctttagtcgctcttaagtttttccacaccttgaactaggatttccctccaccctgccattgatagtgcttcatcataaaagcagcctttagcatgcttctgttttctttttcttttgatgggggagtactaaggactgaacctaagacacagtgtttatttggtcagcaagaaagcaccaagctataccccccacccgttgtgttttgtttccctttgctaagtctcactcactaagttgtccatgctgacttcagacctgtagtcctcctgcctcctgagtacctggggcagctgggataccagcaagtctagtggtggttttagatcagtccctctgttggtgtagcccggtctaaacacacagtgaaaggactgtgggatgtagctgagtgtgaggcacagatacagtaaatgctcttggctcaaaggagcgttcaggctgaaatggtcagtgttgtcatgtttcccaaaaagacagactagacagcagcacaccattcaaatactgttataaatgttttaccttaaaagttttgtccttcatgctctggtttattttaaaacagcattcctttcttgtatttctttcagttaagtacttttatcttcacatacccggaaaacctctttttctttgcctcaactttactaagttattaccaatattactacatagtgtttattttattaatgcccttacaattttatttgatcatgatatgatagatgcatcgaattactctaaatgcgtgcttgaaattctcataagtccatggtacagttgttaaacatactcagcgttttttaactcggcaaaaaccatctctcacattcatttaagaattagtttgtaagccaaaaatgacagatgtagtattacagctgggaagctaactggttgaagaaatgtaaatgacagaaacatttgcacaaatatgcaaccgcctttcaaatgcttttcttgtaccctgtagcagtcattgttgccacgttgacgggagtttttcttacctgattgcttttcagttggaaaattccatagtgcagcagggaagacctatgtgaccagagctttgtgtttgtgcttaagctcctgtcattgctcctgcaattctcaataaaatgcttgacctgctttctaggtaggtttagaggaaagtacaatatcacatagtgttttctattttaacatcagcatgaagtgaatccctataaacagtaattattttttagtcttagtttgagttttttgagacagtatttcaaatacctcaggctagccttgaactcactatgtaactaaggataaccctaaactcctgacctccctgcctctacctgccaaatgctgtgattataggtgtataccaccagggctggctatatataaagtcaaaacagatcatttaaataaaaatacttaatatctatttttaaaatttgccttatcaaaaattgagttgctttttataaaattacctctaaatcaagccgtatgaggtaaattttccttctgccctcctttaccaagatatccttttacaatcctattatattttaggatatgttcctctttctcataacttaagttgttgtgaggatagtgacctccacgcctagtatcttactgtgtgtgaagatatgaatcggtcttctcctttgaaaagaagtatctcagagcatgaggaaacaaatgaggatattctctactaaagttagagcattagtggctcacaagctttaatctgtgccgacgctgcttggtggggtccatggagcagcctggtttcttaagacatgtattttggtttggggaatgttgagatgattcagaaggaagctcatcattttaggcaaataaaccagggctgtttggtaagagggaactaggcgagaaatggggggtggggggctaaaggtctgatgtagaggatcttcttctaatacaggcgaaaatcataacacagatgaaaataccactgggaaaaggactcactgtggaaggttttgttttgctgtgcggggtgtgcatgcatgcatatatgcatgcctgcgtgtgttttcctgaggactgagtgaacactaggcaagtcctccactactaagtagatgtcttcaacacataaaaatacttttgtaatttacatcaaagggaaagctggcaggcactatttgaaggtttaattcataaaatatacatagcaagtattttataggtacattttatatgaaaatatttgtgaagatatggggaagctataatttatatgcttctagtagcattttaagttgatatagctattaagttaagttgtacagtataccaaagggttcttttgtttgtttggggggcgttgtttgtttctttttgagacagggtttctccatgtcgccctgtatgtcctggaactgtgtaggcaaggctggccttgactcagagatatgcctattctgccttctaagtgctaggattaaaggtgtgtgccaccacacccagctagtgtaccaacatctctgtgacccggcagagctacttgaggattggagcattgacttgtgcttagcaggcagttactgcagtgttctctggagcagtgcaaacatccacagcatgtctgtcaacagcactctgtaaatgtttctcagcttagaattagcaaatgagatgaaatgaatcatgactgtattcacattgtaaactaatgtaaaaggaatgagcttcagacataaagtagtccaaggcacataaactggaaagggggttgtagataaagaagagtaatgcagtatgatgccatctgtttaacaaaggagactggagtccgtcctatacgtgacacatgcatgtttggggaggagggagtggttagaaagttacaaagaaagctggtaactgatggtttctacaaggagaaatggatttgaaagtagtggtaaagatgtctgtaatgtttcaagtttttatcctaagaattgatttagttacttacagagttcaagagaaatttggtaaattgcttgtgctgtgaagaaggccaataatggaaatacaagcagcagtcatcctgtgaatgagagctgactctcattgtattagacaggttagcatctgccctcatcagcccatttcctacagtaaatccactgaaggctggagacccagggacactggcatgttgaagcacagccttcaagaacagaatggttttcagaaggctttgaccccaattgcttgtagcattagaactaaaatccctagtcaggatttcccagccctcgtcaagactgtgaggcacaggattctttctgctggcccatccatgaagccctggaaggccaccctctgccctgagactgcctgcctcatgctgccactgtgcttagctttgccagcctgcctgggctcagtagctcgctccagccctttctttatactcagttgtcctgctgtgtacagacagatgctctatctcagctatcttatggcctgcttccaaacaagaccagctgggaaaggtcctactgtgtggtcatttcctggttctggtgattgcatgactattaccactgaataaaatatattttgggtactttgttgtatactgcttgtctacaaaatgagattaggtcattgtgcttcaaatccatgtccagttttaatgtagtataagccatgaatattttgtagacaacgtttaaaaaccagttatttctgctatttgtcatttgtttgaaaaactgagattaaataaaagattcataatagggagaacgaggttcattagcagggtcctcaagtcagtattcacttccattccgtacggaagggaaggttgggaggtagacgacaaagcccatgcttcctggtacagtggccctgtgtaatctcagcactagggagacagaagaggaggatcccgttttcctacacggtgagttccagggccagccaaacctagaaaagctcctctctcaaagagctggagaggtgaaaggtaaagcaaaacagggaaaggtctcagtaaatgttcctaggaattatgaccttattgcaagattttttttccttttcttaatttgtgctgggtatgctgtgtgcacaattgtaggcaggtaaaagaggttaagggacaaattcaagagttgttcttctggtgctatctatggggtttgttctgttccgttgacacacggttttttagctagcgtgctaggttgcctgaccagggagcctcaaagatctgcctttgttggcctctccagtgctgggatttccagcataggccaccccaccctgctctgttacatgggttctagggatggcacttgggtcgtcatgctttgcagggcaaacactattgtctgggctctccccataggcccaacttaagatcaagattcctgccgtttaacttcctggcaaccttctgcataatactgtattttcgcttctctttccctttgttcttctagctcttacatttctgttaaacagcctttctttgactttttgttattgttttaaagtagtgtgtaatggataggtggcgcttatgaaaactaaagagctgattataagtatatcataaggacaaatgcagccaggttccaggcccagatagctgtgaggacaggtaagcattctgattccactgctgtgaggacaggtaagcattctgattccactgctgtgaggacaggtaggcattctgattccactgctgtgaggacaggtaggcattctgattccactgctgtgaggacaggtaagcattctgattccactgctgtgaggacaggtaagcattctgattccactgcagagtagacttgatctcttcaggttgctttgctgaagtagaacagcaaacacaaaggtgttgagatgtggacagtaccggcttggttcaagtaagtgtacagattaagaggacgagatgagaggtctgagtcgacagagaagaatgcagcaggttgcgtgagcagaacaggttaagtgggcgttccctgaaactgcaggctgagctctggcctcatccgccccgcccctcagttagaccggcttgtgtagctgctgtgctgatgtagcgcttcccagttccacttagcaaattaaaggcatcaagactattttaaggacataatgactgaaggcaaattctttccctagttaaacaccatgaagataaattgatgctgaggattatcatttggttttagagaagctccgttaactaaagtagaatcagatttttcggagacatttatcattttttgttggatagttgtttaacctttgttaagttatattctaatgttccaatggagtctactactttggttttactataggaagagaacattcgagctgcaatgagtgttcaggttctggttgtaatgcataagcgctcggctgattgcctgtttgaagctgccactggtatcaaaaccacccagtgttctcagcccaggaaaggcacatttttcagcttaaccttctaaaacaaattaccctaaaggccaatatctcatagcctcaatgacttctccatatctcctttagttgtatagtttatatatgctctgaagttagcatacagagaccctatggacattatgtgcttgctgtggggttgggctttttttttttttggagacagttttgtgtaacttaggctgtccttgaacttgctatggcggctggggtgaccttccgttccctcccctcatgctcccgcctccccagtagggcattacaggtgtaatgcatacagacgtcatgcatacgatttcatgtgttttaaggatttcactctgaatacagtttaacttaaggagtgaagaagcgtctccatttcagtaaaatactgaatgaataaaattttgagcatgatatatgtgcatcactccacacccactgtaatgtcagtaataaatcagacattgataagagttcacagaaatgtggtgaaggtgtcctgctcttcactgctactgggatataaaatggtacaactatattgtaaaacaagttagcaactcctcaaatagttaatagggtttcatttttttaattagatattttctttatttacatttcaaatgttatcccctttcctagtttcctctccgaaaatcccctatcgcctctccccaacccacccactcccacttcctggccctggcatcccctacactggggcttcgagccttcacaggaccacgggcctctcctcctattgatgaccgactaggccatcctctgctagaaatatagatagagccacaagttccaccatgtgttttctttgattgatggtatagttccaaggagctctgagggtactggttagttcatattgatgttacttctgtggggcttcagtccccttcagctcaatagggtttcattttaactacaagaaattgaaagcatgtttattaaaactttcatacaaatgttcatacccaagagcagaaacagctcaagtgttcagctgttaaatgtgagatatccatagagtggcatgttactcagccgtgagtatttggattcatttagctgagacagtcacagaaggcaaatccattgcagcaagcactttacctggtgagctgtccctccaacctctaaaacagtattcttaataaaatcataagaatattttaaataccttttaaatatattatgttagagctttctaaaatagcataaaagctgacttttccttaaagccttactgttgcaggatatatatgtactgcctagaactttctctagcatatatgcagcatgctattaccaaagataagtgtgctagaagtgaagtgggcttgagcatggacattaaggcccgtgttcttagattacacacactcagagagagtcctggttgctctcttttctgtgtgtcctgtttgacctggagaatgtccttaccactcatactgcttgggttttcacatttgctcccgtcttcccccgaaattatcagttccttaagaaacaaagaacaaccactggtctagtggatttccattatctcttacagttatagctcaatatttgaataaatgaattttaataatgtacataacatagtgctagattctttgtgaaaaaacacagggatgtctgcttctctttctcttaggacacaatcaatacagaatattttcacacttagaatatgtggtgatttgaatgttaattataaaaatttttattatagttatacttatgaaatgaagagaatattcctatctgggttgttaaatataccatttaatgattggtacatcattttcttataatattcaaatgtatattttagtatgtgtttccatactatgcataactaaattataaaagcttttctgaataactgtaaattattcatcatgcaatcgtaacatgatggggtagaaagtgggactgaggtttggcttccatcagctgtcactgctatgcgggaggcctcacccctctcacccctctcacccctctgcctctttcaggtacagagaactccagctcagtacagagagcaaggtatctgagtttctccatcagagcaagttgaagtcctttgaaagtgagcgtgttcaactcctgcaagaggaaactgcaagaaatctcacgcagtgccagttggagtgtgaaaaatatcagaagaaattggaggtacctttatgtaactttccctggacataagcatagagtataaactttgtaaggatgatagttgtgtagaccttgtttctcctagaggaccatacctcgtcctcacaagaaaataaggaactaaagctaggtccagtggatgggatcccaagcactctgaaggctgagacaggagatcacgtgtttgaggctcatgtagccagccagaactaagtaataagtccctgttttaaaaacagagaagtgaaagaaaacatagatgaatagcagcagtatgtgcatcaaaaatgactaaaattttatttaaaaaattggaaaaggtttcattcacactaacaaagagcatataattattgagaatacttatgtgagaaaagtgaaattggcatgaagaaaactgtagaactataatgatgaatataaaaaacccaccatctttctgggatggaatagttggtattttatgttttccagttttcatcaagaaaactgtttctaatgttttaccatttaaaatgttacaattgtttgcttttgcccctgtgagtgtgcatgcttgtgtgcatggtagaaggcatttggaagtcagaggacaacttacagcttatggtagtcaggcctttccttccacagtgtggaacttgggaagcagagctgtttcattggcccaattttcagcatacattttttttacccaacaaagtagttctgtagtacaagtggaagaatgtgtaggtaaaattcaatatttttacatctttttctgaagaaatgagaggaaatatttattacattttaaaatagatggtattttgttgttagcttaacttaagcacttcatgtttttagttttcctcactacatatgaacgttcctagttatgaaaacatataattataggcaaatacaaaaatgggagataatgaaactgaaaattaatcaattaaacgcctttcctgaaaaaaaataaaaataaaaataaaagcctttcctggggctaaagagatggctcttccagaggacccaggttctattcccggcacccacgaggtggctcacagccaattataactctagttccaggtcctctgaaagagcagccagtgagtgctcttagccactgagccatttgtttctccagcccctgttaagatgtattttcagtatgtaagctcctttgttctcagatgctcactgaagtgttatttatagtagtgaacaacttaacactctagcatattactgtaatcacattaaaatcatttgtgtgtgatagcatcaattgatattttaagggtataaatacatgaaatatacttagttcatagtagatggatggatagaacctctcatacaactctattcattgactctttttaaaatgttcttattcggttggtggcatagttcactggcaaagctattagctagcattcacaacaccaatccccaacaccataaaggaaataggttaatttttttaacttattatgattgtgtgtgtgaatgatgtgtatatgtgtggacattttgccactgcacatttgtaaaggtgggaggacaactttgaagagttgattctttcccatctttacatggattataggaaattacctcaggtctccagatttaatacagcaagtgcctttagatgccacgctgtctcaagccccatgttagcttttttaaaaacaaaggaggtatataggattcaggcggttgtacatgtaataataatcaaagaaaatatgcctctttttaaattctttttaaaggattttttttttaagaaactctttctttgaacatagtggaacatgtgtcctgttatatgttggagtgacttttgggtatatgcccaggaatggtatagctggatcttcaggtagaactatttccaattttctgaagagctaccagactggtttccagcttgcaatcccaccagcagtggaggagtgttctttctctacatctgtgccaacatctgttgtctcctaagttttgatctttcattctgactggtgtaaggtggaatctcagggttgtattgatttgcattttcttgatgactaaggatgttgaacatttctttaggtgcttctcagccattcacgattcctcagttgagaattctctgtttaactctgtacgccatttttttaaacttggttatttttgtttttggaggttagcttcttgagttcttaatatatttggatattagccctctatcagatgtggagttgatgaagatttttttttcccaatctgttggttgccaatttgtcccattgactgtgtcttttgccttacagaagcttttcagtttcatagggccccatttactgattcttgatcttagaagctgaaccattagagctctgtttaggaaatttcccccagtgccaatgcgtttgaggctctttccagctttctcttctatttgattcaatgtatctggttttatgttgagtccttgatccacttagacttgagccttgtgcaaggtgattaaaatatagatctatttttatttttctacatgcagaccaacaagttagaccagcaaaatttattgaaagtgccttctttcttccattgtatgtttttggctgctgtatcaaaattcaagtgtccttaagtgagtggttttatttctgggtcttcaattccattccattgatcaacgtatctgtctctgtaccaataccatgtggtctctgtagtaaagcttgaggtcaggtatggtaattcaaccagaagttcttttattgttgagaattgttttggctatcttgggttttttgtttttccatgtgaaattgagatttgcttttgcagtctgtgaagaatcgtgttggaaactcaatggtgattgcgttgaatctgtagattgcttttggtaggatggccatttttattatgttaatcttacccaatccatgagcatgggagatccttccatcttctgaggaagatggaatttcaattccatcaattgaatttcatattcaatttcttttttttttttcagggagtggaagttcttgttatacagatctttcacttgcttggtatgagttaccccaagatattttatactatttgtggtattgtgaagggtgttgtttcactaatttctttcttagcccgtttatcatttgtataaaggatggttactgatttgtttgagttaattttatatccagtcactttgctaaagtttttcattatctgtagaagttctctggtagattttttggggtctcttatgtatactaccatatcacctgcaaataccttggcttcttcttttccagtttgtatttcattgatctcctttttgttttcttattgatctagctagaacttcgaatactatattgaatagatatggagtaggcagccttgtcttgaccccgattttagtgggattgcttcatgtatctctccatttagtttgatattggctgatggtttgctatgtattgcttttattgtgtttaggtaaaggccttgaattcatgatatgtccaatacttttaacatgaaggggtgatatactttgtcaaaggttttttcagcatctaatgagatgatcatgttttttctttgagtttgtttatgtagtggcttacattaatggatgtttatatattgaaccatccctgcatccctgggaggaaatctacttgattgtgatgaatgatggttttgatgtttttttgaatttggtttgtgagaattttattgattatttttcatcgatattcataagtgagattggtctgaagttctcttttttgttggtctgtgtggtttaggtatcagagtaattgtggcttcatagaatattaggtagtgttccctctatttctattggaataatttgaggagtttttttattagctcttctttaaaggtctggtagaattctgcacgagaaccatctgatcctggggtttttttaatggcttctatttccttagaagatttgggactgtttatctgatcttttaaaaaaagatttattcattttatatatatgagtacactgtagctgtacagatggttgtgagttatcatgtggttgctaggaattgaactcaggacctctactcactctggccccgctggctccagcccatatatttattattatatgtaagtacattgtagctgtcttcagaaacaccagaagagggcattaaatctcactatggatggttgtgagccaccatgtgttgctgggaattgaacccaggacctttggaagagcaatacaatgctcttaaccaccgagccatctctccagcccagttttgttgattctttgtatcatcctctttgtttctaattggttgatttccatccctgagtttgattatttcccacagtctactcctattgggtgcatttgcttctttttgttctagggttttcaggtgtgctgttaagttgctagtgtaggatcttttcagtttccttcccagggcacttactgctgtgagttttccttttagcactgctttcattgtgtcccataagtttgggtatgctgtgtcttcatattcattgaattctagaaagtctttaatatcttttcttatttctgccctgaccaggctatcattgagtagagagttgttccatttacgtgggtctgtgggctttctgttgtttttattgttattgaagtcaagccttaggccatggtgatctgatagggtacatgggattatgttgatcttcttggatttgttgaggcttgtttggtacccatgggttccactacatatgtagcacaggattgccttatctggcatcagtgggaggggaggcgcttggtctgtggaggcttgttgccccagcgaagggggatgctagagaggtgagatgggagtgggtgggttagtatgggagtatgctcttagaggcaaagggaagggggaatgggatgggaggtcttcccagaggggagactgagaagtggggacaacatctgaaatgtaaaaaaataaaataatttaaaaatgtggcagtgagagagagataaaaaattcaggtgacaacagatgctggcaaggatgtggagaaagaggaacactcctccattgttggtgggattgcaagcttgtataaccactctggaaatcagtctgacggttcctcagaaaattggacatattacaactggaagatccagcaatacctctcctgggcatatatccagaagatgttccaaccggtaagaaggacacatgctccactatgttcatagcagccttatttataatagccagaagctggaaagaacccagatgcccctcaacagagggacacagaaaatgtggtacatttacacaatggagcactactcagctattaaaaagaatgaatttatgaaattcctaggcaaatggatggacctggagggcatcatcctgagtgaggtaacccaatcacaaaggaactcacacaatatgtactcactgataagtggatattagcccagaaacttaggatacccaagatataagatacaatttgctaaacgcatgaaactcaagaagaacaaagaccaaagtgtggacactttgccccttctcagaattgggaacaaaacacccatggaaggagttacagagacaaagtttggagctgtgacgaaaggatggaccatctagagactgccatatccggggatccatcccataatcagcttccaaacgctgacaccattgcatacactagcaaatttttatcaaaaggacccagatgtagctgtctcttgtgagactatgccggggcctagcaaacacagaagtggatgctcacaatcagctattggatggatcacagggctcccaatggaggagctagagaaagtacccaaggagctaaagggatctgcaaccctataggtggaacaacattatgaactaaccagtaccccggagctcttgactctagctgcatatatatcaaaagatggcctaatcggccatcactggaaagagaggcccattggacatgcaaactttatatgccccagtacaggggaacgccagggccaaaaagtgggagtcggggggtaaggggagtgggggtgggtgggtatgggggacttttgggatagcattggaaatgtaaatgaagaaaatacctaataaaaaaaagatagaaaaaagaaaaaatgttgcagagagagaaaagaagaaagaaaagaaaagaaaagaaaagaaaagaaaagaaaagaaaagaaaagaaaagaaaagaaaagaaaagcatgctaaaagcatgaacaaggcaggttgagcagcgctgatggagcactgcagagctccctccactgtctttgtacagttttgtgctgactgcctagaacctgaccccgagtaagtctctcactgctgcctccatctgaacccttaacaagcaaaggttcattttattcggcatatgtgattaccgagagagtattgcataagttcagttaacgcaacttggaaatcagcgtgtattctttcctctgttgtcctcggctgagctgtgtcttcacatttctgtggttgaaagagaaaagacatgagcagagatctccgcaccaccgtgtgtgtgtgtgtgtgtgtgtgtgtgtgtgtgtgtgtgtgtgtgtgtgtgtgtgtgtgtgcgcgcgcgcgcgcgcgcgcctttagctgtggacctgaggaaatctgaatcctttcagagatctccgcaccaccgtgtgtgtgtgtgtgtgtgtgtgtgtgtgtgtgtgtgtgtgtgtgtgtgtgtgtgtgtgtgcctttagctgtggacctgaggaaatctgaatcctttcagagatctccgcaccaccgtgtgtgtgtgtgtgtgtgtgtgtgtgtgtgtgtgtgtgtgtgtgtgtgtgtgtgtgtgtgtgtgcctttagctgtggacctgaggaaatctgaatcctttcaacttctgtcattctcttcttccactgctaggttttaactaaagaattttatagtctccaaacttcttctgaaaaacgcattaccgaactcgaggcacagaactcagagcatcaggcaaggttagacatttacgagaagttggaaaaggagcttgatgagataataatgcaaacagcagaaagtaagtctgtgtgccctcccccacccacccagggagagtcttttttttcttttcttttcttctccccccccacccccctgcccagacagggtttctctgtgtagctctggctgtcctggaactcactctgtagaccaggctggcctcagaaattcgtctgcctctgcttcccaagtgctgggattaaaggcgtgcggcaccacgccggcctagtcctttttttttggctacaaaggaaaggtggaatcattgctaaaatttcttggtatatatttattaaaaatgtaagtgatttaaagaatattctgtttttaatattacttgatgtaaattttcagtagctagactcaaaaaacagataaagtattaaacatttacttttgtcaggaactaatccaaagccttagcaaaatgttttgcctcaggactagcctcgtagctcactggtggggtgctctgcctactctgtgcaagctctggattcaggccctcacacagcagtgaaaaccaaaacagaaacaccaaaagccaatagtgagtgtggtgacacctcctataatcctcccctcaggggaaggaagcaggaaggtctccaggtctgagccagcatgggctctggtgtgtgtttctgggatctcagaactcagaaagtgggggctggagcatcaggagctcggggtcaccctccacatccttaagttcaagggaaggaagccaaggccacgtgagagcttggcacacagacaaaacagaactcacctttgtcaaatgactctataacttagtcattttataatatatagtccatattaaaagtctttgaatctttcagaataacatacctgaattacttgctctataagaaagtgtggcttatcaggtgatgtaatcccttaacatcttctaaaaataaatcaacaaatacaaccacagtgtactttaatatgcttcacctctctcaatgtgcactagtccttcggaatgttcttggaattcttaattcattgttgtatcttttattttgacttctgctatgctttttaaagagaagagttatttcacatcataccttttactacttttcagttgaaaatgaagatgaggctgaaagaattctttattcctatggttatggtgctaatgttcccacaacagctaaaagacgactaaagcaaaggtaaaatcgatatggatttatcttatctactcaagctaactgtaattatatagtacattctgataatgtgctgagttgaatgataaagctacttgttcttaatattcataaatattaaagtgctcacaaagtaggacatggtaataaccatgaacttcatctatatttaagtgaatttaatggttagtagatgtgtacattagaatgttcatggttttagatgcaataactttgaaagccattttattttcacattaatttcagataagtacaaatgctttgtagcaataattttcaggctagaactaattgaactaccttcaatttctatatcccttgtttattatttatgtgcctatatttcttgatgtgtatcttaacatgtaatatattattgtatataatacatactaagaaatatggagaaagcatatacatcgcagttgaaactgcacagaagtgttagttccatgtcttatggctgtgaccaaacacttgaaaaagagcagcatgaggaaggaaggagtgcttggctcacagtttggggacagttcctcaaggggtcatggcagcaggatgattagggagctgctcacataaatcggcaggaaggaagcagagtgggatgaatggtgccgcccacatttagggtgtgttacccacctcagttcatctaatctggagattctcttatggacttgctaagccttgtctcccaggtgtttcacgatcctctgaaattactaattaatataaaaaataaatcacagaggctagccccaagtgatggtgcacactagctccccaccaccaggctggctgatcttagaacttgactcctgagttctacctaagctaggtaatggattctagaccatcctatggtcaacagagaaagaaggaaaagaaatagggaaagaagagaaagggatgaaagacaggtgacaggagaggaggaagggaagtagaaggagaaaaaggaaagaagagcactttgggcttgccggagaattggttagaggatgtcctaagcaggggtgtggttccctggcatttccactccaccagcaggcacctgcactgatcttgctccctagattcatccagccttacagcagaccctgattgctctgcttgctaccacctccactcctagtgtttctaacagacttgcaaacccctccacaatgtaccccacatcagcatcctcacttgcctctgtactccatgtgacagtttaggactcacctccacttgtaaatatctattttctctacggcacagtaaagtgttttggtttttttcagccatcatttcccatctaattttctcacctagacagaagctcttcatgtcagcagcgtcatcttattctctgaccttcccagctcagagtaatatacctagtgattttttttttatttacctgaatactcaaggtttcaaaactggtattattttatgggggttaatttagaaattcagaaatgtacaaaagaagaaagtccacgttttgatacttttatagatattttcaatgatttttttaaaaaggcttttgttgttgttcttgttttgtttgtttttgtctattccagacagggtttctctgaatttgcacggtagaccgcactggccttgaactcagatatctgcctgcatctacctcccatatgctgggattaaaggtgtgcaccaccaccaccctgctaaggtttttagtgtgtgtgtgtgtgtgtgtgtgtgtgtgtgtgtgtgtgtgtgtatctgtgtctgtgtgtacattttcatttatgcatatgtctttgcaaatgtgagctcaggtgcctgtggagtagaaaagcgtgcatcagatctctgagtgcagctatgtgcacatcagtctgaaagagtatgagctctcctgccgctggacttgcatcctgggaggtgggaacaaaacttaggtctttgcagagcagtgtatgtatgttcttaaccactgagccgcctctctggttccttttgtagatagtttggaagtgatcgatacaataacatgaagagataatttatctttatgaatatctaaaacagtataggttatcattttaaaagaagtttaaaaatacttatgttgtttattgattaaatatttgaaaaatctagattataaatagataactagaaaggatcagtttacagctagaatgattaattatgaataattaaatatttttgctattataagcttcctttccaatgttgaacattgaaattaaatgtgattgttgcttactttttaaagcagttcaggtaaccagagctagctgtgcgttgtttgtttgatggggttggttggttggtgtttgttattggggatgttttgttttgttttgtttcgatgcccaaagatttaaagagccacaagtgattcatagtgcaaatgatcttgactgtccaaatatttctgaagattctatcactgagctatctgtgtgccctgaacaagtgcctaatgggtgtgctattaatacccttgccagctggtgccaggcattcttctcatggtgagcccaaggctattttgaggaagtgcttctcaggtcatctaaactgagggaagagagtgtaagtctagacatccaaagaggacatgtgtgcatccctacacttagtcattcaacaggttttattgagtacctactacgtgcagcttgagtagtagcgcctaatccactttagaatctgatgcacttttgaagattgcaaaatcaacacttggtttcttaagggctatttgtacagaaagcagttaccttgtgccctcttgaaacttatttacttaagacaagaaagaacgatgtagcctttagagaatctgtacttattattttttcgcatttgaaattaaagcactgcagatttaaagggagttatagaaataactcacagtcataagtggaatgctttataacaaagtcatcatcatacatcattgtgaggacatgtattacaaagtgtataccaaggaacctatttctcaactgctatgtatctactgcattcttactttgatttaaaactttatgtattcaacagcaaatattaaatatggaatattactatttaactgattataagtatttattttatttttaaaattgagtaaattgatggtaatcccattattcaaaatatccaatcagaaatttatacaaatacatgattttccttgtatttttttggacattatatagttttagtagtttagtttttaccttagtatcctattgtgaacatttcttatgtatgaatattcttcaaaatatactacctaagggactaagggcaacagttggaatgcaaaagataaccaagggcactagaaggggtggtcagtaggagaattaaacatgagaacaaagactaggggcacacatgcctgacacaaactgaagcctgtcacattgtatgctaaccttaaaactgaggttcaaagtcattttcagtagctaccaaaaactttgatttttaggctttctgtcaatttgtgataaagcccatgaaaaggactaagaattggctcttgctgccaaaagaatattttaagaattaaattgaaaaaaatctatctggacagtggtggcgcacggctttaatcccaccacttgggaggcagagtcaggtggatatctgagtttgaggccagcttggtctacaggacagccagggctacacagagaaaccctgtcttgaaaaaccaagagaaagagggggagggagggagggagggagggagggannnnnnnnnnnnnnnnnnnnnnnnnnnnnnnnnnnagggagtgggagagagagaaagagagagagagagagagagagagaatgagtgaatgaatgaatgaatgaatgaatgaatgaacatgagaatatttggcataatgtaaatgctaggtggttatatcagttaaggtgttcttaagtcagttgcacagttagaaaaatcaagattctaaaacttctccctaggcaccaaatgaagtaattgaattaaaatatttttgttttaaattttttaaaagatttataagtacattgtataagtatataagtacattgtagctgactttagacacaccagaagagggcatcagatctcattacagattgttatgagccaccatgtggttgctgggatttgaacccaggatctttggaagagcagtcaatgcccttaaccgctaagccatctcaccagccctgttttaaaattttaatgaagcctttaaaatacctgaaacatggacatttggggtgggttggtttgtttatctgagtccatttctgggcactgcactgctgatttcctgtgagctgatagcagcagattatgtttctcacttgatgtagaattctaaagtttctgataaatgtgtaagcatacagtaaagtatcttgcgctttgaggtctcctgcaagcataaataattgcagaccttcttaaaacactttctggtacacaatgtggaaagccaaaagggcttatataattgaagtagattaaaatgagattaactttgggacatgataaaacttgaaaatgtgaagtgtttttgtttgagtagcaactgtgtgaaagtagcaaacccggctttctggtcgtgtgctgtttgtgctcctgcactgcacggtgacactagacactctgttttcggagtggatcactcttcctttgtgctgatccagaggatgggagatagtgtagaacagttttcatttgtaaagttttctgcctgttggatttgtctgattctttcctatattttttattttacttttatgtgtataagagttttgcctgtgcatatgtctatgctctacatgtgcctggtgcctgtgtagatctgaagaggtgtgagatccaccaccatttcattcccaaactctaacacctttcatcagccttgaatgggatttctctctcaggatgcctgaactaaaaccaggcgcattcttattaggacactgcccttgggctaacactaaaacactggcatacagttccttccttcagtgtttacatcatctgactttgtcactatatctgcataagagcagtttgctaaacaagttgcccaaaccagtgagcagtgtactgtacttcacttcctatcaccaagtcactgtcctctcagaatgctgttaaacaggtgactggtaacatggcattgtttttagcatctctcattccttaatagaaaacagaggttttatttgcataaaaatttcctctcatctatacttctttgtaaatgaatttgactgtgttctttgttttataagcattattacacaaatgttgtcaatacctccagcatacatttgttgataaattgttatttagaatgaccctaaagagtatgttctgtgagtaacaaaaatatagaaactacacccaatatgtatatgtgtatatatatgtatatatatatatatacaatatatatgtgtatgtgtgtgtatatgtgtgtatatatgtgtgtgtgtgtgtgtgtatatatatatatatatatatatatatatatatatatatatatatatatatgtatgtatgaaaggtaaggaagaagataaaagtgtgattgataataaccagggtttttaattagacaaaattggagctagtaatgtaaaatatggagttcacaggcatagttaaaaccaacagatttaatccaaaagcaacattaagatatgtgactacacttgggaggcagaggcaggcggacttcttagttcgaggccagtctggtctacagagtgagctccagggcagccagggctacacagaaaaaccctgtctcagaaaacaaaataaattaataaataaataaagatatgtgatatgtgactaaagccacttgtgatggcacacacctttagtcccagcactcagtaggcagaggtcagtggatctctgggttcaaggccagtcggtaaacaaagaaaattccaagacagcaaggaaacaaggagaaaccccaaactatacagttgttatattaactaacaaagaaaacatgatcccctccctacccctgaagggagaggttttgtaacctgaattgttttctgtataaaactatgtcaaattctataacagggttaatatgtaaattttattgttgatatataaagtattgtttttagagtaaaaaaataataaaatgtaaactatgaattcatttataagaagaaagttgtttagaggttctctaaactggagtggagggttaagaggcatttaataaagaatggaaaaagacaaaggatggctgttcttgggggtggtagaaatggtctcaagttctgaggttctgagagctgcacaactctacactttaacttggtgtttattgtgctacttgcatattattatatattttagtacataattttttagagaattgttgtcaataaatgaagactacttcgttgtcatctgtaatgtcaactacttggcagataccatgccagaccaatgaatattagatataggcatactgttgagatcactctataaacatttatgaaaacttgtatgttttactttgaatgaacagtccgcaggcattaatgtgttagatgatatttagcagagtcttacatgaattcttcattttgttctgtacagttatttggttgaaaaaaattttttttgttttgttttttttgtttttcgagacagggtttctctgtttaacaatggctgtcctggaactcactctgtagaccaggctggcctcgaactcagaaatccacctgcctctgcctcccaagtgctgggattaaaggcatacgccactgctgcccggctatttggtgaaaattttaaaaacaaacaaacaaacaaaaaaaaaacctcttgttggactctgccatagtgcctgggtttggtggttgtctatgggatggatccccagatgggacagttttttgatggtcattccttcagtctctgctctgaactttgtctctgtaacaaccaccaaannnnnnnnnnnnnnnnnnnnnnnnnnnnnnnnnnnnnnnnnnncagattccatcaagagcttgctgacaagagcctgatatagctgtctcccgagaggctctggcagtgctgacaaataccgaagtggatgctcaccatcatccattagacagagcacagggtccccaatgaaggagctagagaaagtacccaaggagctaaaggggtttgcagcccctatgaggaacagcaatataaactaatcagtaaccccccagagctccctgggactaaatcaccaatcaaacaaaacacacagagagactcatagctctagctgcatatgtagcagaggatggcctagtcggtcatcaatgagaggagaagctcttggtcctgtgaaggttctatgtcccagtataagggaatgcctgggccagggagcaggagtgggtgggttggggagcagcgggagggaggagaggatagggggttttcggaggggaaactaggaaaggggataacacttgaaatgtaaataaagaaaatatctaataaaaaaaaaaaactcaacattgtgagaagttgaattctgtgaattctccattcataggttaaattgataggctaactaatatagaacatgaaaatacagtgcaggtcttgagaacagcatgatttctcggcattactggtacttcttaaaaaaacattgtttcctttcagtccttggaattgtttacctagagagcaaaggctacacagagaaaccctgtcttgaaaaaccataaccaaccaaacaaaccaagggcagttatagagtgcacagcacggtgggctgtgggtatgtgcctgttatcctaacacttggactaatgtacggggagcagggattgaggccagcctaggatacagacttaagaccctgccagggatggggacataaaacactggcaggaagggggttcctttagtacagactctgcctgtactgtggtcattctccgcatgttattacacgcctcttccacctccacatgcagtaggaaacctgttggattatgttttgtattacaaaattcataatattgactaggataaacactttccaaaatgtaagcttttgcacataatattcaagtaatttcaaataataattttaataattcaaataatttttgcacacagtattcaaataattccaggtaataattttaagtaatttgtaatttggaaacttttgttaaaatgagaaagctataaatggctctcttttctggcaagctagtaacataatgtaattctgcctcaatgggcagggctaaaaaccatagtcaagtaatcagtataccacacttaccatatggaaatgtcagggttgctaaagtcttgctcgtgtggcgttctttgctttgtattgccattgccttctgttactatgtgtgttgctaggaaaggatgggtccaccttctagcatacaaatacctgttgtgtgtttaggcagcattctactttggtgtacataagtgcttttcattttatttacctagtgtccacttggcaagaagagttcttcagttagaaaaacaaaattcattaattttaaaagatctggaccatcaaaagaaccaagtaagacagctttcacaagaggtgagtagctgggtcggaagacccagaagcaaggcgctcgcttgcctctgcatgccctgttaccaccgacagttatttgctgagcactgtgaaaataagctggttgcaaaatgatttcaaacttgtaaacttcactgaatgttgagactcctaaacagcttagcgtgtatggcaaagcagaacaggagactgaagaatgcccagcacgaggaagggtaaagtaggcgagcccagagcctcagcctctgagaatatccactagcgaaacaactttggctgatttgttgacatgtttctcactgacatatgatttttttaaatacttgaaatttctaaagtttctgtttaattgaaaagactaatcctttttaattttttttttgagaaaagtttttcatatactatattttgatcatgttttcccctacccggattcctcccagatctccctactcacccaaccttgttttctgtctgtctccaaaaaagttaaaaacagagacaaaagcaaagcaaagcaaatcaaaaaaatcaaaacaaaacaaatcaaaatgaaacaaatagtccacaaaaatacccttgagttagtttgctttgtgttggccaactactactggcacggggctgcactgagtgtggttggtatagccagtgagattctattttttggagttgtatcagttgcaggtagtttcttggttacgactggaagcttgtcttagttggtcttaatattgctgttttggcttacacttccatattgctgttcatcatcaaaggaagttaggacaggaacctggaagcaggaacaaatgcaggcatcatggagacgtgctgttcctcgtaactatttcaatctgattccctatggaacccagtaccgccagtccagtggtgacctcacccacaataggctgggccttcccacaatagtcactaactaagaaaatgttcttggaagggctggagagatgactcagtgctcaagggcactgactgctcttccagaggtcctgagttcaattcccagccacatggtggctcacaaccatctgtcatgggatctgatgccatcttctggtgtgtgtaaagagaatgaccttgtacattgtactcacatatataaaataaataaatcttttctttaaaaatgttctaagcctatcaagaacagaccacatgttcaccttgcccactcagtgttgacccactggctggaacctgtgcaggtcttgggcatgctgccacagtgtctaagtgctatatgcatcatcatgcttggcttctttgttttcttcggagcctgttcctttgtccatatagtatctactgataaggcacctttaatggtaagaggatctctacactaaactttgaaatgagagtgagaatcaccagagattaaggtggacacaatggaatgtggacagccgccaacagtgatgatagcaggaggcgaggaggggctctgttgcctgtgctcactcgcatctgtggcataggacgaaccgtaggctgcctttatgagtaaccgccaagccttatgaggaaaggttttcagcaaacactgttatgagacttagactgtctaggtttagttacacctgtgaacttgcacagtgtaaagtaacatttcgtggacatttgactacatgtttctttgcctttaatagaattgacctttgtatacagttatgtaaattttaattttgattgcatttaacaacgacctcacaaaattctacaaatttactgttggtacaagtcaggtctagcatattcctaggtacaaacaggaataaagtaatcaaaggaaaccaagcactaaggctcacatataaccctagcactcaataggcaaagggagaaagagtatcattaggaatccatggagaacctaggacacaaaaagaaaccaatctcaaaaaaaaaaaaaatcaaacaaggaaagaaagaaactgcggcccttgggaggggctgaggcaagggcatttctgtgagtttgagaccaacataacttgcataccaagtgccagggctcctgttgtggtttccttcctgttggggtaataaacaccatggtggagaaagctacctgaggcaaggacgggcttatttggcttacagtttacagtctttcattgaggaaaaccaaagcagaaacctggagatagaaagtggagcagagaccacagaggagtgctgctcaatggtttgctcccagacttgtgcttagctacttttgtcatccaacctgagcccagctgtctgcagaaggaacctcccacactaggctgttctggtccaaactcctctccaagctgactgattgaaactggcttctctcagcttctcactgaattgctctgcttggccccaaactaactctggcaatctgttctaatctcctggctcctccttattctctggctagttctgtcttcacctgcaaccctgtctctgtaaagcgatcccagtaaaactgtctcctctttctatccccatctctctttgtacctcttaagtcacctctctttcctgtctgtcctttgtgagttgggcatctcctatctctgactcattccttcaatctttctcttactcatcattttttatgccccacaattagacactttcaaacatgtctgtttccttctacaaatcaattttaccttcattggattaaggtgttttctaaaggtgtgtctaaattctagccagggagatgaaaggtgtgtgattccacctggatcacacaagacctggaaggtctttcaatgtggtcccttgtcagagcaatcatgttgctagattaaaatccctctacaaggcactctaccttggaggtctcaacccctcttaaatttcaccccttggtgtttatgttgttgttattcacgtatttgttactaagctgaggatggaacccagtataaagttcagagacagagctatatccctaacccagataccacctatcttaatacagtcacagtgacaacttaattgaaatatgaattaatgagggcctctcaaccataggcatatgttttcaactcatttcctctgatttttagttgtatcttttggcttgatattgttgattggcaggagttctctgtattctgggttgcagtcctttagggcataagtgattgcaaatacattctcccaggttttgtgttgtcttgcatcctcttgtgactgttccttgatgtatgaacttcttttaattttgataaagtctaatttcccatttttatgttttatgattcatcattggtttttaattcccaggtgaaacttacatgtcataaaattaatcattgtaaagtaaaccatcttacagtcattcagaagatggtgcaatcacttctaactagttctaagacatttcttttactaggtaataaagcctgtgcccactaagcaatcactcactcttacccacccccagcctctgacttccatctgtctaaacagacagaccaactggcttctctgtgtgtttacctactcagcagtgttggataaacagaatcatacaggttctgaccttgtgcatctaacttcttttattgagcttactgttttctaggttcatctacattgtatgtagcatataccttatactttgtgacattttactaataaataatattctgttccatgtatttgtacatttaccatagatttatagttcattccttctctggtaaacattcaggctcttcctacctttctgctattgtgaattatgtttcaggaacaattaaatgtttgaatcacgttttcagttaagtggacatgggattgctgggctcagttttgtttctggaataactttttgtccaggtaaaatttgaagttagctgggcctggcagttcaggcctatagttttcttactcaggaaaggattttaagttaaagacctacttgggttatcaaatgagtatatggctagcctcagcaacttagtaaggctttgtctaaaaaattcaaggaattcataagaggactgggaatacaattcagagacagagcatgttcctaacattaacaaggccccaagttcagttcctatccaggaaaggcagaagggagggaggggaagagagggaggggtgtgtgaggctgacttccttctgtgtctcattcttacctaattttggggatttgaaagatgtttttttagtttttagtttaacactgcttctgacaaaatgctgttctcatgacctttgtccctcactgaaatatgttttcatgacttttgtctctgtggtggttttgatatacttggtccagggagttagtggccttgtcagagtaggtttgaccttgtaagaggaagtgtgtcactgggggtggggaaaggggggtcggtttgagaccctcctcctagttgcctgcaagccaggcttctgtttgcctttggaacaagatgtaaaactctcagctcctcctgctccaagcctgcctggactctgccatgctcccacttgatagcaatggactgaacctcagaacctgtaaggcaacctcagttaaatgctgtcctttataaacgttgccttggtcatggtgtctcttcacagcaacagaaaccctaacctaaagtctctcactagaacatgttctcctgatctttctttgtcctcactagaatgtgttatcctgactcgtctctcagtagaacatgttctttgaccttagtccctctaggagatgttctcttgacctttgccctcactaggatatgttcttctgacctttgcccctcggtaggatgtgttctcttgacctctatctctcgctaggatgcatttctttttgttttgttttgttttgttttgtttttgagacagggtttctctgtatagccctggctgtcctggaactcactttgtagaccgtgctggccttgaactcagaaatccgcctgcctctgcctcccgagtgctgggtttctttagctgctttgctgattgttctttccaagttggcctgagacaatttgatgatgatgggcctgctatggtttctttattgctatgcttgggttttgttggatttttttacatgtgagttcagtaaatttacctttttatttcccactgtcctctggttttttttttttttttgttttttgtttttgtaactccaaggtgacatatatgattgcttaaagttatccagagtcgagctaatggtgtacaatatattttcagtctatgttctgcttttgattttatgtaatttctccccccccccaactttttttctctccccttttttaaggcagagcttctctgtgtagccttggctgacctgtcagttgctctgtagaccagacagacctcaaactcagagatcctgagtctcttgcctcagcctcccgagtgctgggattaaaggcatgtgccaccgccaccacccccccagctgattttatgtaatttcttttgtggcatcacgtcctaatgtttcttcaccagcatataaactgccattaatttcacctaccacctccttcatctcaaatagtaggttagttgtcccttcatggagcttgtaattccctttattaaaattctcaaacaaaccctttcaggggagtgaagacgataagtttttcactttgatttttaaaagatttattaaaatacagtttctcactatttgacaattctatacatctatataatttattcaaatctgtcataagcaagaaggtagatacatgtagttagtataacaaaagttacattatgctgagtgtcatcacacaaggttcacactctaaattcctaactctggtcttaagcctagctccccaaggctgatcacctgtgcaccctggctgaaggtcagatctaggctctaacaaaagcttctgattgcagggtcaggatcctaggggagtctccccagcagggcaaatcaaggtgctgtctctctccagattggtctctgcctcaagcctggcagtggtggtgcatgtctttaatcccagcacttgggaggcagaggcatgaggatttctgagttcgaggccagcctgatctacagagtgagttccaggacagccagggctacacagagaaaccctgtctcaaaccaccaccactttacccccccccccccaaaaaaaaacaaaaacaaaaccagattggtctctgctgaaaaagaaatcttgattatggttcatccttgaaaaatatcagttattctaaatctaggacaatatactaagagccatttgcaaaacgctatacaaatctcacatgtaatctgacattgctatacagctgagtcattttaaaaagaatttcttagccagtcagtggtagagagtgctttaatccaagcactctggagtcagagataggaggatctctgaatctgagaccagcctgctctatggagtgagttccaggacagccaaggctacacagagaaactctgtctcttaattcatttcttagagatagagatatggagagcacctgctgctttgcaggggacccagacttcttccaggcctttcattacaatagtactttgtctgaactctaaaggcacagtatcataaatatcctctatttttctctcaaccctctcctggcttttccatgctgagtcttgaaccttattgatcaccttcatggtggtgctcactagcactctgcattgcctggctgccaagtgtatctaccgggtctcttagtgtctctagtttatagtctattaagtattctataaagacgtatcagaagagagcaagagaagtctttggccttatgaaactgtgctaaaattttgttaaggaaagctgttattttcctagcagtttggaagcatggcgaatccgtgttgttgactgttgactgggctccacctgctgctacctggtgccttcgctctccatagctgactcctccctcatcacaccgtggagcatcagcagctcatagctgactcccctgagctgatcttcactgagtccctttagcagaggactttttagcatcttttttattctcatcctccgtcagtatgccctttcctcatagttaaataacgccctaatgactagtgtgctcagtgcccatcaaatttgatctacctgaggtgtaacattctatatattctagaaatcatttcattttgccttacaaagaggccactgtagccctgctctgccattcagatgctgctgtagttgtgtgtgtgctgttaggactatgcttgtgcatgtgctgagcatgtgtgatagtcctagaacaactagcagggtctgttttactgtgcagcctatgggatcagacccaggtcatcctgctgtgtgggaattctcgttactgagccttcttcaccttctcctcctcctgcctcttatggagttggtcctctcatatctgcccgtggctcagttctcatacctcaacagtaattctaaactattaataaagtcagttcccaagccgggcgtggtggcgcacgcctttaatcccagcactcgggaggcagaggcagaggcaggctgatttctgagttcgaggccagcctggtctacagagtgaggtccaggacagccagggctacacagagaaaccctgtctcgaaaaaacaaaaacaaaacaaaacaaaagttagttcccatctataatctcagaatttgggtgactgaggcatggctaagttgtgagttccaggccagcctaggctatggtgagagaccctttctgaagtaagcagacagacattagtgagtataacgatcatccaaggtcctaatttaagatacaggtgtgtaatcctgccctcgaggattgtgatcaaggaggtggggatgaagctgaagcatcgttatttgtaacaactcctaatggacattatgcaggaccacactttgaatggagactgcttacagtcttgttcacttcagtaaatccaatacacttgtctcctccatgccagtaattcaaacgctttgccctcttcctcttatgactgatctccttcatgccaacattttgaggttggggctagaccatgccttgtgcagtgcatccttataatccagacacttggatcatggaagagtcaatggactacacatagagactctctttttttttttttttttttaagaatctcaaaaccagggctggagagatggctcagcggttaagagcactgactgctcttccagaggtcatgagttcaaatcccagcaaccacatggtggctcacaaccatccatagtgagatctgacaccctcttctggagtgtctgaagatagctacagtatacagttatgtataataataaataaatctttgggctagagcgagcagggttggaacaaacagaggtcctgagtccaattcccagcaaccacataatggctcacaaccatctgtacagctacagtaaataaataaataaatctttttttaaaaaacaaacaaacaaacaaacaaacaaaacaagaatctcaaaaccagagccatagctgatagtcaattaacacataattgcttttgattattaacgtacaggaaaacatgcagaaacaatggtgaacagctgctgttctaaaccccacgttgttgtctcgcctgtctccactctccctaccctgggactctccaggccttcctacagtccagcctccagcggagcacactagacacaacactttggccctttctcccggatcctaacaactgaatcttaaacttcttggagctgatgatgtcgataatgcacaaaatagaactggctttagtgtactcagctcaagttataccatggctaactcacaaaaatagttgactgaagcagcccaaagcaagtgcaagactgatagctgcccattcgccaggcctagctgtttctcagagccagagccctgtcgaagtttagtttagtcctggtcaggatgagactcattgttttgtaacattttcccaagtgattgagagcacagcttttgcctagtgttgaacatctagtagacattttatattcctagcatgatctgaaagagtaaccaaagatgtgtaagcagctattataatccacctctacttatatcatatatgtgtaagtccacttcatagaagacagtgcaactctgtccctgataacaaagggcctatttccacaagttcctatgaaaggaaactccacaagaaaaaaattctacatttacgaaaaaacacacaggcagactaggcagtggtggcacacatcttttatcccagcactgcgtgggcagaggcaggtagatttctgagtttgaagccagtctgatctgcaaagtgacttccagaacagccagggctgcacaagagaccctgtctcaaaaaaagggaaaggagtgagggagaaagagtgaaaattatatatctggattatcatccgagtataatttgacttaatatttgaatgtaaaatatacatatcattcaggtactgatttcctctgaatcatatgtacaaatgtttgaaacaaaggaggaataacaattctataaactgatgtatcatgggtttagtcatgagtcatgtattgtatagtgccttagtcattcattactaacgcctttctataaggaaaagattactaataaaaggcaataactgattgtgaaactttttgactatgtattactgtaagtaggaaaagccttttaaagccatattggagaaaatttttaatcagaggaattagatttgttcaattaactttttcaaaaatagcaaaaataacaccactttttagtctttttttcccctcgagaggctgaagttatatctcagttgtagagcacttgcttgctgtgttcaccaggtggtacacacaaggccctagagagctggggggggggagtgcacaaatatttggaagattacacaaagttataatgacatatgtccttaaaacagtaatgttgtggttttcatgagcgtgagcaagtcccgacaggtatatttgataccttaaaagtaaggcttttggctcgttttactatttaaaaatgaaagacatgcaattgccgttgtgaaaaaaaaaataaaaattgaactaaagcgggtaggatggcaactgttacactttgttgttgttgttgttgttgttgttgttgtttgttttttcaagacagggtttctctgtatagccctggctgtcctggaactcactttgtagaccaggctgacaactctttatgcagttaaaattggattgctaagtcttagactgctcactctagaccaaagtctacgacagtctatagctgcccgccagcccacccgcccttccctccacctttgcccgggacacctcaggcacaggcagaagactgcactttgaaacacaaagcgacttgtcagttgaatttattcagcctgggtcagttctgtggaaacaaagtcaaggcaattgtttgatataattgactaaggaaactggttttacaggatagtagaactaacttagttggtttctaaagcaatttaatagagtaagattccagtgacgtcacagcagattctaaagaatgactatctagacaaaagaaaaacacaccagcatctgctgtcacctgaatttttgatcttagacattctgactggtgtgaggtggaatcaaggaacactcctccattgttggtgggattgcaggcttgtacaaccactctggaaatccgtctggcggttcctcagaaaattggacatagtactaccggaggatccagcaatacctctcctgggcatatatccagaagatgccccaactggtaagaaggacacatgctccactatgttcatagcagcattatttataatagccagaagctggaaagaacccagatgcccctcaacagaggaatggatacagaaaatgtggtacatctacacaatggagtactactcagctattaaaaagaatgaatttatgaaattcctagccaaatggatggacctggagggcatcatcctgagtgaggtaacacattcacaaaggaactcacacaatatgtactcactgataagtggatattagcccaaaacctaggatacccaagatataagatacaatttcctaaacacatgaaactcaagaaaaatgaagactgaagtgtggacactatgcccctccttagaagtgggaacaaaacacccttggaaggagttacagagacaaagtttggagctgagattaaagggtggaccatgtagagactgccttatccagggatccaccccataatcagcagccaaacgctgacaccattgcatacactagcaagattttatcgaaaggacccagatgtagctgtctcttgtgagactatgccggggcctagcaaacacagaagtggatgcccacagtcagctaatggatggatcacagggctcccaatggaggagctagagaaagtacccaaggagctaaagggatctgcaaccctataggtggatcaacattatgaactaaccagtaccccggagctcttgactctagctgcatatgtatcaaaatatggcctagtcggccatcactggaaagagaggcccattggacacacaaactttatatgccccagaacaggggaacgccagggccaaaaagggggagtgggcgggtaggggagtgggggtgggnnnnnnnnnnnnnnnnnnnnaaaaaagaaaaacacaccaaacccccacctagggaggaaaaagtcgtccttcccagacgttttcttttcacaaagctcctacattttcctctccccatctacttttctgtctactgccactctgttcattctttccacattccacaggaaacatcccttctccatctccccccacccttccctctgtgtgtgtgtgtgtgtgtgtgtgtgtgtgtgtgtgtgtgtgtgtgtgtgtgtacatagacaagcatggtgtagcagaggtcagaaaacaaatttttctccctttacatggagtcatgatcctgcactctggtcacaaccctttctctgctagggtctatactggctgagcccacgaactgttgacgttttttggttggttggttgattggttttcccacactagggactcactgtgtagctttctagctctggctgtcctagaactttctatgtagaccaggctggtccggaactcagagagatccacctgccgctgccttccaagtattgggattcaaagcatagaacattacacccagcttctcctactgtgttcgtaaaattaatgaaatttccaccccccccaaaatgaactaataagttgtatatagagcttaaagtttacaagtatgttaacaagtatgttaaagtttacaagtatgttacaagtatgttaaaatggacttacaaaaagaaatgtaaacagatgttttattatatgcctacaatctcccaatcatgaggctgcagcaaagccatgactcagtcttgaaaaacaggtagtccagctagttctttgagtttggaacataattagttgacatgtatgtgacatgtatgtgacatctagtttctatgcatatgaccctggcttccattcctaacactgaaataaaacataagtacaatggttctaaaacattgtgagcataattaaagccactgaattgtacacttaaaaattgtttaatgcactagtgacccttgtctaagacgacttaagaatcaagggaccattgctttgttacagatctttttagatatccttgcttctttaatgggttactaaaaatttcactatatgtggttcagttatctgtctgctcatagtgtccgtccttcagctggcctgtcagcccatgcgccctggaacttgagcagagttcataaacgtagctcctagggtgtcttgcctctccacacttagcgtctgatttactttgtttttactgattgtgtcttaagtcttttaaaataaatgtaagaataaacaatgaaagacagttttagtaccaggaaaaaaaatttttttaatgtgctggacaaggtggcacagggttttagcccccaccccactccccaaaaaatggaaatggttaaaaaaaattgtttaaccatgatttttaatttttttttaattatataaaatgattaaggaacataactatatattttaaaaactaaagggaatatgaagagataaaagctgttgaatgatgatatatgtacatatgtatgtgtgtttgtttggagttttgtttttgttttacacaaggtttctctgtgtaatagccgtagttgtcttggaattcactttgtagagtaggctggccttgggaactcaccaaatctgctcccctctgctgctgagcgctgggattagttcatgtcctaccatgcctggtgcaattcaaagctagcctaggccacagagttatgtattttcagaaataaagtcaaaatgaaagattttgtttttatctagtgagtttttattagaaggaattatttatgtataagtgtgtgtgtgtgtgtgtgtgtgtgtgtcccctatggttgttgaggtgtacaaacagaaaatgtgggtctctgagattgctatctattagcattttacattttcttgtattgtgtacaatcatattctcattattaataataactatattgattagtccctttttttttttttttttttttggtttttgcttttcaagacagggtttctctgtgtagtcctgactgtcctggaactcactttgtagaccaggctggactcaaactcagaaatccacctgcctctgcctcccaagagctgggattaaaggcgtgtgccaccacacccagcagatttatttattattgtacataagtacactgtagctgacttcagacacaccagaagagggtgtcagatctcattatgggtggttgtgagccaccatgtggttgctgggatttgaactcaggaccttctgaaaagcagtcagtgctcttacccgttgagccatctcgccagccccccctttttttttccagacgtttttggttggttttttgtgacagggtttctctgtgtgtcactgactgtcctaaactcactttgtaggcaagtctgttgtcaaactcagatccagctgcctctgcctcccaactgctcctaggattaaaggcgtgcatcacccactcagcaattagtcatttttttaaactcccaaatgtatacaaatttatttagcctttcagaatagaatagaatttggtgcaaaagattgtggtacatagctcagtgcaggcctgaggccctgggtccagtcgccagtgtcagaaaagtcatgtcagggggttaatgtgcactaatgctagagcatttggcatggtttcagtgtgttgtcaagttttctgcagtttaatgaaatgtgtggtttttctagcttgacagagccaattcactgttgaatcagactcagcagccctacagatacctcatagagtctgtgcgacagagagatgccaagattgactcactgatgaagtctacagctcaacttgagaaagatgtcaggtaagccatctacacgtcttctatttaaataggagagacattgttaatatgctgctgtttcagaactcagattgtactttctaaatagtttaattatgagcatagtcttaaacatggactcaaggattcgaactaaaaagaagtgtggagctggctcactgggaaagtgcctgctgtgtgaggacaggagtttagatctccagaacttaggtgtagccggactcagcagtgcaggtctgtgcttccaaaacaggagcgggaaggagatgggaggacctggaaactgacggagcagctatcatggcagaagcaacagcaaaccaacaacaaacaaacatgtctgaaacaagggggaaggcagtgattcttgacctccatcatccatacactgagtgcatgtgcacacctgtactcccgtgttatcttcatgggaagtgtccatctttaccttatgaccagaagtctgagcatggaaatcaggcggtactcactagcacaacactccataccacagcaaagagccagcttgctcttgtcctcttagagtctttacctagacgcgggcagccaggaaggaaggatagaagcagatagcatttgtagagtcaaaacggcttttgaaacagatcaagtttacacagttacaatcttatctgcctctcaccctttatgtgaaataacccaagaattaccttagtttcagtaaataaatttcttttttaacacctttgtttaaaactggttctatgctagaaacaaaaaatcttatgcaaaaaaattgcttcacttactggtcactcgcattctttctagaatgcctgtctttgtttctttttttggtttttcatgacagggtttctctctgtggccctggctctcttgaaatagctcaatagatcaggatggcttcaatatgagagaatttcctgtctctgcctcccaagtgctggggttaaagtgcaccaactcagtcactagtcacgtcctttaatctgttcatttacaagtctggggcattggggggggggggtgcctgtgtttgtgtgtgtgtgtgtgtgagtgtgtatggtgtgtgtgtgtttatgtgtggtgtgtgtgtggtgtgtgtgtgtgcctgtgtgtggtgtgtgtgtggtctgtatgagtgtgtatctgtgtatgtgtgtgcctctgtgtgtgtggtgtgtgagtgtgtgtgcctgtgtgtggtgtgtgtggtctgtatgtgtatgtgtggtgtgtatgagtgtgtgtgtgtgtgtgtgtagtgtgtgtgtgtttatgtgtgatgtgtgtatgtgtttatgtgtggtgtgtgtgccagtgtgtatcgtgtgtgtatgtggggggtcattgtgcaagccccctcacctgctgagccctcctgctggcacctatttttagtttttttattgttttgttttgttttaagattgggggatttattttatgtatatttttacactgtagctgtcttcagacgcaccagaagacagggtcagatcccattacggatggttgtgagccaccatgtgattgctgggaattgaacgcgggctctttggaagagtagtcagtgctcttaaccactgagccatctctacagccctatatttagtttttttaacaggaaaaaaaaatgatagtacacgttaagaacaaggttttgactcatgagaagttgtttatttaatcttagttattaaacttaagattgatataaaaatttcattttctgaataaccattaaatatgaaaccaaaaaaaaaattacaggtttcctaagatgtgcaaccaaaaaaagtgttctttcaatacaaatcttcttcatctctcatcattcctaccaaaataattgtcccagaattttatttgtgttcttaatatttgctcatgtaataaaataaagtcagatatatacagtaaacatcaaagtgaataaaagtttatttctaaaattactggttaaagnnnnnnnnnnnnnnnnnnnnnnnnnnnnnnnnnnnnnnnnnnnnnnnnnnnnnnnnnnnnnnnnnnnnnnnnnnnnnnnnnnnnnnnnnnnnnnnnnnnnnnnnnnnnnnnnnnnnnnnnnnnnnnnnnnnnnnnnnnnnnnnnnnnnnnnnnnnnnnnnnnnnnnnnnnnnnnnnnnnnnnnnnnnnnnnnnnnnnnnnnnnnnnnnnnnnnnnnnnnnnnnnnnnnnnnnnnnnnnnnnnnnnnnnnnnnnnnnnnnnnnnnnnnnnnnnnnnnnnnnnnnnnnnnnnnnnnnnnnnnnnnnnnnnnnnnnnnnnnnnnnnnnnnnnnnnnnnnnnnnnnnnnnnnnnnnnnnnnnnnnnnnnnnnnnnnnnnnnnnnnnnnnnnnnnnnnnnnnnnnnnnnnnnnnnnnnnnnnnnnnnnnnnnnnnnnnnnnnnnnnnnnnnnnnnnnnnnnnnnnnnnnnnnnnnnnnnnnnnnnnnnnnnnnnnnnnnnnnnnnnnnnnnnnnnnnnnnnnnnnnnnnnnnnnnnnnnnnnnnnnnnnnnnnnnnnnnnnnnnnnnnnnnnnnnnnnnnnnnnnnnnnnnnnnnnnnnnnnnnnnnnnnnnnnnnnnnnnnnnnnnnnnnnnnnnnnnnnnnnnnnnnnnnnnnnnnnnnnnnnnnnnnnnnnnnnnnnnnnnnnnnnnnnnnnnnnnnnnnnnnnnnnnnnnnnnnnnnnnnnnnnnnnnnnnnnnnnnnnnnnnnnnnnnnnnnnnnnnnnnnnnnnnnnnnnnnnnnnnnnnnnnnnnnnnnnnnnnnnnnnnnnnnnnnnnnnnnnnnnnnnnnnnnnnnnnnnnnnnnnnnnnnnnnnnnnnnnnnnnnnnnnnnnnnnnnnnnnnnnnnnnnnnnnnnnnnnnnnnnnnnnnnnnnnnnnnnnnnnnnnnnnnnnnnnnnnnnnnnnnnnnnnnnnnnnnnnnnnnnnnnnnnnnnnnnnnnnnnnnnnnnnnnnnnnnnnnnnnnnnnnnnnnnnnnnnnnnnnnnnnnnnnnnnnnnnnnnnnnnnnnnnnnnnnnnnnnnnnnnnnnnnnnnnnnnnnnnnnnnnnnnnnnnnnnnnnnnnnnnnnnnnnnnnnnnnnnnnnnnnnnnnnnnnnnnnnnnnnnnnnnnnnnnnnnnnnnnnnnnnnnnnnnnnnnnnnnnnnnnnnnnnnnnnnnnnnnnnnnnnnnnnnnnnnnnnnnnnnnnnnnnnnnnnnnnnnnnnnnnnnnnnnnnnnnnnnnnnnnnnnnnnnnnnnnnnnnnnnnnnnnnnnnnnnnnnnnnnnnnnnnnnnnnnnnnnnnnnnnnnnnnnnnnnnnnnnnnnnnnnnnnnnnnnnnnnnnnnnnnnnnnnnnnnnnnnnnnnnnnnnnnnnnnnnnnnnnnnnnnnnnnnnnnnnnnnnnnnnnnnnnnnnnnnnnnnnnnnnnnnnnnnnnnnnnnnnnnnnnnnnnnnnnnnnnnnnnnnnnnnnnnnnnnnnnnnnnnnnnnnnnnnnnnnnggggcatctagattgtttccagcttctggctattacaaataaagctgctatgaacatagtagaacacatgcccccatggccaggggtgtgtgtatcttttgggtatattcccaagagtgatatagctgggtcttcaggtagatctatttccaattttctgaggaacctccagattgatttccagagtggttgtaccagtttgcaattccaccagcaatggagacctcctctttctcgacatcttctacaacatgtgttgtcacctgaggttttgatcttagccattctgattggtataaggtgaaatctcagagtcattttagtttgcatttctctgatcactaaggactttgaacatttctttaggttcttctcatccattcaagattcctcagttgtgaattcttggtttagttctatatcccattttttgattgggttggtttttttggtgattagctccttgagttctttatatattttggatattagtcctctctcagatgtggggtaagtgaagatttttttcccaatctgtaggttgctgatttgtcttattgactatgtcctttgccttacagaagctttccagtttcaggaggtcccatttatcaattcttgatctgagagcatgagcctcatggagttctgtctaggaaatttcccccctgtgccaatgagttcaaggcgttttcccactttctcttctaattttcccactttctcttctaattttcccactttctcttctattagattcaatgtatctggttttatgttgaggtccttgatccacttggacttgagttttgtacaaggtaaaaaataagggtctatcttcattcttctacatagagacagccagttagaccagcaccatttactggagatgctttctgtttcccattgtatatctttggtgtctttgtcaaagaccaagtgaccagaagtgtctggttttatttctgggtcttcgattctattccatcgatcaacctgtctgtctctgcaccagcaccatgcagtttttattgctctgtagtaaagcttgaggtcagggatggggattctcccagctcttctttttattcttaagaattgtttttgatcttctgggtttttggctttccagatgaatcctaagcatgtagttattttagggaaactgaggacgaaactaaagatgaaactttttgtcagagtgttatatatttattacagattttataatactttcattctacctttataatcttggagaatggatatgtaaaaacctagagcaaaatgcctcctacactttgccttggaataatttttaagtactatattgctaagaatcagagtaactggaaatgtttaattaatttgtttaatttaattaaaatgtttcattaatctgttagaaaagatttcgtagataaattcatctcttgagaaagtaagtagcttatcttctgaaacatatagtgtgtctacagaaccaaacacatagtgtgtctgtagatccaaacatatagtgtgtctgtagagccaaactttgactccctgtctccctacctggtaattctgtggtcctgccattatgttatactacctccctatgctctgccctgaataatgggtaacttcttaaatagccttgctaaggaagacccatgaaatacagcagggtatttattaaaaggaaggcttcgagctgatgatgtgacagatagatatggttatagttgttctcatttcaaatattccataataaatgaactttttttttaatcctaagggcatactggacaggttagggaggtggcttagtagttgagagtgtgtgctgctcttgcagagagcacgggacccacaagggttcactcccaggtgccccagccctagggggatcctacactctcttctagtctctacagtgcctgcactcacatgcacacagacgcacacgcagactcatgcatgcatgcataattaaaaaataagatgaggggctggagagatggctcagtggttaagagcactgactgccgttccagaggtcctgagttcaattcccagcaaccacatggtggctcacaaccatctgtaatgggatcttatgccctttgctgatgtgtctgaagacagctacaatgtactcagatacatgcattaaataaataattaaaaaaaataagatgagtaagatctctttataaggttgggggatacatcatgctgactctttacatgggttacatgaggtacaatgtagcccagggcttctctttgagttgggcaaagttagtaaagctctctgtcttattatcctttttttgggttggttttgtttgtttgttttgttttgttttgttggtttttcgagacagggtttttccgtgtagccctggctgtcctggaactcactttgtagaccaggctggcctcgaactcagaaatctgcctgcctctgcctcccgagtgctgggattaaaggcatgtgccaccatgctcagcttctgtcttattatcttaacaaactttctgtaacaataaaaaaattccatatccattccatatccaatatgatagccacttcccacatgttacaaatttcttagttctatttaaagtaaattaatgtttattttaattgtcacagtggctatggtattgaactatacagccagctttttcatctgtgaaagtggtgttaacatacctaattcatatggttattctgaggattaagatattttatttatttatttattttaaagatttatttattttattcatatgaatacactgtagctgtcttcaaatacaccagaagagggcatcagagctcattacagatggttgtaagccaccatgtggttgctgggaattgaactcaggacctctggaagagcagtcagtgctcttaacttctgagccatctctccagcccaagatataatttttataatacacatagcataatatctagttatcataagtgattgccattattggtatttatctaacttttgacaactcagagtgttgataattatcttaaaaatgaaaaatgagaatggtggatttagataaaaatgtataattatagcaacattaattatcaagctaagtcgatggtgagattagcctccagagtctcactgtgtagccttggctgtcctagaacccggtacctaaaccaggttgttcttgggctcacatgtccacctgccttggcttcctggtgttggggttaaaggagaacaccactgtgctcagattaccaaagtagtgtttcataaatccacaatatatgttaacaggttctgaagtagtatttgatgggatatgatatctggctcccaggtgaagcacgtgccttccattgtgaaaaatctaagtagtgtgattgtggtattggacagcctgcctctgtgcatgtctaaatgctaagatgtggttcaaccgtcagaagccaggcacagtgctagacacatggctcagggggaagaatgctcgctgtgcaaacacagagacttgagttcagatcccagtgagcatcttaacaactaaaataacctacagtgcctgcagtcactgctgtggggatgcagtaaggagggtcactggggcttgcaggctgcctctagctccgggcttaggagaccatccaagggaataaggcagaatgagagaaaaccttatctatctcctccacataggcacggatgctggcccatctctctctctctctctctctctctctctctctctctctctctctcacacacacacacacacacacacactaataagttcacggttaccctcagttatgtaggagcttgaggctcacctgggattcatgagaccttgtcttaaccaatgaaaaactgagtaacttcattattttctttgaaaattaaataccatactaccctgaacccttacaagtttaaatatttacaatttattcacgcaagcattctaccactgtgccataccaccagacctattacatacagtgtatttagtatccagaaggtttagggtaactatgtactgaaataaaaccatcagaagcttgtcagaaagctcacagtaagatgttgctagtgcctcctttgagctcccgtgtcattaaaggagtaagtattctaagagtagcatgtcaactcttcagcacagcaccagagacggtcagtctggagaatacagtgtgatctgcctttggatctgagagggccgtggacagagaatgatttgcataggttttctttccctgctggcggtcagctctcggtttattcttaactaagtagttagagaagaaagactacattgtcaacttctcttacaaggctaagccacactatattgatccaggaagtcaaggtacaatatatcagaaatatgttttcatatagcaggtgagacagagccataaacatgaatttctaagtaataattaacagtgaaatgaacaattacaactgtaatataccgttccagatagatgtgctcgtaaggagatttgttttgtagctttatgagtcacacatgcaagctttatatttttaaaagtaagtttccattgttagaaactatgacttttgaagactaaaattcttctttttatataaaagatttatttattgttatatgtaagtacactgtagctgtcttcagacacaccagaagagggcatcatatctcattacggatggttgtgagccaccatgtggttgctgggatttgaactcaggaccttccgaagagcagttggtgctcttaacctctgagccatctcgccagccccaaagactaaaattctatgtgctcagtgctgtcaggacagtggatcatgtgaattttagaaatacccatgttaaaggtaaatatgctatagcgaggatattcccagatcttccagtcacagaaatgtggtctgaagccttcatgttgcttgtaacaaactgctgtctttgagatgcagcacaaatactgtgtgttatccccaccccacccagcttggggtccacagtggggctgttctgctgtttaattgtggaatacttgctttattcttgaaaagttaagttagtatccttcaagtacttcaacacccattcccatcgtactgtactttatttaatgggcttattagtgtttggggcggggggcgggggagagcagaggaagagagagaacaaaactgcacataagcaagtgtttaagcactgtgtgtatgtataagaatgtaacactccttgaaaaagcctagttctttttactgaattattttacattcgttttgaggagtatatatcttcagataaaatataaatagcttcgaatctgagcatttcagaaatatcagttgcttaccatgccttagagcctggcggcacaccacttaattcttttcagtgctttgctcagtaggctccctggcgcctacctctgcttgtcagtttgtttttctgccgagctgcttgcctttattggcatttaattactgttttcctctgatgcctgtttttcatctaagttagtaatagtgtacagcatttatgtggagttttatgtgttctgcgctttatgtaatcattcactaggtaattcgcatatccctttgacagccctgagcagtttacactcttacagaagtgcagatgagtttctgtggagctctgcctttgcatggctccgctgagggaatggcacagtaggaagccggtccgaactgcctccagcctctgctcccgaggctactgagtcctctctgagtcccctcgggaagttgacttattccagagtttgtgggagtgggttttttgtttttgttttttaaatcctttgatttaccaatttttccacaatgctcattatctttctttaagttcggaaaggccctcctattattttgataattgataacttttaattaaatataacctgagatgtcttacagcaaaacgcatctcgttagcttcatttcacccttgcagatttttgtctcgacatttgaggaactgtgctactttgattaattattgcttttctcaattcttatagaactggtcacatagattgttttttagtaatgttattatatagactttcatttgattcttcccactaatttctgtacatcaaacagtaattacagatagtataaagcagtgctcagtcatttcttagaatattaatatgaccttataatgggcactgccataaattaggatttatcagagaaaaatcacaatgaagacacagaaattgaagaggaaactaagaatttggagacacaaattattttcacagagtttacagttgactgatttatttaaattatatatttcacaatttactatgttacaaattataaaatttctagggataaatgtttcagttttacttctgaaatatatcttaaattttttgttgttttggtttttttttgttttgttttgttttttcgagacagggtttctctgtatctctggctgtcctggaactcagtctgtaaaccaggctggcctcaaactcagaaatcctcctgcctctgcctcccaagtgctgggattaaaggtgtgcaccaccacgcctggccaacttctaatatcttgtttcaatatttgtctatgcatgtgtacttgctctttacttcagcatttcagaagtaagcagtcaatgaaagagtggtgatggggctggagagatggctcagtgggtaagagcaatgactgctcttcccaaggtctggagttcaaatcccagcaaccacgtggtggctcacaaccatccgtaaagagatctgactccctcttctggggtgtctgaagacagcaacagtgtaaataaataaataaataaataaataaataaataaataaataaataaataaataaataaataaatagagtggtgatgtgcccaccaggcagagtagtccaactgtcaaaaaaactcctcttgcgcaaactcctcttagcaatagctaagccactcatcaactaagtataacagtgcctgctctgctgtctttattgattacaaactcgatttatctttagttcaagccatcagattcatgtttattctttttatttttctcttaactctcacaacatgatcacttttttaaacttgggtttttaacagcaacttaaataaagagaagtcagccctgctgcagacgaagaaccagatggcactggatctggagcagctcctcagtcaccgcgaggtactcgtcccacctgcaatccatgtctgtctgcttcggcctggccttcaaatgcagctttgggttaagataacaccgggatcctggtgtccagtggtctcagtgacttctgtttgtagctcactgcgatcgctccattgttataacatttgatttgtgatatactttattttagagctaactcacttctggagggtgtttcttgttgaccggtatgatttgttctatctcagtcacggatttgcacattatttaatcactacctgctttctttctttctaccgtaactttcctcagtgttgctctctgtcttacatcacagtctgcctagctgtagtacacagtactaaagttcaagggcttcttttttggctttttctttttgcgttgttgttgctgctgttgctgttgttgagaggggtggtgtgatgactctgaggccagcctccagctccctagccaactgtaatgatgcacttctgaccctccctcttcctaaatgttgctcaccaaatgtttttacttctttgagaaactgaattttttctaaagatttatttatttattttatgtatgtgagtacactgttgctgtcttcagaacagggcatgggatcccattacggatggttgtgagccaccatgttgttgctggcatttgaactcaggacctctggaagagcagtcagtgctcttaaccactgagccatccctccagccccgaaactatgtttttaatttataaacgttattgttgaatattaaagtgcagtgtattttggtcacactcacacagtctctcagattctgacctacttcctactcacttagccttggactcctttcctcccgtctggcttaccgctcccttccagccttcctgtctctttaaatccattcagtccatttctccattttatactggcctaattttttgtggttttcttgagatttattagaaaatataaacgggacaggtatatagcacgattggtaaactgcttgtctggtatgcacaagggcctaggtttcatccctagcagcagataaagctgagcatggtgacacctataattccagcactcaggtgacagaggaaagatggacagaaattcagggtcatccttagccacataggaagtttgacgttggcctgaggtacatgagaccacacacgcacaaatccatagtgtgacgtgactttgggggtgttgatgcccctgtttcttttggcaaataaatgtagttgttaactactcccagtgtcaatatgtaaaatagtctcaccaccccaaaaactccctcatgccccctttgaggagacttcctttcttttcccctgtcctgtgccttaatgtcagcctgctttcttcatctgcagtttcaccttctatagaaagttttatgaatgtcattagcaacgtagcgttttcacctggctgttctcattcactgagatctgtgccacattacccggctgcagcgcggtgcactggtccattcactgcttgatggctggctacttgggtcatgttatggtacatttaaatgtttaatttactcttacattaatatgacaatttaatatactagttataattttatatctagattatgattgcatatttatgttatttattcatgtgtttcattttaaaatacagtaccaaatctacagataaaaacccctctaaaaagttgtttgcaggtacttgtgcaagccatgggcctctctttcccttggatgcatgctagagcacaaactcggggtgagcatatgttggtaagaaactgccaaacatctctagggtcagtatgctcttgcactttctatcacaataatacgagttccagtatctctgtatccttaccaacatattgctaaatgtaatgattttgcctaaagtatttttccagtgaattatcttaagcattgcttcttctcaataatgtttttatcaattttatttttctacaacaaaaagtttaaaaagaaatcactgtttttcgaggttaataaagttgctttctggtgtagaaaaagtctgtcaactctgtgggaagaaatcactgaaagaatatcatcaagagggctggagagatggctcagtggttaaaagcactgactgctcttccaaaggtccttagttcaaatcccagcaaccacatggtggctcatagccatctgtaatgggatctgatgtactcttctggtgtgtctgaacacagctacaatgtacttacatgtaataaaaaatatacatatatatattgtcaagagagagtaactggagacagttgctggaaacagtttcaaggtgctgtcccagaagtggtgttgaaggagttggggggttgtctttgctagagatgaggacggggctggagctggctcagtggagggcacctgctgcttggacatgtgacttggttcctggcacgcccatgccatacaattcccattcacagctgcatacagctccagctgtaggaggtgtgacatcttacggcccctgtgggcagttgcgtgtccgtggtgcatatacagccaagcaggcacacacatacacataaacaaatggcttttggaataagatctcttagataataggcacaagagtaaagtgaccatggcaaccatggcctgtgctgcagctctctgggtgctgagggggaagatgaagaatttgaggcagactggcctaaatagtgaaagtcttacaaacttaacaccaacaaagcaagggaccagaaggtagtcccgaagtgatttggttgtttggttggttggttttcttgctttttgatacaggctcatgtaccccaggttagcctcaaattcactttgtagccaaatgttgaacttatgatcctcctgcctctacctactaagtgctaagattttatgtgctgctattttatatgctgctatgttattgggctgctgggaccaaacatgggacttcatgtgtgctaggcatgctttcagctgagctccatctcagcctctgaatttgatgtacggaaagaagtccattagtgagagatggcagagccaggaagctgccttgctcttcttctggcttcgggcattctaggccttctccatcagtaccgccatcacttatttcccggaattctgcctccggggaattatttcttccctatggaagcctgagttagtcagtgtgtgtttttaaatctgaatgtgtaaaagatcatatccaaaggtttttgatctgtcatatatctctatctgactttcctttcagaatggtcagtctcaattctgcctcaagaattaaaattctttaatgctaaagaattatgccagactttgaaaattatagaaacaatttacttctacattttatatctcaaactcgaagccacatttttcatgagttcaaataatagctaaaaagccgtgagccaggataatccatcttcccttcagttaagttttctcaggcatttggtcacaaggacaaaaacctgattaacagcacccaaggtattggcttccttcacactggtgagggccctggggagatcatttaacattatgtcatgactttaatcagctaaatttcaaaagtttaaattaacgattcagatagaaaacaaataaagactttcaagttcatcagagttagggctccagctccacctttaaggcagaccactgtcttaaagttcttgtgtgcctctgcatgttcacgtaccctgagttccatcaaacctgtcagtcaaacgctgacaggtgctgggaatgggaaaggcatttggagtctgaccgcacaaagttcccattttctaagttagtgttaccacagaacagcacctgttcagaagtaggtgtgctatagagctggagtatggctcaattgatacagtgctttcctatcatgcctgaggctccatatttaatatccaaaacttcataaaaaaccaagtgtggtggcacttgggaagaggaggcaggaagattagaagttcaaggccattatttgctatatagcaggttcaaggccagtctaggctacatgagattctgacccaaaagcaaccacaagaaaaagtatgtcctctcatcttacacgaattcataaaattatatattggcctcatatgataacaatattttagtatttacattcataaatagttgtgtatattagagttatatgttagataatttttagtcttgacttctttacggaaaatctatatgtaaaatctatatgtgccaggccactcctcttcattctgtgttccccacatttgtttctgtattcagtgagactaaaatgcaataaaagacaggttggctcagaaaattccttccatcagagcaaaatttattatcatgatctcagcttttatgatgagcatcataaaagcataaagtccaatacaacctctccattttagaaaactaccctaggaacctattaagccctgccgcgtagatcccgcagtccagccctctctgcaccccacctctgccatgggccctggtggcacagatgaggctgcttatgagactgacgcagatgtgcctaccatacagacagctcacatgatgctgaaagtaagaaaatgcattttttttcttaaaaacaaaaaggcaagtcaacttgtttttttatgcttagtaccatttaggcaaaacaaaaacaaaacagaaaatatgaattattgtttgcattacttccaggaaagttttgcctctgtagctgaagttgtagctacttccttctttctttcttcaggaaatgaaaacttcatttttccccaattgccaggaaagctcatagctgaacatctcagccgacattaccatctttttccctcttctacttttgaggctctacaatgaccttttctgtctccttcccagcagttataatctgttttactcttttgggttttttttggggggggggggttggtttttttcaagacagggtttctctatgtagccctggctgtcctggaactcactctgtagaccaggctggcctcaaactcagaaatctgcctgcctctgcctcccgagtgctgggattggattaaatgcatgcaccaccacgcccggcctctgtttccctcttatatgtctgcacttgccctgggattgacacgggatggcacagataaaatagaaaccttaagcagttgggtttagaaagaaaccgggaaaaggaaacatgggccatgggctgtgcttcttagcagtagcaggactgaaaaactggaggtgggaagcactgagtgaaggaactgtgacctcttggaccagctattccccagcttgtcccctgagagtcaccaaaagtcacgtactgtccaccacttccttcagttcatattgccttaagagaaggagaaatatgatcatgcctgaaaattctgtttctgcttttctttattattagagtgtttgtctgtctgtctgttgtaatgctaagagttaagctcagggcctcacttctgggaaggtgctgtttcgttgagctaagttacacccctaagccttcaatgctgcttttctttctccctctcccttcatatatacatattcattcatatatacatatatgtgtatatgtgtgtatatgtatatatgtgtgtatacgtatatatatacatatatgtgtgtgtgtgtgtgtgtatgtatgtatgtatgtgtatatgtgtgtgtgtgtgtgtgtgtgtgtgtgtgtatggcagatcataggtcctaataaactcttgagagttggaagaatgtctttaattgaccaaatgtgtattttgatactatccaagacttattaagctctggtgtaaaagcctttttcccacagcctttagagttatagtaagggcagtggtaagatctccacttaagaagctattccagaattttcctgaactagattgctggtgatggcctgagtcaaaggtagactgatttaaagcacatcacagcacttaggaattggatttaggtgctgatgcagagggagaaatgagagctgattgccagcctttggcttgatcctaggtctgtggtgggagaaggaagaataaacttgggaaagaaaggtaaatatctacgtggatataccacttcagggttaaaagatgagtttttaagcccaagagagaattcatgtagaaataaagatgtgagtcacagcataatttttttatgtggaaacagattaactcgtgagaatacatagattgagaacaaaagaggtgcacagcaggatccccagaaacactaacatggaagggcactgccacaacacagtgaagagccactgacatcatgaagagcagcaggaggaaaggcaagccgagaaagcacaggtaatgccactaagagcagaggatgctgttagcaccagcgcatactgcaaagaggtcaggccaggctctcagaggcttctgtctactatgatgtcatgttccatcacatctatcctaacatggaaacttctgaaatgaccattcaatcagtagttgtgaggtacagtggattagctggccatagtggcacagaccatggtggcacagtcctagttcttaggagtctgaggcaggaggatggaacagttcacaacaagcataggatacatactaagtttgagaccagcataaagtacatggacaatcctgtctgagatggggagggggggaaggggaggggaaaagaggagaggagaagagaggcagaggcaggctatgaccgactatgatttcggtccatcctcctctgcatagtgatttctatatattgagaccctatcttaaagaaaaaaccaaaacaaaacaaaaagaaaggttctcccttctaaaggcagctggagtggaagcgacagtgtgctttagaggatatcttagtgcaacagccgatgacagcaacccactcagctcaccagagcgctgggaataaactggaggactcgtgaatccattaacatctccacaataaagaggactcagggaaaagctgccaaagcaatacaaagacaacactatccctcttaacctttccaggacatgcacacacacacacaaagaccaccgcttagtctaacctggcatcctccctatccccacannnnnnnnnnnnnnnnnnnnnnnnnnnnnnnnnnnnnnnnnnnnnnnnnnnnnnnnnnnnnnnnnnnnnnnnnnnnnnnnnnnnnnnnnnnnnnnnnnnnnnnnnnnnnnnnnnnnnnnnnnnnnnnnnnnnnnnnnnnnnnnnnnnnnnnnnnnnnnnnnnnnnnnnnnnnnnnnnnnnnnnnnnnnnnnnnnnnnnnnnnnnnnnnnnnnnnnnnnnnnnnnnnnnnnnnnnnnnnnnnnnnnnnnnnnnnnnnnnnnnnnnnnnnnnnnnnnnnnnnnnnnnnnnnnnnnnnnnnnnnnnnnnnnnnnnnnnnnnnnnnnnnnnnnnnnnnnnnnnnnnnnnnnnnnnnnnnnnnnnnnnnnnnnnnnnnnnnnnnnnnnnnnnnnnnnnnnnnnnnnnnnnnnnnnnnnnnnnnnnnnnnnnnnnnnnnnnnnnnnnnnnnnnnnnnnnnnnnnnnnnnnnnnnnnnnnnnnnnnnnnnnnnnnnnnnnnnnnnnnnnnnnnnnnnnnnnnnnnnnnnnnnnnnnnnnnnnnnnnnnnnnnnnnnnnnnnnnnnnnnnnnnnnnnnnnnnnnnnnnnnnnnnnnnnnnnnnnnnnnnnnnnnnnnnnnnnnnnnnnnnnnnnnnnnnnnnnnnnnnnnnnnnnnnnnnnnnnnnnnnnnnnnnnnnnnnnnnnnnnnnnnnnnnnnnnnnnnnnnnnnnnnnnnnnnnnnnnnnnnnnnnnnnnnnnnnnnnnnnnnnnnnnnnnnnnnnnnnnnnnnnnnnnnnnnnnnnnnnnnnnnnnnnnnnnnnnnnnnnnnnnnnnnnnnnnnnnnnnnnnnnnnnnnnnnnnnnnnnnnnnnnnnnnnnnnnnnnnnnnnnnnnnnnnnnnnnnnnnnnnnnnnnnnnnnnnnnnnnnnnnnnnnnnnnnnnnnnnnnnnnnnnnnnnnnnnnnnnnnnnnnnnnnnnnnnnnnnnnnnnnnnnnnnnnnnnnnnnnnnnnnnnnnnnnnnnnnnnnnnnnnnnnnnnnnnnnnnnnnnnnnnnnnnnnnnnnnnnnnnnnnnnnnnnnnnnnnnnnnnnnnnnnnnnnnnnnnnnnnnnnnnnnnnnnnnnnnnnnnnnnnnnnnnnnnnnnnnnnnnnnnnnnnnnnnnnnnnnnnnnnnnnnnnnnnnnnnnnnnnnnnnnnnnnnnnnnnnnnnnnnnnnnnnnnnnnnnnnnnnnnnnnnnnnnnnnnnnnnnnnnnnnnnnnnnnnnnnnnnnnnnnnnnnnnnnnnnnnnnnnnnnnnnnnnnnnnnnnnnnnnnnnnnnnnnnnnnnnnnnnnnnnnnnnnnnnnnnnnnnnnnnnnnnnnnnnnnnnnnnnnnnnnnnnnnnnnnnnnnnnnnnnnnnnnnnnnnnnnnnnnnnnnnnnnnnnnnnnnnnnnnnnnnnnnnnnnnnnnnnnnnnnnnnnnnnnnnnnnnnnnnnnnnnnnnnnnnnnnnnnnnnnnnnnnnnnnnnnnnnnnnnnnnnnnnnnnnnnnnnnnnnnnnnnnnnnnnnnnnnnnnnnnnnnnnnnnnnnnnnnnnnnnnnnnnnnnnnnnnnnnnnnnnnnnnnnnnnnnnnnnnnnnnnnnnnnnnnnnnnnnnnnnnnnnnnnnnnnnnnnnnnnnnnnnnnnnnnnnnnnnnnnnnnnnnnnnnnnnnnnnnnnnnnnnnnnnnnnnnnnnnnnnnnnnnnnnnnnnnnnnnnnnnnnnnnnnnnnnnnnnnnnnnnnnnnnnnnnnnnnnnnnnnnnnnnnnnnnnnnnnnnnnnnnnnnnnnnnnnnnnnnnnnnnnnnnnnnnnnnnnnnnnnnnnnnnnnnnnnnnnnnnnnnnnnnnnnnnnnnnnnnnnnnnnnnnnnnnnnnnnnnnnnnnnnnnnnnnnnnnnnnnnnnnnnnnnnnnnnnnnnnnnnnnnnnnnnnnnnnnnnnnnnnnnnnnnnnnnnnnnnnnnnnnnnnnnnnnnnnnnnnnnnnnnnnnnnnnnnnnnnnnnnnnnnnnnnnnnnnnnnnnnnnnnnnnnnnnnnnnnnnnnnnnnnnnnnnnnnnnnnnnnnnnnnnnnnnnnnnnnnnnnnnnnnnnnnnnnnnnnnnnnnnnnnnnnnnnnnnnnnnnnnnnnnnnnnnnnnnnnnnnnnnnnnnnnnnnnnnnnnnnnnnnnnnnnnnnnnnnnnnnnnnnnnnnnnnnnnnnnnnnnnnnnnnnnnnnnnnnnnnnnnnnnnnnnnnnnnnnnnnnnnnnnnnnnnnnnnnnnnnnnnnnnnnnnnnnnnnnnnnnnnnnnnnnnnnnnnnnnnnnnnnnnnnnnnnnnnnnnnnnnnnnnnnnnnnnnnnnnnnnnnnnnnnnnnnnnnnnnnnnnnnnnnnnnnnnnnnnnnnnnnnnnnnnnnnnnnnnnnnnnnnnnnnnnnnnnnnnnnnnnnnnnnnnnnnnnnnnnnnnnnnnnnnnnnnnnnnnnnnnnnnnnnnnnnnnnnnnnnnnnnnnnnnnnnnnnnnnnnnnnnnnnnnnnnnnnnnnnnnnnnnnnnnnnnnnnnnnnnnnnnnnnnnnnnnnnnnnnnnnnnnnnnnnnnnnnnnnnnnnnnnnnnnnnnnnnnnnnnnnnnnnnnnnnnnnnnnnnnnnnnnnnnnnnnnnnnnnnnnnnnnnnnnnnnnnnnnnnnnnnnnnnnnnnnnnnnnnnnnnnnnnnnnnnnnnnnnnnnnnnnnnnnnnnnnnnnnnnnnnnnnnnnnnnnnnnnnnnnnnnnnnnnnnnnnnnnnnnnnnnnnnnnnnnnnnnnnnnnnnnnnnnnnnnnnnnnnnnnnnnnnnnnnnnnnnnnnnnnnnnnnnnnnnnnnnnnnnnnnnnnnnnnnnnnnnnnnnnnnnnnnnnnnnnnnnnnnnnnnnnnnnnnnnnnnnnnnnnnnnnnnnnnnnnnnnnnnnnnnnnnnnnnnnnnnnnnnnnnnnnnnnnnnnnnnnnnnnnnnnnnnnnnnnnnnnnnnnnnnnnnnnnnnnnnnnnnnnnnnnnnnnnnnnnnnnnnnnnnnnnnnnnnnnnnnnnnnnnnnnnnnnnnnnnnnnnnnnnnnnnnnnnnnnnnnnnnnnnnnnnnnnnnnnnnnnnnnnnnnnnnnnnnnnnnnnnnnnnnnnnnnnnnnnnnnnnnnnnnnnnnnnnnnnnnnnnnnnnnnnnnnnnnnnnnnnnnnnnnnnnnnnnnnnnnnnnnnnnnnnnnnnnnnnnnnnnnnnnnnnnnnnnnnnnnnnnnnnnnnnnnnnnnnnnnnnnnnnnnnnnnnnnnnnnnnnnnnnnnnnnnnnnnnnnnnnnnnnnnnnnnnnaaccctctgtttctatgatgccctttgaatgatagatagtagcttatgacaaaagatacacatacacacacattctctctcacacacacctacacacacataccacacctaaaaagctacaagtcttttgaaatatacaatagcaaagagaaaatactagcagtgatagtaggttatggtcagaattaacaatattggtgatattttgatgtaaacctaataggtgattgaacatatcattaacatatcaagaagctaaaactgagacaagaatggaatgctttgaatacaggtcaaagagtatataccctgaagtaagctacattccaaactgtagtgttcacaatggaggatcaggattaaaagctaaaactgatgctgaaggtgaatcacagagggaaaaaacatcaaagaacttttagattctgccaaaccgataaagaccagaagtagagagcaactgaatgaatgtgtaaggacgggccaagcaaagtcagcagccatagcagagttcatcagaagcttctacagtgggcccgcacttctacagtgggcccgcacttctacagtgggcctgcagttctacagtgggcccgcacttctacagtgggcccgcagttctacagtgtgcccataattctgcagtgtgaattctgcaaattcatattttggtgagttcacaccagttgtccatagttcagtatacatgtatttatatacatttatgctttggttgtccatgcttcaggatggacatgcttcagtatagtcatacttccatgtgttcttacttaaatgtgttcttagtgtgttcacactttactgtgtccatactgtgtctttgattgtcttcatacctcactgttcacacttcttcaaagtgttcacacctcagtttgttcactttagccttctctcccaccatcattgatggaagtgatccattcacctcacattgctgtcactctgtcatgtacggagcacagcaccacacatcattgcgtcatcacaaaacactgggatgaggagctagaacctgatcaacagaggctgaaacatattacacgatgatctgaagcacacaatgaagacgattaaacactcctgctctctcctcagagggatggatggatggactgggtgtttaggaaagataggacagaaagaaaagcaagcagctctaaggaggactcatccaaggctggagacgccttccatgtttgacttggttttgcttttattggcagatggggtgggggcagaattgattttggtttgtttttgtagctcagtagagaaaagctaagttgataaatttgtctttttttttctagcttgagctagtagccatatggtcaaaggagatgtcttttttaattgattcataataagtgtatttgtggaatacagtgtgaagactgaatacatataaatgggtgtgtagagggagtatttaattgtgtgtgggtctgggttaaatcatgtgagctacctttcaaacctggcattatgtatcaaaggccttaacagaagcccttatacataatctacactttgaacccagaaaaaaacctgcatttggatactgttttctcttcttagtaacaaaatgaatttgggtagacttctccggcctactaattctcattttaaaaactgagatggtatccacttcttatataatagacaacatgaagcctggcacattggaaagattcagtggacactagtccctgtcttcatttcctcctcccccactctgtacactgtgtggcacagccagtggtgaggcgaggttgccctgcaaatgagatggcccactgaaaagtcaggctggagaattctgaagcatatgctgatactgttttctgacactttgccatataaaagctatttgcctattgtttccctttgtaactgaagtcttagaatatggaaagagtaacttttagagctggggtttctctattatacagccccagctgccctgaaactcagagatcatctgcctctacctccacctcccaagtgctggggttaaagatgtttgccacaacccacctggaataagtaacttttaattaaatttacatgggcagggagggggacccagagctttgcacatgctaggccggtggcactgagctctggaaccaagaattaccttgaaccctcatcctcctgtctccacttcctcaggactatacaagagtaatggtacctgtaaatacagatactcctagacttagagtgggttatgtttcagtagattcaccatatttttaaatatgctaaacgaaaatacatttaaaacaatttaccaaacattcaaggtggcaaactttgaatgttctaagaatacttatacaaaattatcaaacataaagcctgttctctattacagtattgattatctcatgccaggtgtgtgtgtgtgtgtgtgtgtgtgtgtgtgtgtgtgtgtgtgtgtgnnnnnnnnnnnnnnnnnnnnnnnnnnnnnnnnnnnnnnnnnnnnnnnnnnnnnnnnnnnnnnnnnnnnnnnnnnnnnnnnnnnnnnnnnnnnnnnnnnnnnnnnnnnnnnnnnnnnnnnnnnnnnnnnnnnnnnnnnnnnnnnnnnnnnnnnnnnnnnnnnnnnnnnnnnnnnnnnnnnnnnnnnnnnnnnnnnnnnnnnnnnnnnnnnnnnnnnnnnnnnnnnnnnnnnnnnnnnnnnnnnnnnnnnnnnnnnnnnnnnnnnnnnnnnnnnnnnnnnnnnnnnnnnnnnnnnnnnnnnnnnnnnnnnnnnnnnnnnnnnnnnnnnnnnnnnnnnnnnnnnnnnnnnnnnnnnnnnnnnnnnnnnnnnnnnnnnnnnnnnnnnnnnnnnnnnnnnnnnnnnnnnnnnnnnnnnnnnnncgcgcgcgcgcgcgcgcgcgtgcactggcacttagcaggcatgcatgtggaaatcagcaggcaggttgtggaaatccgttctctcctcccaccatgtggaccccagattaaaatcaagctgttaagttccatggcaagcagcacctgtccccactgagccatctcaccggccactccagtaattaggttaatattatgctgacagtgcaaggcaggtgactgtgagttctccccatgaacactgacaacacttcgggctgaggactgtaaatcacagagcccagctgcacagctggctccgagttgccgctcacaaccagagcgcactatcaccgaagtgcctgtcagcaggcatggtgcgggtacctgtcatcccagcactcaggaggcagcggtgctaagaggattgtaagttctaggccaggctggaccacttagctaattccaggctagccttgtctacagggagttggggagagagggaaaggtgatggagagaaggagaaggaggctatgtcacatgtcagattcagaattgtacatagtgtactgaaatcttagcacttgcacacctttgtcaagctgaaaaccctaggtcagcctttgtagggatgtctatgtcctaaaaacttctgaacattttaaataaaagaattatgtagcatatgaaatctggttcaataaagctttgaaaaaatagttttgaaatctggccctgatagcatcacattcaaatgtctgaagcaggagtcttcaccgcaagttctcaccagcctggagcatacagtgagtagcaaagccattaaggctacaatgtgaagtcctgtcttgaaaagaaaaaaaaaaaaaaaaaaaagttgcggctgcagggatggctcagtgggtacagcatatgttgctttagcataaggacctgagttgaagcccccaaacctgtgaaagtttgtcatcccagggctcctgctgcagggtagaggcagagacggggaacaactccagaagcttgcaggcctcctacctagcctggcacatgcaggtaaagaaacctatctcaaggtgtaaagcaaggaccagcaccgaggtctcacacatgcgcacgcccatgcatggtcccccacaatatgtgaataaattagtcagtaactgactaacaaaatgataagcggtgtacactagtgtacaagttaagtagtgaacagagcattcagtgtgctaaatgtgttagatacttttctggtactctaatttaaactccatacccaaaagcaacttgaggaagaaagggttgacttcagcttgcaactctcaggtcgcactctatctatcatcaaggaactctgaacaggaatctggtggcaggaactgggtacagagaatggaagaaggtcacttactgcattgctcaccctgcttctttatagagcctatgaatattgtgccctgactttggctccactaataatggactgggcccgctcacagcaatcgctaacttttaaaaacaatgaccagcagggttgtcagatagatacaggcattttcccaactcttcagtaatggatcatatcaataacagaatcatagtgattctagcttgtgtcaagttgaccaataaaagcaaaacaaaacaacccagctagccaaacatgctgcactcttcacttccttttcaaatgtttatgtgtatgggtgcttggcctgcatgtatgtctgggcactacttgctgtctcatgtccatgcaggtcagaagagggagtcaaacctcctgggactggagttacagatcatcatgagccaccatgtgggtgctgggaattgaatctggatcctctagaagaacagctggaaatcttaatcgttgagccatttctccagccccctcttaattgttttgtaattctgtatttattttgtgtggggaagtaggtggataccacaatctctgtgtggaggtcagaggacaagttgtgggtgttggttatctccttccaccttgtgggtctttcaaatcaaagctaggacctcaggtttagcagcaagtgcctttacccactgagccatctttctagaccaatttctactttttatttcctttttgttgcttccttgattgttgataggttccttggttggtgttttggtggtttggtttggtttttggttttgagacagggtctcactacatagctctagctctctggaactcactgtgtagaccagtctagccttgaactcacagagatccacctgcttctgcctctcaggtgcttagattaagagcacgcaccactatggccagctggcccaccttcctgtctttgacattttctaaagcaaaatgctttctttttaaaagaaggcatgatggttcacaggtataatcccagcactggagataatgaagccgaggcagactgattgccacgagtttaaagttagcctgggctacactgtgagtttgagatcctctacggttacgtagaaagaccatgcctcaaaaatccaagtaaatgaaaatgtacaatataagttaaaatatacctttaaatgaaatctattcaaagtgtgttcttgacttaaagccagttgatttctaccctgtataacctaaagccaaagatgtacagaattgtctagcctgttggtcctgacatgtcgttgctcatatataaaagcacttccttgtactccagggcagcacatagtttgtattatacttgtcagagctattttcatcgagaaatgctatctatgtgtccccttgccaacatctttgcagagtttacaactttgagcaatttattggcatcagctatgcaataccattaagcagctgctcggctcggcagttgagctgtgctaacatgccaccactctgtgtggatccttaagagtaagtgaccaagatgtgtgctttaggattcaagagagcagtttctcagagattgggcagtaacagtcaccagcatcagtaatgtcataagcagctcttcagcgttcactctgccattctatagtgctgtgctgcagggggtgctctggggggaaggaggggtctccaaaggtgactcaggctgggcttcaattctcagtcttccttccttagcgtcttcagtggtcaggattgatgccatacgtagcttactagatgggttttttgttttggtttatctttgatttagccttagtttcatttgagtaatcaaatagttcttcatttgttaatgtagtgaatgccccactcattctcctaattataatcattgtgtgtactttacataccagaaaaacaaggttttttttttttattttcagaaatgcctttctaaattaatcatcagccaagaataagctagagttagacagaatgaagggacactcactctttgggaagagttcagccctagagtgagatgtgctagaaagatcatcgtgcccacacaaatggtgatactgattttttttttcaaccatctttttcagatgaaccttgtcctgtcattctggcaaacaacccctaagacccaaaagaaaccatgtaaactttacttcattcataaattagaaatcgaaattagaaactataaggacaagaggaaaagttacagcaccaagcacatcttcacagctgacagacacaacccctccctaatgtggggggtgatgagccactgggacaggaaaaagagtgcaaactactaacattcacttcttcagagagactgtagaaaggaatctttccagaacataagcaatgaacacagctttgtgatggtttccagagatgctaaaaccaagtcatgatgcttggctagcatggtgcacacccatcagatgcctcatagtcttcataaacttgatttatatgacatagaagttatactgtgaaagcacaatactttttcccctgacactgagaaaattaataaagtaaaccagatgaggttatatacaccagtaattccagcatcagggaggcagagacaggaggatcaagagtttcataccagcctggactacacagagactccacatccagtctgggctacataatagaataggacttaaaaagattagaaagatcagggttagggaatgaatatgtgtctattgacacatgagagagaaatgattccacgaaagaataaaattgggctggtgggatgattcagtgggccaaaactcctgctgccaagctctggagtcctgaagcctacacagtagagacagctgactctgacttagtcagagtcatgttatcctctggctgagtgtgtgtgtgtgtgtgtgtgtgtgtgtgtgtgcacgcgcacacagagcaaaaaaagacttaaaagagaggatacaacagccagtcggtggtggtggtttgcacacgcctttaatcccagtacttgggaggcagaggaagggggatctctgagttcaagttccatgacaacaagggctacacagagaaaccctgtcttggggtgggaagggcagaagaaaggaacggaaagagggagggggagagaggggggaggagagagggaaggaggggaggaaaagatagaagataaaacttgccaatatacccaataaaataagtttcagaataacagtaacgagtcagttctaagagtagtcagtagaaaatctgtcccattagctaatgttagtgtgtaaacctagaatcccagccctcagaaaactaaagcaaaagatcctgagcccagtctgggttatgcagaaccttctcatttaccctgaaccacgccataaaccatgttcaaaaagacaaggaaagggctggagagatggcccagtgcttaagagctctaactgctcctccagaggtctcccagcaaccacatggtggctcacaaccatctgtaatgggatctgatgcccccttctggtgtgtctgaagaaagctacagtgtactcacatacataaaataaatctttcttaaaaaactaatatttaaaaaaaaagaaaaaatctcaaaaaacagcataattataaactaggcactgtagaatatgcttttaatctctgtgtttgtgagagagaggcaggagggtcagagaagtttaaaaccagccttatattcacagttgaatttgaggcagggaaacctaggcttatattagaccctgtccaaaacaaaaacaaaaacagctaacaacaagaaggcactgcttagcactttccatctgtgagacaagaaaactgcagaaagtatgaaaagaaaaactttttattaaaaaaaaaatcaagtacaagtagacatttaaagcccggtgtactcaacagagcggaagaatctcgacaagtcagaggccgtgtttgtctacatagcgagttccacatcagcctggctagccctgaggtacttgatacagagtaagacctggtctctaaaaagtgagcctaaataactgccatggctttgagtattgataaagtattagagaaagaatccaggggccagcgagatggctcagcatgtaaaggcacttgctgccaagcctacgaacctaactcattgtcaggacctccacacacaaaccatagccccagtatggcctctagtgtgtgcgtacacacaaataataagtaattaattaatttgttgatttttttagtgcagagtcagagagctgtgagttaaaggtcagcctgttgtacatagcaagttccaggcccaccaaggttatacaatgagccactatttgaaataaacatcatatgttatatgtatatgtgtaagtagtaaaaaaaattatgttgctatatgctaatatgttaaggactcagcatatatgccaaaaatgagagagctgagaaatgtcttgtaagcattattctggtgtgtacagtaacaatgtgatcctaataggaattttaccaaatctggctgcttttaaagtgttctttctggatttcagagaccatgttactactgtttatgctctcagatgaaagtggcactgttatcttagctttccaaattgtgctaatcatagtctaggtgaaacaaagacattaatctcccttctaatcgtctgatcaacatcaaggaaaatctgtttcttgagcctgcttctatatacaccagcaaacgcaaaagagagactgcggtttggactgaccaggaaaatgcccttttccctttcccattgagtagcgcaaaagctcagctgtccgtgaggctgaggctgaggctgtagctcagtcggtaaaaagcctgcctggctacacaaagcactgggtgctgtccataaacacataaccacagaagcaggtggtacacgcctgtagttccagcattcgggggatcaaaagtccaaaatcatcctcgcctacaacgaaaactagaggccagcctgggctatcagagaccttgtcaaaggaaaacaaaaataagaaagtaaaatctgttgcgattgaataagctccacatcaaatcagtgctgcattctttaccataaattaagtaagatggtcttggaagtaagacggttccagagcggccctgatcattgtggttgtgtttgcgctgtcttgtgtgttttggacactgcagagaggagaaaggaaggattccagctcctcccctggccctagagttaggaaggcagcgtggctcaaaccccacagtctgttttaaaatatctgctccagctaggtggttctaaatagaactaatgacagccagaaaagagaggcctgtagggacttgctctgacacagcgctgacgtctgtaaacagatcagtagcagggagcaaggcatccttctattgccctaagttttatgtgttggcatgaaggaaagaattgcctagagcagagcccaccattattctacagctaaatgaggtagctcgccatttctccaggtatttgggtgtgatgtataggttttagtaaacataagcatccactagccaaagactgtctgtgaggaaagtccactctaaattcttcagagttcagcataattaatttttcactcaaaaggcaaactaaaatccaagtgacgtgtgcttaaaatcccaacagtgtagccgggtgtggtggcacacacctttaatcccagcactcaggaggcagaggcaggcggatttctgagtttgagtccagcctggtctacaaagtgagtttcagaacagccagggctacacagagaaaccctgtactcgaaaccgcccccccccccaaaaatcccaacactgtgaagcactgggactgtcttgaggccatcctgggctacaaagtaatgacaatatagcatagcactgtctcaaataagtaaagaaatacatattttggaaaggcaacttggcaggatgaggtgtggcttagtggtgaagtacatggggctggtatgcaccaagacctggactcaatccccaggactggaaaaatgagaaatggcaactccagccacctccatttaccatgtgtaaaagactccaggaaacatacagctaaagaagtgctaaagctgtgttaaactgactgactgaatccgcggtcacagaactcttctgtgttctttctctacctccttcagttccgacttcacaaggtagtagtatgtatggatggcctaagatggaggggaacctcatcaggctaagactacctgccatgtacaaggcctgggttccatttctagcaattaaagaataattaacccatctactcaacaaaaatgagcagaacactgcagtagaacagcaattgtgtcactgtctatacctgtgacacacacccatcatggggtatttgttgaagcttcgtgtttgactctaatatacagaagaactagcaaccactagcagagtacaggtcactctgagttcaagaccagcctggtttacagagtaagttccagaacgcccaggcctgttatacagagaaatcctgtctcaaaacaaacaaaaaagttagttgtaatgctaaaagtaatgtcatatttactattttaggaatcctgagccgggcgtggtggcgcacgcctttaatcccagcactcgggaggcagaggcaggtggatttctgagtttgaggccagcctggtctacagagtgagttccaggacagccagggttacacagagaaaccctgtcttgaaaaaccaaaaaaaaaaaaaaaaaaaagaatcctgtgcgttactgttatacattaatgttttactttcacaactttccttatatatggtataattattcaaatatttcatgcacttaaagtaatgctttaatgtcaatcattattagtctgtctgccaaaatcatacttactgctttcttgttttcatatatcaacaggaatttgcagctatgaagcagatcatcattaatatgtgtagtaaacattctgagaacaacttatttcttacgaaaatggaatcaaaaagtgtgacagaaaatcaagcaaagactttgaatatgccaagagaacatgaagagaatatatttatacccaagccaacgctctttgtaagtacagctaaaaatatttagaattgtaatctctgcttctcactaaatatattttttccttctcaatcatatttgttttaaactaatttggatagtattatgaaaaggtctagcaatgtctatactaatgtattttctaaatgtgtacattagatgagagttggattttatgtttctaattagcatattgaacttgcttagaaattatcctaagtctacatttttcctcctcccacctataggaacaaattacaagggactcagaaaattattctgcctgatttttgcattttgggtatgaactcgatgtggctgtgcctgtgcatgttcactggagtcacgtgagccacatacacatgagaggggttggaagacaacgttggggctcttgttgattgctccaggccctcaagcgtcccggggtttttcagtctccaccttccatctcatgccaagactctgagcttctagacttgtaccactgcatccaactgtagtggatgctaggagtccaaactcaggtcatcgtgtgcgtgtgcgtgtgtgtgtgagtgtgtgagagagacagacagacagacagacagacagacagacaagcactttacccaatgagtggccttcccagagaatcattttaatttgcataacagtaaaaagaatagaaaatagcactgctcctgttgattataaaatgttgtcttctgagtctctcctacagaataagaacagcccatgctaaccagtacgtgcttgccttctcagacacttgggaggcttgcgcaggggaattgtaggttctaaaccagtgactcaactttgatgaagataatttttaaaataaaatttaaaggggttggatagccaaaaaacaaaagggacgctggagagtacacctgtcttcccagatgtggcaggcagaataaggtcactcaggaactcaaggccagccttatccacagagtgaactggaggccagcctgaagtatggagtaaaagccctgacttgaagaaagggatggagacgtgtatagaaagcactttaggaaatattgaaatttatgtgtctcagcaaataatacaaaaagaagtcaaaaggcaacagacagggcaattacttcaagatggttgcccaaggggctggagagatggctcagcaggtaagagcaccaactgctcttccagaggtcctgagttcaaatcccagcaaccacatggtggctcacaaccatctgtaatgagatcagatgccctattctggtgtgtctgaagacagctacagtgtacttacatataataataaataaatctttaaaaaaaaaaaaaaaagaacaccattttaaaaaaggaaaaaaaaaaaaggatagcaagttgatattccagttcagtgagcccttgaactttaaaaagaaaattaagtcctctagatgcttataaaaacgagttgagcacaggagttgtgaccccagccttctccttacacactcagacctggcctctcaagatcagtggtatggaagctattttgtgattatgtaatctaagctccgttttcctcctgtgctagggcctgaatctcctttcaattgtgtgtggtaaggattccactgttgagaaaggtcgcatagataggctttgctggactggcctccagccccatgcctgtctgcctgcagatgctgggcttacagatgcatgctacccccaagctttagcttcccattgacgatgacggagaccttcagtctgcagcagacaaatgagccctactataagggtccatgtcgcagaaatgtgggtcaaggagaacagcaagtcatctgagcactctccttaaggggcagctgggggaggtcagcagccgtggccactgtgcgccaccccccccccaaatccattgagcatgctcatggctccttcctgcctctgacgtcaccatggccctttgtctcaagacaccttctgtacattctttgcacatccactgcgtcagcacacacttgctgtcggggaagaaatcagttctttatctctccagtttggttgtcccagaagctcctaaaacagcgttctttacttagtagggaactaaactctgggaagtgaggcatctgcaacagagtcagcagcgcctgtgcagctagcgacacccatgggagtctctcactcagaaacccgcagctcagctgggcgtggtagctctcacctgtgttctcagcatgcgggaggctgaggcaggagactagccttaagtttgaggccagcatgaattacatagtgagtttcagtccagcctggactatacaatgatagaacctacctgaaaaaaaagaacgacttaatttttatttctaaagttagaaatactactctaggctcttccatatatagtttagtcttaagccctttgaaatagatttctgagtgagcttgggatgagggaataagggacaaatgatcccagacagtctcgtgttctgtccgtataaacccagaccaactggaactccttgaagttgggctctacctgtgaagccttagaaacccgtaattgcgtcctagcctgtagcgttggcaaacagactcattatgtctactgagcacagtcttcccttccttagaagttgtgctggttaaacactaatagagccttaatctccagctctttttctggatgccagcagtaatccagcaggcttactttgtctgcttttatcagtcactcttccttctcattttaacaaactttctcactgtgttagaatccctgagttacagattaatgccttagctggctacatctggatgacacaaaggtttttgtcttatcagttgatcgtctccaaccccccctgggactaatgagttacttctggtagccccagttaatctggtctgtttctacagcagctctctggttgccttacagaatgtggagtagtttacttggggacctgttaacattgtaccaattaaagtatttttattaatttgtactgtttctctataaaattataaatataattagcttaagcaagcacaagtacataataattaaggcaatgttcacagtaataaaagataatcattaagtatgtctcagtaatgctacatacataaataaatggaaattggcttcatctgaaagaacttatgtgagtggtgaatttaaaataaggcctccctgccaggcaatgatggcacacgcctttaatcccagcactcaggcggcaggagtggtggatctcagaaacctctctttgggcagggtccagggattcttcttgcttaaaaggttaattgtgttaataactgaaggaggcatatcaaacttagttgcacatagcaccattgtatgggttgaagggccaaaaactgttaggatggtagaataaaagagattccactgtttatctaaagatggaaaataaagaatagctacttgtatatctgaatcattatgcccaaaaatgttattcatggtctgttcagagttagaaaagtttttagagggtccatcagtgaataatttgcctctgtgagccacacccattctctagtatattgcatttatatttctttatattgtttatttctcttaaaatatctaatttggtatctaacccatatacaaacagaccatgggcacacctgttaacccatggttcatattatactaatcacttcatgctaatcaaaagttggtaatagattagaaacttataatcaactctaatagaattttctagaagttcaagcttcactagtgtactagtaatagcacatcactagctgaactatctggaaatgaagacttcgtcatttcatgagtcagatcaacctatcaaagctaccgttactcacttggcacttgttcacattttggtagtaacaaatgagaataagatgctaggtagataagaaatcatgtgttcaatcctaatgaagtacaaggtagcataaattataattaatatgtgagcaaaggcagacatttcccaatagcagacatgatgatacacacctgtcattgcagcaggggtgcctgatcacaagttcaaggccagcttaggtgatacacacataatcagaagaaaacagttcacccatggaaggccccacatgcacatctttgggtgataactgagattgaatacagtgtaatcccacatttttatgctagcagttgggaggtaagggcaaaaggattttcaaaaattccaggctggccagggagggctacatagggtctaaataaaaatgagtgtcatttcacacaactgaatgtggtacttctgtgcgctcctgattggactgttgcttagaactttacattgtctttctggtaaagaagcatgcttcctggtttagctccagccgtgacctagcccaattgtcctgtatgctctttcatatgacctaggagagacactgtgtagcaacgctcaaacctcgcgcccagactcacgtagaactgagcagtgtctgctgtggcagatccaagccacatcccttcatctcctttgtgctaagtaatagtataggccagtgggttagaaaatccctgtttgcactccagatggagataaactagaagtcaacatacaaaaatagactgaagtttcttcttttcaccataagcattataagggattcactctgatttgaacattgtacagttacatactgagacattacacaggaactccttacatttatgcagcttttatgtgtctcacacaggcggggatggagctccgtggcagagcattaacccagcatacaccaggccctgggtttgcctgaaatccagagcagtggtaaagagctaggcctgatgtgctgaggtcccagcactcagaaggcagaggtaggaggcttgccagttcgaggagtctaggctccatagtgagacccttcctgcaagacacatcgaactaactatacagggtgtaaaagcatgctatattctgtaggaaggacggagggttgagaaggtctagcctcttgcaaaggccatgcttgagcctgcccaagatctgtgggaatgggctctcaccatcctgccctgtgtatagtactgaggaaggcttagtttggtttggcttggtttggtttggtattttggtttttaagatagggtgtcattgtaaatgaggaaaatacctaattaaaaaaaaagatagggtgtcattttatagtcagctttaaactcactgtgaagagcaggctggcctcaaactcttagcagaacccctgcctcagtgctgggatgacagacatgagctaccgtactcaccacatggagggattctgtttccttcttttccagacagggcttctctctgtatagccctgtcctgaatttactctctagaccaggctggcctcgaactcagagatccacctgacatgaagacgtaaagatgtaagccgccaccatccaggccttgggggaatttttaaagggcagtattccaagtaaaaacacctttgctgttaagtatagaagactataaaataaaaaatatatagcaaaacatatgaatgatataacaattcgagtagctatcaggaaataatacattttctaatatgtatgtttctcacccatctccaaggtccaaggatgacgtgacacttgtgtagagcacagcctcgggtctctgtgtcagccaagtgctgaggctgcaggtgcactgccactcccgatgtacctggttggtgctggggaccacacaaggctttgttagtgtcaggcaagcactctacaggcagcccctagccttgagctctccttgatcctcctgcctcagcctcctaatgctggcattgcgcatagtgtccccaaggccatctcaaggtgtttttgtttaaaacttccactttccttttttctctattgtaatacaaaatgtgtgttctgccatcttaaccattttacatgtatagcttagtagtgttaaatatatgcaatcttataagataaatctctggatttttttccatcctgtagaactaaattcttaccatgaaatcccctttccttctcctccagccattggtaaccatcattctactctctgctcacaggaatttatctaatttagagttatctttctgtttattttactcagtgtagtgtcttcaagattcattcatgtatgttatatctctaaaaaaaaatagtttcacctgggtatggtggttcatggttgtaatttcagccctcgggaagcagaaatagagttatctgtttcacagttcaacagaaattcacaatatattgaaggaggagaattgacaggtataggaacagactggatgacagaccgcccccatgaggaaagataggaaatgtgggataatgcgttccagtctgttagaagtggaattttaagaactacagggagctgggagggtgctggaggctggctggtgactagcttgcttttatttttttattttttttttcgcccttttaagactggatctcttgggctggtgagatggctcagtgggtaagagcacccgactgttcttccgaaggtccgaagttcaaatcccagcaaccacatggtggctcacaaccacccgtaatgagatctgatgccctcttctggtgcgtctgaagacagctacagtgtacttacatataataaataaataaataaataaataaataaataaataaataaataaataaataaataaatctttaaaaaaaaaaaaaaaaagactggatctctctttgtagattttgctggcctggaaatctgtgtagatcaccaagcctggaactcctagagatccacctgtctccgcctttcaattgctgggattaaagaaatgcaccactagccctgtctcaaaaaacaaacaaacagaaacaagatatggagaaaatgtatagaaaagatttcaagctgggcatggtggtgcatacctttgatcacagacaggactctggaggcacagtgaatctctgggagttcgaagccagcctggtctctaaagtgagtccaggacagccagggttctctttgacatggagaaaccctgtctcgaaaaacttggggggaaaaaagcttacaagaaataagtttaaaattaagttctttctaatacttagaaatgccaacaatccacagaaagtattttactatgtactctttaaagcttgacttgaatcctaatcagaaaagtttcaaaacaatctgcttcacctttaaaaggttttttaaagaaatattaattggatatccaaaattttaatccaattaatatccaattttaaccagtctcaaaacttggtcttacatagaggcctgctgccaaatactctcactaatatagatcacatttagattaaaagttaacagtagagatatgtgtgttcattaaaccaccctttattgaacatcattttatgacttcccacagcgagtgcacagcttattaagtagatgattcaagtaaccacctgtaatgactgagtcaggcccagggctggggctgggtgtgcggctcagttggtagagcacttgcctctcaggcatgaagccctggaatcagtccttaaaaccaggcctgctggctgctctgtgatcctagaacttaggaaatgagggcatgaggatcagcatctccgaaacagcctcagctacatggctgctcttgttacacttcctttgggaggaaggtacagtccggtgtggcacaggctggccttgaactcactatgtgtccattctggctctcggtcttcctctgctttccaagtgctgggtgcatcacaggtccaacaacataactaatttgagacctgcacaggctatgtgaaactctgtctcaatagcagtaacccttgaagaggcttccatgagcgccaaaagaagtcctgaagttcagagcagggcaggtagagtagggataactttgaactgaggcctgaggcaggatgaccaccagttacagaccagtctcatcttagcagccaactctgtctcaggaaagcagaggggaagggcaaaggggacgatggaggacctagcttgaggtttaagtgatatcatgcatggtgccatttattctcctaacaaccctataaggcatactacaatcaaggacccttaagggggtatgacacagtcggagagaattgctgctcacaagcacatggaaaccaagtgatacaacagacaggaactgtgcaaagctatagccattcccaggactcaaaaggacctaaggaatgatactctttctttctatggaaactctagtgttgaggtcagagactttagctattatcaaactataaccagacaaaaagagaagggaattaaatacccagcttctccctctctgcacctgcaagccctgtctgcttcctattaataaacctagtcagaaactagcagaagagatggctcagcataagaaccaagatcaggtggctcacatgaccctagtgaggtggctcacaaccatctctacctcctacacctctgacctgcacagcacctacactcaagtgcacatatctacacatagacaaacatatacaaaataagtctttttaaatgtgaattgagacttctatctatcaaaacaataaggcaaggcagtggtagcacacacctttaagcccatttgggaggcagaggcaggtggatctctgaatttaagactagcatggttggagctggagagatggctcagagggtaagagcactggctgctcttccagaggtcttgagttcaattcccagcaacaacatggtggtggctcacaacatctgtgatggaacccaatgccctcttctggtgtgtctgaagacagtaatgctgcattcattcacaaaataaataaataaatctaaggctcgcatgctctacagagtaagttccaggacagccaagactatattagagaaaccctgtctttaaacaaaaagcaaaaacaaaaactaaaatcaaaagccgggcagtggtggcacacacctttgatcccagcacttgggaggcagaggcaggtagatttctgagtttgaggccagcctggtctacagagtgagttccaggacagccaggactgcacagagtaaccctgttacaaaccacacatcccccccccccaaaaaaaaaagcaaaacaaaacaaaactagaatcaaattatttaactggtaaattcgaccaaaccttttttttttaagatttatttattttatgtatgtgactatactatagctgtacagatggttgtgagccttcatgtgattgttgggaattgaatttttaggtcaaacccacttgctccagcccaaagatttatttattattataaataaatacactgtagctgtctttagacacaccagaagagggggtcagatctcatttcaggtggttgtgagccaccatgtggttgctgggatttcaactcagaaccttcggaagagcagtcagtgctcttacccactgagccatctcaccagcccctaccaaatgtttaagaatgaaattataacagttctccatcatctctttgaaaacttcgaaacaattcccagtttgggggttgggagtgtaactcacttgatagatttagtaagagtgcttacctagcatgcaggaagccctgggttctacctccacgtaaatcggataagagaaagcaagccccatcttcagcactggggaaatggaggcaggtgtatcagaagttcagggccatttggggcttgctggtataaagcccatcgagatatatgagacccagtcccaacggaagaagtaagggagggagagcattcacagcccactttacaaagccagtcctaataatgctaagcaccagaaacattataagaaaaacatagtccattctctcccatgagcatgtcttatagacactgaaattgttctgtataatactgtaaagacatatctttaaatatttgcccaaaacctaagaatttgtatcagcagtgactctagcatgcactctggccttcagcagcgataacagatgtgccttcactgtggagaaggatgcgggtatggagaagaggcagctcagtgggagagtgcttgccgagtgctcaagaagtcctgggtttgagcattgctcatgtggataatccaaacagttaggagatggaagtaggatcagaagtttaatgccatctttggctagagttcaagaccagcatgtgttgcaattgggaccatatctatgcctgccctttggttctgctgtgtactaaaacctgccctaaacaaagtctaaataacagaaatcagattggaaggactgactcgagttcccagtaatcccagcactcaggaaactgatgcaagatcgtgattttaagatcatccttagaaatatgtgttcaaagccagccctggtgtacctggacagtggctcttcccctgaaataaactgttaactttcctattgagtcaggggaatttatacaggcctgtggtctcctcaccagctcagcctcatctcacccaagctcaataaagatgacctcagtttctctccacttccagagccttccatagaggccctcagcaaagacagtgcaatcaatgacagccctccctgaagctctccccactctcaagttctctctcactcttcctgcctgagtttccctgtattgcctgggcttgaggcaaggagctgggaagccaggggctgggctggcataggtggccatgaattgcctggtgccctgccacctgaaggtgaaagtgtgaaaagaccccacatcaaccaagtaggagctcatttcttacataggactcagcaagccctaacctaaccgtgctgtgtcaatgcgtgctgttgcatgaattaaagagactggggttttgtctagcttacacaagataccccaggtgggtgtgccgtcctctgcatcacctcctccttggaatcacttatttaatatgcttttttttttcttctttttcagactaaaaaggaagcacaagagtggcccaagagtcagaagatgaagacctagtgtttggtgttgaagaaagctggagcctaacccagccaggccctcggctctccattggaacaggcctgtgttatcatgtactcctgaagtgcaatgtctgttggggagaaaggctcacttcaatcatgtacttgatattttcaaatataagtaacttaatgtttattttaactaatgttaaattaacaaattttagtatagtcagcatataaggtacaaatagtcatactttatatgtggttttatgtattttgttataaaataaattactctcatctcctgagtagactgtagagtttttataaatatggctttccctccctccatctgcctgctacaccatttaatctccccttctaagagagatccgagcatcctcactgtgccttccttcttgtttcacctccttggtctgtggagtgtggcatggtacctgcactttatggctaatatcacttgtcagtgagtacataccacgcatgtcctttggggtctgggttacctcgcttggcatgatattcctaagttccaaccatttttctgaaaaattcatgatgtctgtgtttttaatagcagaatagtattccattgtggagatattccacattttgttatcccttcttcagttgagggacatgtaggttgtttctagtctctggctattatgaataaagctgctatgagcataggtgagcatgtgtccttgtggtatggggagcatttattgggtatatgcccaggagtggtacagctgggtctcgaagtagaactattcccagttttctgagaaaatgccacgtgggttcagttctggtgttttgtggggttttctcttttttcttatatctcatattctcattagccagtaaaatctggaagaagtctgcttttccactggtgtttgttcagtttgctgtcaagtcgtaacattgtttgtcatggtgcagtggcaaccacatagctgttcagtgggaaggtaagtaatatgatttgttctgacttctcatacatgttcccctaggtatgggagcatgcctaaaatcccagccccaaaaaatacagatcagtcttacttgggcgctggaagtgtatctcagtgaggcagtgcaaggctctgcaccaaagtctagtgccactgcacaaggatgatggatgttctgcttaggaaatttttaattttgtaactcttccaatttcctgtcagctcagatagcaacataatgtcacattggatacctagaatgttgataaggactaaactagcacatgtcagcaccatttgaggtgtgtgtgtgtgtgtgtgtgtgtgtgacagacacagagacagagacaggcatgcaggcaggcaggcaaggtaactcatagcccaggttggcctcaaacccgaggctgtcctggagtttctctgcccctctttcctctcctgagtgctggattacgagtgtgccccatcacacttgatttatgagtgctggggactgaacacagggtttcttttcattcacgttgggcaagcattctgcaactgagccacaccccagaccatgcaccatttagtggaggacagaggggggccagtattggtaggttggttggtttttttgggaggcttttaaagcagcttgacctaaaatgacttacttcctcttggatagtgccatgacctgtgacctcttaacccttacctcctctcccactggtgaatgttttataaaatattgcctaaatgtaagaagggtccctaccgccgggcagtggtggtgaatgcctttaatcccagcatttcggaggcagaggcaggtggatttctgagtttgaggccagcctggtctactgagtgagttccaggacagccagggctacacagagaaaccctgtctcaaaaaaccaaaaaaaaaaaaaaaaaaagagtccttaccattctgaagatggtcccaccagcgagggcactgtgttctgtagttccggctcctttgagtattaatacttaannnnnnnnnnnnnnnnnnnnccggctcctttgagtattaatacttaattttcacagtatctctaattagacagtggttctcagcctttcttttgctttgttttggtttggtttttggtttttggtttttcgagacagggtttctctgtatagccctggctgtcctggaactcactctgtagaccaggctggccttaaacagagaaatctgcctgcctctgcccctctgccaagtgctgggattaaaggtgtgcaccatcacgcccggcgttctcaacctttctaatgcagaccctttaatgcagttcctcatcacgtggtgaccccagagccatcgaattatttttcctgctgtataactgtaatttagctagtgttgtgaaaggtaatgtagatatctgttttccgaaggtctgaggcgatccctgtgaaaggattggtcaacctctcccctcaaaggggtcacaacccaaaggttgaaaatcactgggttagggggttggttttggggactttgggttgattggctttggtttttgcctctgtgagacaaagtttcctgtgtcccaagctggcctcaaactctatggaatgagaaatggaaatagccgtgaaattctgatgttcctatctctacctccatacttttgggattactagtgctcaccaccaaagcttgtttggtggcagtagggctggaacccaaagctccatgaatgttaccagctgagctctgtctctaccccatcttgagtttttcttctgtgtttagttggtttgctttgaggagcttaataacgatatcgtagtatagattttagcctaagagatttaagagagcaacagagcctggagagttgtcctggcagttaagagcacatgttgctcttgcagaggatccagatgggatttgcagcacccacatggcagctcacagccatcctggcgatccagtgcttccttgggcctctggcatgtggggcagacaagtgagccaaacacgatgagcaaatctgaaaagagaaaacaggactcgcagaaagaacaacactgtcagcagcatggttgtgggctgcagagattgctctgcagttaagagcactaactgctcttccaagggtcctcagttctattcccagcaaccacgtgatggctcacaaccatctctaatgggatctgatgccctctttctggagtgtctgaagacagctacagtgtacatacatacatacatacatacatacatacatacatacatacatacaataaaagagcatgcctgcatgctctctgggagacagtgggcacattagagtaaattaatggcccaagatcaaaaagagttgaggttcagagagatgttcagcagtaaagttgcctgctgcccagtctgagtttggtccctggaacacacacggtcaaagtagggaacctactgatctactgtcctctgaccttcacacgtgtgctgtggcatatacacacactaataaagaaagaaatagatgtaaaaacatagaaggtggaaactagaccagggtctgaactgagtgcaagaatgaccacgctgctccgtgtagtgcagggctccctatgacttccttccaggtctcccactcccgagaaaggccttgttctttgagtcctttttagttgtttgctttttaagatagttttcactttgtaacccaggctggcctccagctagtgattctcctgccttgtgctaggacgatgggcttgaaccatcaggtacagacactgttaaacttgaaatccccctgtctccatccccaaagtgctaggattataagtatgcaccaccaagcccagttaaaaaaccatcttgatcaccctttgggggcttaggaggacagatgggaccatgcgcagtagtgtattaggtcaccaggacagattcctgggtagcaggcagatctagtcctgcagatttgaaagatgggctgtggatgtagcttagttgtgtgcctgcctagcatgcaggcagcattggcttcccagtaccacataagccagtcatggtgcaggtctataatccaagcgcctgggaggtgcggcatgaagatcatgttcaaggtcagcctacactacaattagggagttccagcccactctggggctacactctgagtctgaggccagcctcaccttgtaccaattagggctacccttttctcaaaacactgagaaattactccacaaacctggtatagcagtacatgcctttaatctcagctactagggaagcctagaaatgatagtctttgacctagctagttctagatgtgcctagccaacctagcaagaccctcatctcaaaaaacaaaacaaaacaaaacaaagaacagggatgtctcaaaccctggaaggagttcattcttaataattttctttttcttttttctttttctttttcccagccccgctcactcccttcggccatatttatttcatgtatgtgaacacactgtcactgtcttcagacacaccagaagagggcatcagatcctataacagatggttgtgaaccaccatgtggttgctgggaattgaactcaggacattcagaagagcagtcgatgctcttaaccactgagccatctctccagccccttaatcatttataaaatggtatttaaaaaaaaaaaaaaaaaaaagaaccatcttctagtgaccccaaaatgttctaaattcagtgtttctactagtcaggagtgttttaaattatttgtttatattatatacatggtatttttttatgtctgtgaatcatatatacctagtgtccaaggagagcaaaaagggacagtcaaccctggagtgacagacagcaggaagagagaggccaagtgatcagttctaaaacttgtgttgtctgagaggaaaatactgaagaggtagcaaaattacctgttagggaaaaaaacttgttattagagattcttacaataataataaaaataatgtcaacaggtggtcatcacacatgcctattatccaaggtggatgaatctctgagttcaaggccatcctggtctacagataagttcaaggacagtcagagttacacaagaaacacacaaaggaggaggaggaggaggaggaagaggaggaggaggaagaggaggacgaggatgactgaacaactgaagcaggatgattgcttgaggccagattctcttggcagcatagtgaggccttgtctatttaaagtattttactttcaaggggctaagcatggtggtgatggacccctataatcccagaacattgcaattagagaccagcctgattcacacagtgaattccaggtctccaggccagaggctatacaatgagaccctgtgtcccagaggaaaacaacaaacagaaccaaatcaaaagctgcttgtttctgatgataataatgtgtgttattgtccaacttaggaagctgagacaggcaagacgatgtctcaaaaaaaaaaaaaagtagctataactttctattgatattggatagggtagccatttgtacaaaggaaaaatagcttaatagtactttgttttaatttaatgaataactagagcttccgagaaaggtgtcctgaggcttagaaatcgctggacacttgcagtcaggtagccagcaggagtcctcagggggcagcttttgtttgggttgagtccataggccaatcttcaggtgtaaactcagaaatgccatcctctgtgcaggtgcaacgtcttcgtttgtttcttcctttgatgtaggactggctttagcttcatggccctgcggggcttggaaatccctcttgtctataaggattgccaaactttgcaacaatcctgctccctctgcctctggagtgctgggattgcaaagtacacctcatgcatggtggtttccctctcctctctttccattctgtaattaatatatagtttctgcccggatccaagctgttccttttaacacctgcctatttggcacttctgcttctgtgtccactgccccttaaacttacacaggttcaaaatgaactctccaagtttgtcctttagtgttccccctttcaagaagcaatacaacctacctgtcgctgtgactaatgactaatggtcattcctgatccttccccatacttccctcaccaaaccagaccctcagggcccaagtccgaagcctcattgctctacctcccaaaatgtttttgttgttgttgttaacatttgattattattgttgttgttatttgtttttttcaagacagggtttctctgtatagccctggctgtcctggaactcactttgtagaccaggcgggccctgaactcagaaatctgcctgcctcttcctcccaagtgctgggattaaaggcatgcgccaccactgcccgtctcatttgattatttttattttctatgtgttagtggtttgcctcgatgcaggcatgggtaccacacacatgctctctaatcatagagttcaaaagaaggtgtagcatcccctagaaatggagttagaaaaattgtgacctgcgaaccaaacctcggccccctgcaagagcagtaagtgttcatgactgctaagcaagccattgctccaaccacaatcctgacttctttgtggatttttttaaacaatgaatgaatgaatgaatacttccaaatatataaaagactaaagggatatcttggagagacagaatcactatcttgattatggtgatggttttgtgggtattaagtaatcagtgctcattacatggtacctgtttgatgtggaagccacaggatgaatagggtttggcacaggtaggcaagccctgcacctctgggtcacattcccagcccttaaactatacccccccccttttttttccaacagagtctcacgtaacccaggctggcttagccaaggctagccttgaattccttccatgttcccctcccagttgctggaattacaggcatgtgccaccgtggcttaaattacacctctttagaatgtgcagttaactgttttactcctcaaggatgcctttcaaaaagaggagaaagtcccggaggtgatcacaatcgaaaagtaaaagatctgggtcactatcactaggaatgctaacgcaatgcgataaacggcagcaaggaatttgtgtcacctgacacacaatcagtcttattaccgtcactaaaacagatacaacccgaaatgacgcgcttcttagggtgatataattgaaccagaaagcaatacctttgcaaagtaaaaattttaaattagcccaaatcaaatcttcaggtcagatgtaatgtccaatctttagacagaaaaacaaaaacaaaaacacaaaaaacagaaatgccaagctagttgtaggtagctcagtggtctcctagcatgcacaaagccctgagttctagcccctccgtgcataattcaggcttggcaagactgcctgtttcccagagctctggaggtggaggaaaggggatcgggagtccaaagtcatcgtcagctacataataaattcacagatagcctgggagatatatatatatcacacaaaaaaaagaaagaaaggacgagaggaaaaggaaatggaaagacgaaggaaataaaatccagctaaaggacggacactgcgaggatgcaacttatgaaatcttgaacatggagcattctgagtgttaataacactgctttggagtaggcagaactatggaagaatagggttcgttgttatttagtggagggggagaatcacaagttcctggtgatgtctagttggaaatgaaagccttcagctctggagttttatacacgcatttcattccctccgcgtgaattccgatcaccagctcaggtcaccccggcacacgctcctcgctaaactactccagcagtttctgtcacacgcttactgtgacaaaatacctaaggacctacatttcttagaggaaggaagacttgcttgggcaggcaggttcagttggcaccattgtctttgagcctgcggtagagccaagccctctgctggcggcggtcacgtgacagagcaagctggctcatctggccatggccaggactcagagagcttcagtagggtctgtagcccatcaaggcctccctcagtgatgccgcttgcttctaccagaccccagatcttaaggttccgttatcccctaaagctgcttgctgccccagggtggtcgtcacactttctcacatgctgttgggggacccgagtctcatgatactggagtgctgctactcactgtatgcgtggagcacctaggacttaaaatgtaagccaaaattatccccaagtgttgtctctaggcctatacattcccgaagcctagaagtcctttctctgtttcctgttatactttttgtttgcttgcttgagaactgttctcgcgtagctcctcctggccttgaaaactctatacccaaagtgggccttgaattcccgatcccgcaccttcattgcaagtgctgggattgccaccactgtgtcaccatacctagttttttggggttttgttttttttcttttttgtaagtctgaacaattttcaactaatattttcagggaggagatgggacaggtgttaaaaggaacagcttggatccgtgcagaaactatatattaattacagaatggaaagagaggagagagagggaagcgaccatgcatgcgtgcatataatacattctgaatgtattatatgtaaaaaaaaatcttcagtaaaatatttttatttaatctttgaaaattatatataaacatatatgtatgtaccttaaagataattactcctactccacctcccaggacccttgaagcttcatctcatgtactcacgatgaatattgccccacattgtaagaaatagatttgaaaaatagaaaaaaatacaatttaagtaattatagcctgaaagccagtaggtcatgttttaacaaaaaaacaaaacaaaacaacaacaacaaaaatcaaacctttttagccaggtacagtggggcactcctataatctcagcatttgcgaggcagaggaaaagatcacaagttcaacaccagcctgggcttacatggtgaagactttaaaaaacaaaacaaaacaaaactctgtaactggccagacagatagatgacagttgccctttaccagggctgtttttatcattgctgtaattgatttgatctcatcaagaaattgcatatcggtgacacatttttttaaatggtttactagtgggccaatgaacttttttttttttctgaaacattgcagaaaacatttctccccttccagaccagaagtgcccattgccttaaaggctggtgtaccatccttgtatatgagattgacgatgtcgccttatccttggctacaaagtgagagtctgtctcataaaacaaacaaatgggggtgatgaggaacccactaatatcaagaattttcttttgtttttaaaaacactgcagaccgctcccccaacacacacacacacacacacacacacacactcgctcgcgccctttgaaatacttgcttggcctaactttgctaagtacacttccgctcggactcccttaaagcgctctgtcgtatggactaaacaggtgaaaggcacacacatagccaaagaacttcgcagggaactgagtcttgttttaggccatgctgaccccaaacctgtgatctttcttcctcttttctgagggcagaattagtaggcactgggctactgcactcaacaaaagaattctatacactcacccctatacttgaggttgaagccaggctccagagcacgcaagataagagttctatctttgggctatagcacaccgcaccccctctttgaattgaaaaagaacattagaaatttgttggcaaaaccagaacatgggcttatcagtagcggaacagttgcctagcctagcacgtaggagtcctgacttgccattctctgcccctcgggctccaccagaagaaggcaaagtgaaccctgagccttgccattgttacagaaatacagcagtacacctcagtccacacagtttcattcaagttgaaactaaagacaggacagtaaagagctccaaaaatattcatatttataaaacccttttcacgtgtttcttttaatttttgagggagaggacaaggccccatgtaaccgggattgtaccaaactctacaaagccaaggatgaccttgaacaacggattccctagcgtctacttcccaaactagagattacaagtttgccaaacccactggcatccttgactctgcagtctaggctcagtctcctaggggctagaattactagtgtgtgcagtcacacattttttttttccaaacaaattttcacacattctttgggggcagagtatgaggggaaagaaatcatattatggataaaatatgtctagctctccaagataacaggggcatttttcagctcaaatatggctgggtgacaatggttgtgatatctcctttgtgtgcgttcc

SEQ ID NO: 532 - DNA, 3023 bp, Mus musculus
cgtccctgtctgccacgccccctcgtcaccacgcggccccgcgtccacgcacctggtgcagcagcacattggtgtccggcagaaggtagtgcggccacgggcagaggctgctcgcctggtcccggggctgcagctccagggccgggcccgcgtgcgccccgccgcaggccgagcaagccggcgcgccgcagccgatgtcatcccgcagaagattgattcaaataataaaatgtctcgcaaaattgccaaggaaccaaaaaaagtaaatatctctagttctctggagtctgaagatattagtttggaaacaaccattcatacagatgatgtctcatcatcagaggagcgagaaggtaaagtcaaaatcaccaggcagttaatcgaaagaaaagagatacttcataatattcagttactgaaaatcgagctatcccagaaaaacatgatgatcgacaacttgaaaatggattatcttacaaagattgaggagctagaggaaaaacttaatgacgcccttcaccagaagcagctgctaactttgcgattagacaatcagttgactattcaacagaaagatgccaaaaaatatcaagaactaatgaaacaagaaatggaaaccattttattgcgacagaagcaactggaagaaacaaaccatcagctgagagaaaaggctggagatgttcgccgaaatctgcgagactttgagctgacagaagagcagtatgtgaagctaaaatcttttcctgaagatcaactctctattcctgaatatgtatctattcgcttctatgagctcgtgaacccattaagaaaggaagtctgtgagctacaggtgaagaagagtgaactctctgaagaactgagtacaagtaaaggccaactgaagcagctgacggagacatatgaagaagatcgaagaaacaacgctgaacttctaattcgatgtcaacgtttgaccttagaattagcagacacaaaacagttagttcagcaaggtgattaccgtcaagagaactatgacaaagtgaagagtgaacgcgatgctctggaacaggacgtactcgagcttagaagaaaacacgaagtacttgaagcctctcacatagctcaagctaaggaaaggaatgaattatcaaaggaggtcagcagcctgcagcagacagtcaccctgctgcagaaggataaagactacctcaatcgccaaaacatggaactcagtgtacgctgtgcccatgaggaggatcggctggaaaggctgcaagttcaactggaagacaccaaaaaggctagagaagagatgtatgagaaatatgtcacagaccattataaaacagaatatgaaaataaactacatgatgaactggaacaaatcaaattgaaaactaatctagaaattgatcagcttcgaagtgcctctagggaaatgtatgaacgagaaaacagaaatctccgtgaagcaagggataatgcactcgctgaaaagaaccgagcagtggcagcggaaaaggacgctctgggaaagcatgagcagctcctagacaggtacagagaactccagctcagtacagagagcaaggtatctgagtttctccatcagagcaagttgaagtcctttgaaagtgagcgtgttcaactcctgcaagaggaaactgcaagaaatctcacgcagtgccagttggagtgtgaaaaatatcagaagaaattggaggttttaactaaagaattttatagtctccaaacttcttctgaaaaacgcattaccgaactcgaggcacagaactcagagcatcaggcaaggttagacatttacgagaagttggaaaaggagcttgatgagataataatgcaaacagcagaaattgaaaatgaagatgaggctgaaagaattctttattcctatggttatggtgctaatgttcccacaacagctaaaagacgactaaagcaaagtgtccacttggcaagaagagttcttcagttagaaaaacaaaattcattaattttaaaagatctggaccatcaaaagaaccaagtaagacagctttcacaagagcttgacagagccaattcactgttgaatcagactcagcagccctacagatacctcatagagtctgtgcgacagagagatgccaagattgactcactgatgaagtctacagctcaacttgagaaagatgtcagcaacttaaataaagagaagtcagccctgctgcagacgaagaaccagatggcactggatctggagcagctcctcagtcaccgcgaggaatttgcagctatgaagcagatcatcattaatatgtgtagtaaacattctgagaacaacttatttcttacgaaaatggaatcaaaaagtgtgacagaaaatcaagcaaagactttgaatatgccaagagaacatgaagagaatatatttatacccaagccaacgctctttactaaaaaggaagcacaagagtggcccaagagtcagaagatgaagacctagtgtttggtgttgaagaaagctggagcctaacccagccaggccctcggctctccattggaacaggcctgtgttatcatgtactcctgaagtgcaatgtctgttggggagaaaggctcacttcaatcatgtacttgatattttcaaatataagtaacttaatgtttattttaactaatgttaaattaacaaattttagtatagtcagcatataaggtacaaatagtcatactttatatgtggttttatgtattttgttataaaataaattactctcatctcctgagtagactgtagagtttttataaatatggctttccctccctccatctgcctgctacaccatttaatctccccttctaagagagatccgagcatcctcactgtgccttccttcttgtttcacctccttggtctgtggagtgtggcatggtacctgcactttatggctaatatcacttgtcagtgagtacataccacgcatgtcctttggggtctgggttacctcgcttggcatgatattcctaagttc

SEQ ID NO: 533 - protein, 820 aa, Mus musculus
VPVCHAPSSPRGPASTHLVQQHIGVRQKVVRPRAEAARLVPGLQLQGRARVRPAAGRASRRAAADVIPQKIDSNNKMSRKIAKEPKKVNISSSLESEDISLETTIHTDDVSSSEEREGKVKITRQLIERKEILHNIQLLKIELSQKNMMIDNLKMDYLTKIEELEEKLNDALHQKQLLTLRLDNQLTIQQKDAKKYQELMKQEMILLRQKQLEETNHQLREKAGDVRRNLRDFELTEEQYVKLKSFPEDQLSIPEYVSIRFYELVNPLRKEVCELQVKKSELSEELSTSKGQLKQLTETYEEDRRNNAELLIRCQRLTLELADTKQLVQQGDYRQENYDKVKSDALEQDVLELRRKHEVLEASHIAQAKERNELSKEVSSLQQTVTLLQKDKDYLNRQNMELSVRCAHEEDRLERLQVQLEDTKKAREEMYEKYVTDHYKTEYENKLHDELEQIKLKTNLEIDQLRSASREMYERENRNLREARDNAEKNRAVAAEKDALGKHEQLLDRYRELQLSTESKVSEFLHQSKLKSFESVQLLQEETARNLTQCQLECEKYQKKLEVLTKEFYSLQTSSEKRITELEAQNSEHQARLDIYEKLEKELDEIIMQTAEIENEDEAERIKYGYGANVPTTAKRRLKQSVHLARRVLQLEKQNSLILKDLDHQKNQVRQLSQELDRANSLLNQTQQPYRYLIESVRQRDAKIDSLMKSTAQLEKDVSNLNKEKSALLQTKNQMALDLEQLLSHREEFAAMKQIIINMCSKHSENNLFLTKMESKSVTENQAKTLNMPREHEENIFIPKPTLFTKKEAQEWPKSQKMKT

SEQ ID NO: 534 - DNA, 254396 bp, Homo sapiens
gttcaaaagaaaatgaactcagaacagaactatatttaggtaagaacactattacatatgaatacctccaaatttccattttcgagttctcgacaatgtagagcatcgtctatatcagtacatcctggtgggtctacactacaaatacacagatgcctcaggtcttctcggtttttcatgtcctagaagacatgaaatgataaacaaataaattatttccaaagcacaactacaacatattaatagctcttgtgaaatcagtaatatgtatacaaaaacaatttagctgtattttcttgatgacaaccacatttctttttcctgcactggagcagagagacaccacgtatgatttgtaactaatggtttccttccctttgaaacatttaacatatgaaagtgtctgccacatagaaaaacttacccttcaatgaagaagcaaatgacttcttctataattcctaagaatgctatacccaacaaaatgcaggaaaagagggcccgtggtgtctacatatttaaaaacacatatagaaattaaacaaaactaggcaggatataataatttataaagtcactacaaattactttcaacttaccttttcagtaatgctccagggcatctttggcagaaaactaagaacagcctgtgaaaaaggctgatggggaacatcgtgttcaagtaacaaaacttctgtttcagtctctttctctccaacatcacctaaatttctcacaaagtgtccctgaaaccaagaggcattattagaaacgcctattttatagcaaatttacatcttatcatattaaattcttcagcatttacatatcttctcagtattcctaaatattcccataacgatttctgaaaaatgaccctttagtaaattagacaagacttctcaactgatttatgatggaaactttgtaagggtccagctcttacattctaaagcatctatttcttattaatgttcaagtttaaaatgtgcttccaatataatcttttcaaaatttgttgattagaatctatatagaactcacttttcatagtcatgatcaataaaacttataggtttaaaaacttacataaaagaggccaggcacattggctcatgcctgtaatctcagcattttgggaggctgaggtgggtggatcacttgaggccagttcaagaccagcctggccaacacagcgaaaccctatgtctactaaaaattagctgggcacggtagtgcacgcctgtagtcccagctaatcgggaggctgagacacaagaatcgcttgaacctgggaggctgagggtgcagtgggccgaaatcacagaactgcactccagccggggcaacagggtgagactctctctcaaaaagaagaaatttacataaaagtaaccaaatgatttacactggaatttcataaaattaattttcaaagtagacatgctacttaccaggtcactttgtgaaatatctctaaatttcagtacaaattctacataaaagtagattgtttttattaaaagcagaaatactattcacaaaattttaattaaacatccccacataaaattaatactttaagcttacatttggatatctggaatttctgggccaaccatcaatagcaacaataattctccgtccttctaatgtggaagcctgtctggtttctatgcgaattcgagggattctcttatcagcaggtgtaaagagatgtcttcttgactagcaaaaattaggaataaagattttacacaaaaaaaatctgaggatggaggcaaaagaaaggctataagttctattaaatgtttatcatttttttattacatagtaaatgctctttactcacctccttaatgtcagacttggaaagcatgccacaatatggtctccaattcctttttattattcctacaactctacctgtaggcttcaacattttctcgcttacagcagtcttaagctgagatataaaaattaaaatgttcagttatattcctctaagtattatcaggcaatttcctttcaaaatcaaaatgcatacatggatactaatccattcaggcagtaaattatgacataagactacagaatgttgatgtttcaacattctagacaagaacatgcatgccaaaccaaaccacagacattctctcttgataataaagtactacaaaacaatcaaaaagcaaaaacaaataaataaatataactgaatacgtatgttagaactcaacacttttcaggattaacatgaggatttactgactaaaatacacacacaggtctgggaattagattagggttttagtactagtttgtacaaattagctatgtggtatggtgactagttccctttggacctttatttattaattctaaaggttcttccttataaaaaataaaaacccaaataaagagggtctgctattagaaattacaaaagttcctatggtatttcacctcttaacactatccaaaggcctggactctccatggataattttatagtgagactccagagcaatgaatataaatgatggaaaaagaagaataaaaaactgttacatgcattccaactatttataatattgtaattataaaatacagaaataggccatatcaagtagacttagcgcatatcataagaaataactgaaagtattctcttcataataaatatggtatcagataagttgcccaaatataatggcccagaattacgtctattatgttaagggaattttacctaaagcattttctaaaacatttcctaaaacattacttaaagcatttcagaaaatgttaaacacatatttacttaaatctcactaagtctaataatatacttgactgtcacagattttcagtttcatacttgtattaactcatactaacagtctgtttgcatttaaacccatttatttgagcaaattaagacaataaaagaaaactacatagaagagaaaaaaaccatgtgtatgacatgcgttaaatatacagaactatgattttatgcaataaatctgaaagcaatgaaacttgttttccaaagctgacatattaataatacaaagctacacagacaaaaaaaaatcctgcttagattcataccattcgttctgtctcttcttctttctccacatcttcttcattttgaccttcatcatgtaaaaccacagaagatggtgctacccactgactcttggggagaagctccacagccacaatatcttcgtgaacagctctgtttaaatgtttaagtccctgtaagattatctgtttaaaacaacagagggcacgtgcccaaattatttttaatggcaatataataaagggaagatcatctaacagatatttacatacactctgaatatctctatggaatctctatttctcctttatagattttctttctctattgtgtccctaattccacaactttaatttctcaataccaggtagaaaaaatgtaagtcagaaaacacaggctgtgttcatggctccatcataacttacactggtaacaagagactttggaaaaattatttatgctctctaaatctcaagtcctgattggtcaaataagagtacactacctagtttttataggttgggttgaatattaaatgaaatgccatgcgcaaagatttaaaaaactacctgacaaattgtgagcactgcaaaaaaaaaaagaaaaaagttactatttgctttaaagtatgtgaagcctcatatgttacacaaatagtatttaccattaagtgttcataatatataaaatatcatctttattttagtgtataaggaatttatttatatacttgcctctttattttcttcactgtcgccatgaatccatactgtagcttccaagtaattttccctgctagctctaaatgttccttgaaggtatgtaccagattttatgccttgctgtagcttacttaagggaagatgctctgaaaatattatttttccactttctatttcattctatgaaagaagcaaaccaaaagatgccgctaataagtcttctgttcactcaatacacaactattattaatatcagagaatttttgaaatctacattatgatatacacaactctgaataggagagaagatagcagtgtttcttataggccagtgctaacaaaaacagctttctatgatgaaggaagtattcattttgcgatctctaatatggtagccactagacacaagtttctcttgggcacttgaaagacagatagtaccaccaagaaactgaatttttaatacatattaaatttaaatagtcatatataactaagtggctacatattagggcaatactaaatctgtatttcaaaaatcaaacccaacttttatcttctcatttccttttggtttcataaagtatcataaaggtaagaagggatgacagaagtgtaaagactggatttatgtataatgtcctatcacttaaaacctatttctataacaagggctaccatttatatttaccatacctatgtgccaggcactaggatgaaaattgtattaatgctacagttatcatcttatttgatccttataacaacactatgaagttattattgctaaacattatatatttatatataagaaaatgaatgctcagaatttaattattcccttagcactccttctcacatcagctattgtaatgactcctttactcacctctctgcctctaatctttcctggataaaatgcttaatgttacacactgacatgagagtggtcttacaaacaaataccatttccaatcattctctcctgctccaccaatccacattcatataccattactttttcttagcctgacatataaggaagggatctcagaatcctttcctcttcatagcagcccttcagggagatctttataaatcaattgaaaaattactaacctacagaataagttctaggtctttactatctggacactcccctccctcttctttcctctgtctgcagtgcctgccacttcatttgtcagcagctactctttattcacaaatcagccatggactccgttcattttttcctcaaccaaacagtgctaccaggtaccaggccctactcaggttaatgggaatatatctattttagaaagttaactcctttaggaatggcatttcaataagcctatgacatccactcctgtttataacacaactattccaaatccagcttacccaccgacattccaatttttaaatttggtaactatatgcctaatattccaaagtggctattttaatatttttacttttcaaaaacaaaacaaaaacataccccttcttcagacaaacaagcaagacgatctatgagttcggggttagcagttaggctctttacatattcttcacctgaaaaaataagtttatgttgtttttgataagtgttttttccttagatatgaaaaaaatggatagtcttgtttgcgacagtatacacgtcattctttcattcattgagacacactgagagtctcactctgtctctcaggctggagtgcagcggcgcaattacacatcactacagcctagaatccctgggctcaagctaccttcctgccttagcctcccgagtagctgggactatagttacatactaccatgcacggctttttttttttttcctgtagagctatagtctccctatgttgcccaggctggtcctgaactcctggtctcaagcaagcctcttgccctgacctcccaaagtgctgggattacagcacctggcctcaatttatttaaaaaacaaaacccaaaaatctgttgatgtgatcatacctaagcagaagcaggggttccagtatatttatgagatttcattgctaaaccagttgcaaatagtgaggggaaaattaacagccactgggcacaacatatttaggttaaaaactatgtgaaatttaaaaatacaaaaatatcacatgaagttatataggactacgaaaatactaaatagtaaagtgaacatctgactataggcctaatgattatttttacacgcatttgcaaacatgcactaagtacttctacatttagacttacaagtgaaagctggtattccttcttctatggctttctctttgtttctcctgtcatttgttatgaagataacttgcagctggttgtctgctgacatttttttcaaatgttcattgtaccattttgctgctactcgaatcgctctatcattcctgtcattagcattttctccctgttcttgttctacataggtttctctaaatggaaagaaaaaacgaaataaaaggaaatcagtagaaacaaggatatgtgaaaactcttagcacataaatgcttaaccactaaactagaaaaagtcaatggtatatcttttctcttgaatgtattcagatgtacacctcagagaagaaatcaagattcttataattaagtttttaagaaacaatttgcttggaaaagaagaaaattatgttattaaggggacaagaaaaaggctaatacaattttatttcctaaaaagaaaaattcaagatcagaatttatactttaggttgagacactaaataatagtttgttgacaaattataatacaatttcacaggtatgataatcagatttcattcaaactgtaggttaatagcaattcctaaaagctacaaatagtataattagatcatttataatcagaattctacagtcattaataaataatgcatataaattatccatggtaaacactaatagctgaagctatgtagagactgaaaagtcaggtatattaatagatattacgtatttcttctatctaaactcccaagtatgtcaacacattcatctatttctttaaatctgttcatcaaagccaggtttaagtacaacagcaaagttcactacaatagcttccagtacttaatggtaatagattcaatttaataatttgatttatattaatagttttagaattattttattcctcatcgttgaatgcacttgctaatgctttttttttttttttgaaacagagtcttgctctgtagctcaggctggagtgcagtggcatgatctcagcttactgcaacctctacctccgggttcaagtgatcctcccaactcagcctcgcaagtagctgggactagaggcatgtaccaccataaccagctaatttttgtatttttaagagacagggattttccaggttggctaagctggtctggaactcctggcctcaagtgatctgcccacctcaacctcccaaagtgccaggattacagacataagccaccacgcccagctgctaatgttttaagctcatcagtgaaagacacagtcataaatttttgaattggttttaaacttgggtctttctgcactgaaaaacaagtgatgttgctatttctggatttcaaggaggtactaacaataagaagcctacaagggctttactggtattctttacaagaacattgaagtttgagatataagaatcaagaaagttgagatattaaggtttttaaaaatgtgcataatctgatggaatttcattaccagaagtctacactctaatccaatggttctcaattgagtgaattcacccctcagggcattttgtatcattacaactgagtggtggtggtggtggtggtggtggggggggtaaggggtggtgatcctgccaaataggctaggaacactgttaaacatactacaatgtataaaacagcctttccaccacaaaaaaattattcagttcaaaatatctataatgccaagattgagaagccctgatctaatccaataaaagtaccatactcatcatagattatttatgtaatataacgtaataggcaatatcatatttttgagaccacacactgagttcaaaggtcttgaatctaaaagcacaacaaagaattatattcctggccaggcacggtagctcatgcctgtaatcccaccactttgagaggctgaggcaggtggatcacgaggtcaggaattcgagaccagcctgaccaacatggtgaaaccctgtctctactaaaaatacaaaaattagcctggcatagtggtgcgtgactgtaatcccagctactcaggaggctgaggcagaagaatcgcttgaacttgggaggtggaggttgcagtgagcagagatcacaccactgcactccagcctgggtgacagagtgagactccatctcaaaaaaaaaaaaaaaaaaaaaaaaagaattctattccttaacctaatcttgctcaatgtaatcagctgcaaagtattaaacttttaaaaagaccattaagaataaatctactttctatttttaaacaaaatagaaacttcacaaactcatatattttattaccctctgttagttgttcacataatatggtattccaggaacttaagcaaatctcatcttccaagattctatggtccaactcatgctaaaaccaattcaaaatgaaaacattttggaaattaaagtacctattgtagtctaggagtcagcagaccttggttttaggcttgagcccatcaatgcctgtgtgaccttagagagatccacttagcattatcttctgcacagccatgtaagaattaaataaggtatgaaatctatcacttatcttctgacaatgtcataaattactcacaggaaccctctcccgaattttgctaatcctgtggttttctgatatttaacgtaatattcctcctacctatggtgctcattagtgaaagtatagaaatgcttctcttggttattagtcacatctcggatgcgtttatatacgggggcactgcgatttctcacttcttgaagaactgtttgtagcacaattacattcctgatggcagggtcctcaagaacatcaatcttaaagaaagataaagttaatttttcctatattcatttgtaaatagctctgtcaaacataaaatcctgttttatgttgggcataaatactttatgttttaaaaacactgaataagttaagccaagaagctatttggctatagaaaacgagacaatagtcactaaacccttcagatctattaaaaaaagcacacttaaacagaccaatcacaagacttcgtagaattaagggtattaataaaggaatacgttggcccacatagttttttgttcctaggcacttacaagctgcctgggagtcgcaggctggaggccacagaagcccaggtccccggcctccaggcacttacaatctaaggcagaagagacaccaggagttagaaaaataacgtgtctgaactacgactccaagaactaaattttttaaagcacaaggaaaagaacctcggcctggggaacaggaagcttcggtcccgagggggtttccctttcgctaggtatgtgacactgccaaagacccgcctccctgggcctcagtttccctgtcatacccccttgtccccgtggggccgcgctgtccgcggttcgcccgcccacgcacctggtgcagtaacacattagtgtcgggcagcaagtagtgcggttgcgggcagacgctgctcgccgggtcctggggctgcggctccagggccggcccctcgtgcgcccctccacacgctgcgcacccgggcgcaccgcagccgatgtcgtctcgcaggtagtgctcgcgcacgatcttcatcacgccgcccgcccgggtcttttttaagaacgtcttggacttgagcatcttgcctcgccgcgcagaatcctaaccccagcagcgctcttccagcaaaaggcgtcaatctagaatacgcctaaccccggaggttcttccctttccattcccggatattagtaacacttctcgcgggaaaatgccgagataaacattggttggctctctgacggccgcggggattgggcgagagtggggaggggcggcaaagcaaggcgaggagccatttccgcccgtggcctaggcggggcttccttctggacgccacctcacaacgtgtgttgctttccgctcctcggaacatccgggagagttgacttccggcggcttgtgggagtgctggttctgtcctccttgcgggtgcggagatggttgtcttggttacgggtcctaacggtcccctgccttgaaatcccttgttgagggcctgcaaccttgtgcttccgaccggagacgcctttggtccctcggtgtctgcactggctgctggtcaaggcttcagtgtggagtaattgacactttcgaggtaacttgcgactatcatcgctttctttcccgcgtggggcaaggaatcccccgagctgccaagtttggggcttaattttcacgccgagtgtataggcagtccccgtctcgggccctttgtaatcgaggagagaatttgtctttgaattcactttttcttacctatttcccttcaaaaagaaggagggaggccgatcttagtatagttctcgctgtttcccctccacacacctttccttatcattcagtttagaaaaactgaaatatttaatagcataatttgttatatcatgaggtattaaaacaaggtagttgctaacattcttatgagagagttagaagtaagttctatttagaatttcttgaatttttcttatatcctgttgttttcattctgctatctataaaaaatgtttttgtccccgttttccctatttaaaacatcttcaatgatgcctcattgcctgtagaataaaatccaaccctattttgacatttaaggccttccagtcttgatcgttaagggcgtgtgtgtgtgtgtgtgtgtgtgtgtgtgtgtttgtgtttgtgttgggggggcggtgaaaggagtaactattccaagacttggctttgtttttttacttccacttacgtatcattaataactgcatgatttctcctttttaccatgcctgtccaaatctttaaagattctaagtgctacctctgtgtaacgtttccctgaccaactcagacgtgatttctgttatctttgagcatgtgttggttttagtggtgccattcttgattataatgggcttttttcttcatcttgtacatttctttgtttcctccaagtaagattcctccccgcaggaactgtttttttaagtttctcgaaggctgacttcatattaggaattaatgtgtttgatttgagcattaacttaactgcaataatctgttctagatttgggatgcagtaaattgcctaatatttatttaaggaatccttagtctctctttaatacagtccatgatttctgtagttaattttatagtacatttgaattaatgttttttaacctacagaatattaaaatcaaattagagaagaaaactgatccataataataaaaatgtctcgaaaaatttcaaaggagtcaaaaaaagtgaacatctctagttctctggaatctgaagatattagtttagaaacaacagttcctacggatgatatttcctcatcagaagagcgagagggcaaagtcagaatcaccaggcagctaattgaacgaaaagaactacttcataatattcagttactaaaaattgagctatcccagaaaactatgatgatcgacaatttgaaagtggattatcttacaaaggtaagatcaggtttaaattttgtgttctatatgctttattgtcttcaaacggcaggtaaataagaattaaatacacacattatctgaacttgaaatgatacatttatatttcttgacaagtacagcctttaaataattttggtgttcatagaagtagagaatagaatggtggttaccaagggctggcatggttaggggtgaaggagggttggggagatgttggtcaaaggatacataattacagttgaataggaggaatacattcaagagatctattggacagcatggtggctatagttaatgacattgtaatcttggaaaacattgtgtttttgaaaaacacagcagatgttaagtgttctcattactaaaataactatgtgaggtaaaacattttttaattagctagagttaaccatttcacaatgtacgtatacttcaaaacattatgttgtacatgacatatacacacagttttatctgtcagttgggatcacctgaggtcaggagtttgagaccaacctggccaacattgtgaaaccccagctctacttaaaaaaaaaaaaaaaaaaaaaattagccagccatgatggtgggtgcctgtaatcccagctgctcgggaggctgaggcaggagaattgcttgaacccaggaggcagagtttgcagtgagccacaatcgtgccactgcactccagcctgggcaacacagcaagactctcaaaaactagtaataataataataataataattggaggccaagtgcggtggctcacacctgtaattccagcactttggatgctgaggccagtggattgctccaagctcaggagttcgagactaccctgagcaacatggtgagaccacccttgctactaaaaaaataaaatagccccgcgtagtggtgctgcgcctgcaggcccagctacttccgaggctgaggcgggagaatcacttgaatccgggggcagacattgcagtgagctgagatcgtaccactgcactccagcctgggtaacagagtgagaccctatctcaaaaaaataataataataatttaagtattgaaatatggagtgatttaaacgtagatatggataaattacttttgtaggctcaatttaaaaaatctaacatatgaggtattttgttgttttttgttgttgttgttggagacagtcttgctctgtcacccaggctggagttcagtggcacaatcttggctcactgcaacctccacctcttgggttcaagcaattctcctgcctcagtctcccacgtagctgggattacaagtgctccccaccatgcccagctagctctctgggatcacttttataagggcaccaatcccaacagtgagggttctacccttataacctaatcaccccaaaggccccaacttcctgctactcacattggtgattaggtttcaatatacaaattttgaggggagaaaaaaaaataagcacacaagacgtattagccgttgttgttttcaactaacatagcatccttatctgtttcatccctttcattttctgtgccttttatggccatcggactgaatttgtttgttatttgtctgtgaatagactatgaggtccatgaggacggggatgtttttgtattcatggttgtatttccagcacttagaacggtgcctgacacaaattaagtgcccagctatttcttaaatgaatgactgaaccccattttgctctgattaaacaaagccactaggtggttaatagcatacccaaggccattcagatgaaagtgatagagccagataggattcaaacctaggaagtctaaagcctatactctacaaaagtgaagctccaaacactttcttttaggtaccctatacagtcacctacctagtctaggtcacttggtagtttatccatgcatccagtggtttcccatccctattcccttactctttttgcatttcacatgaactccatctaccttcacctctccagaccttagtgcaactcattgaagaaacctgaggttatctcccattcattaattcacccactcagtcaacaagtatttttttaagtgccacctgtataccatatccagacttacattttgttcagccacctcttgtattatttgttttcaacttgcattgtccttggttgtcaatggctttgcttctttttaggtgtaagctttatattatagaaatgttggttgattcatgacaggctctctagtgtaacaaatccaaattacagttctagatgcacacagtttgggttttgaattccagccttactaaattccttaatgtttttattccgtgatttcctataaaatgataatagtatttattccgtggaattatcgggaggattaatcaatgtatgtaagctcatagatgcttggtgtatactaataataaacttattatttacatattattttatttgtagctatacttactcagcacaatattattatttttctacttccatggtgcttagtgtagtttttgttgtggttttctagtttgactgaaaatgtagaagattgcaatagtcgtgttcctgagtttgacacataatcatcattgatccctgaaaggctgctgtttttctaatgtatttattcttttcattcctatagctcattccatttcttaatgcaaacattttaatgttttgtttacatgtattcttgagaatgtgtatcttttaactttacagaaatgtaaattatatgctttgttttagttctcatctcttttttcctactcagcactgtttttgaagttatctattactttgtatacatctagtcctttgcttccaactcttatataattctttgtgtgcgtctaccagtctttctactcctacattgctaggcatccagattgcctccagctccttgcaacacatgcagcattagacatttctcttctggacctctgtgagcatgtctttgacatatataaatgtctccttcatttaactaagtgtactgccaggttatctccaaaatagctgccctgctgtatattagtagagtttttttctctatcatacgagcactcaggattctctgcttgaagactctttaggaataagatgtttgctctcaaatatatgaagaaatacctattgtagagttagccttccataatttattgaacctaaagcacctctgttgtaagatgcatcattacatacattgctaaggttaaacacttccagttgaattgttaagtgccttagattgtaaaatgcattccaattttagagatgttaaaatgtgagaaagtgtgagtctggagttgatgaaagaatatttaaaaaatatttttattaaagaatatgtatatgtatgttaatgtgtgtatgtgtgtatatatatgtttacttcttacatgccctgggaataacaccttagacaggcaaacagcactacacacatgatatatattttttcacttatttgtttatgtataaattggtatgtgacatatttctttatatgttttaaaataacacctttatttgtatgtgttattatatgtttagttatgtctttatttttgtctttatgtgtgaagcactccagatgaacaaagtgctacactgtttcttgtgagcagtgattctaaagctagtacaccccactgaattttgtccctctggtcgattgtgaggactcagaagtatattggactcctggtgttagagctgtttgttttcttggtgtttcaatgaggtccagctctagaagaaagcaaagaaggttcatggggtattttgaaatgaacagggtccccaaaagcctgatggatctggtaacaccacgcggtatttgattcaaatctatctggtagcatcctctctgaatttttaagtgaagaagaaaggggctcaatttggtagtgctgccatatactttttttttcttttaatttttttgagacagagtctcactctgttgcccaggctggagtgcagtggcatgatctcagctcactacaaccttcacttcctgtgttcaagcgattcttgtgcctcagcctcccgagtagctgggactgtaggcccgtgccacaacgcccagctaagttttgtatttttggtagagatgggggtttcactatgttggccaggctggtctcgaactcctggcctcaagcaatccacccatttcagcctcccaaagtgcaggtgtgaagccactgcacccagccatgccatacactttttagcctgggcaggaaacttaaagcctaggtcttgaaagaaaggtatttttaattggtcattcattctccaaagcttattgagcatcgtatgctaacgttatgaaaaataaattttcctcactagactatagctccatgataatggttggaagtcacaggaaaggtagatttctgctcagtgtaagcctgttattgctattaacattgaaatggcctgatcttaagtttctgagcttcctgtcattggaagcatttaagtagtcctgaatagtcaactgttaataaatattataggtatttctattttggaaagagattgaaccaactgcccagggtttcaaggattaagttcagcagttaataccagagacttgaaaaatggtggtttctggtaacagagacctggaaaccatggcttaagcaagagaaggattttgtttctttggtataacaaaaatccaaaaataggtattttagtagacctcaagtgattactccttgatcgcattaggaacccaggctccttttaaccttagctattttcaacatatgcttttcacctgaaatcataagatagcttatctgcctccagtattgtgtacatgtaaaaggtggtaataaggagaaggatagtggaaaagggggcatgtgccaaatgagtcagtcctctttaaagagttcttccagaagttcaagccagtggcctcaattgactaacattgtatagcatgaccacccctacctacaagggatgggaagctaactggacatgttgttactaataaaaaccagagtatgtcagaaagaagggaaggtttgatgttgggaggcaagtaagttttttcttctacccatcaaaatctttttttagttagaaaatatttgaatctaacatgtcccactccattgtggcaccaatacaaatggttatggatacatggctttattatagtttgttactaggaatagtcttggccgtattgatttgaattctccatgtctaaaaacaggaacaagcaggtccaagaacactttaaaagcacttcccactcagctgcttgttaactgaaagaatgtagaaaagctactcagaagagtagctattcaggccaaacttcctgatagtagagcattgttagctttacacttttatttccatctattgctgcctagattcccttccttactgtacttctttattcctttcctcttctctgttcttgcctttcaaatttttagacagggtctcactctcttgcccaggctggagtgcagtggcttgatcacagctctctgcagcctcaaattactgggctcaagcaatcctctcatctcagcctcttgagcagctgagactacaggcgtgtaccaccacacccagctaatttttttaatttttttgtagaaacagggtctcactatgttgtccaggctagtctcaaactcctggcttcaagcaatcctcccaccttggccccccaaagtgctgggtttacagcctgagccacagaattgagctctttaaaatttttaaatgccccaaactctttttatttatctctcattagagatctgtgggttccttattacctgggaaatgaatacatttcccagcttgtccttgagttaagagactcaatttagaagttaattgaaattataaacattgaaaccctgaaaaaaatgttttttttttcctcgtgatacaggttgtttcttatctaaaatgcttgggaccagaaatatttcagatttttgattttttttttaatttgggaatatttgtgttagaccagttgagcatcccagatctgaaagtctgaaatccaaaagggtcaactgagcatttcctttgagtgtcatagtgactctcaaaaagtttcagacttcagagcattttgaatttcagattttagggtttgggatgctcaacatgtaacagtattcttgatttgggaaacagtaattataaggaatgtgtttattttacattttatattgatttatttattgagatgttgctggatatatgccaatggatatgacagaggtcccccttcttatggccaagacagaaaatattttatgctttgtaggccacctatgctctatcagatttttcttatgggctggatttagcccatcaccattttttaattcttgctttagactatgtagtcagaaaagctattggcaaagtttagcagttaagagttacatgtcctgatttctgtattcaaaatggcactaaaataatagactaagggcagacaagacagaaacagaagagttacattcctaagtttttggcttatttaactggggccatttataagaatggaaggctgggagaaaactgatctgggaggtaaaatatattaataagttcagttttgaaggtgtaacttatagattcctaaatgtaattgtcagttagagtttaggaggagtccatcacacacacacacacacacacacacacacacacacacacacacttatagatagatcacacacacccttatagatagatcacacacacacatagatagatagatagatagatagatagatagatagatagatagatagatagataaatcagcatataggtggcacctaaagccatgggattgtatggtatttcctagggagaacagagggctataaagtaagtcaaaggggtagtccagctgaggagcctagaaagcttaagagtatttagtgagttaagaaaactagagaagagtatcatggaagctaaaagagaatgaagtggttagctgtatcaagtcatgctgtcaaataagataaataggcagaaaaaaacaatgcacaggacattatggactttaacaagaatagtttcactggaatagtatggggcaaaaactatattgaagttttgctctgaagaccaacagagaaatggtgctatagcaaagagaatgatgtgatcaagggaccatttgcttgatgatagaatgattcagtagagaagagggacttgacgatgcaagaggagggatttacttgcatatgttatggattggctgtgaaattcatgtatttttgtttgtttgtttgtttgtttgtttgtttgttttagatggagtctcactctgtcgcccaggctggagtgcagtggcatgatctcagctcactgcaacctccgcctcccgggttcacgcgattctcctgcctcagcctcccgagtagctgggactacaggcacatgccaccacacccggctaattttttgtatttttagtagagacagagttttactatgttagccagtatggtctccatctcctgaccttgtgatacacccgcctcatcctcccaaagtgctgggattacaggtgtgaatcaccacgccctgcctgaaattcatgtattttaaggggcaaacaggaatcgtcttggttaaagcaaagggaataaagaattttctaaatagactaagagcaaaatccaagtgcttgagaaagcacagcatacttgggggatggcaagcacttaatattggctgaaatggagtttccttttaagctaatgacaaaagtagttggctagatcaagaaataccactgtattatgccacagtgtttagaatttattctgaggacagtgaggatcctctgaagaatgtaaaactaggaaaataatttttttttttttgagacggagtctcgctctgtctcccaggctggagtacagtggtgcaatcttggcttactgcagcctccgccttccaggttcaagtgattctcctgcctcagcctcctgagtagctgtgactacaggcgcccgccaccatgcctggctaatttttgtattttttagtaaagatggagtttcaccatgctggccaggcttatcttgaactcccgacctcaagttgtctgcccgcctcggcctcccaaagtgctgggattacaggcgtgagccaccgcacccagctgaaaataaatttttgatagcattttttaaaggtaagatagaggaatataaatttggaggttggcaaaactggaggcaggaggccaggcgcggtggctcatgcctgtaatcccagcattttgggagggcaaggtggactgatcacttgaggtcaggagttcaagaacaccctgaccaacatggtgaaaccctgtctctactaaaaatacaaaaattaaccgggtgtggtggcacttggctgtaatcccagctactcaggaggctggggcagtagaatcacttgaacctggcaggaggaggtggcagtgagccaaggttgcgccactgcactctagcctgggcaacagcacttggccttccaaagtgctggaattataggcgtgagcccctgtgcctggtccctctatccatttttagcctgtttctttcaagtgtttttaaaatatgtttattatgaaactgaaagtttttctttatgacaaatcatataatttatctttttctctttacgaagattgaagaattggaggagaaacttaatgatgcacttcaccagaagcagctactaacattgagattagacaaccaattggcttttcaacagaaagatgccaggtaagaaaagttttttttaaaaaaaaaacaacatctatttagcaattaaaagtaattttattgcctgttcatgtttgtgactgtaagctaaaatagagaaattttaagtcagagatagcaataatttttacacctagaccacaaaaaaagtaggatacttgatatggtacataaaatacagaaagtcaaaattcaacattcattcaacaaacattggtcagtgtaaaccatatatgataaaggaagctctctaaactgaccaccattaacctttcttcttttacgcaacatattgattgattctcatgacccattggactttcctggcctgaagtactttctattattcctgtgtactttctctagctcagttgtgggcttatcatgcttaaatatgcctatggcaattatacttatgtaacttaattaaaaataatacaaacaatgaaataaattctttggaacgattcaataaaaggaactaaaaaaattatgaaattaaatataagcaacacaagtttaaagattgagggcaaacatgaaatccatataagataccttcattggtttcttcctaaatgtcttttaggatctcatgccattgtaaagaaattgaacttggaaatcatacatgatgatttacacaaaatcaaatcatacctctgtattcaaaatatctggatcctatataaaaatgtgaatgtttagttctatgttttaattacaggtaaaagtgtaaaacaggtaaattttccctttttaagattttactacttaactgatattgtaaaaaattatcggacctttttatcagccactatcacactagattagtggacctcaaactttagcatgtatcaggaacagttgaagggcttgttaaagaagcctactggatcccaccctcagagtttctgacttgtgggggtggggtcctgagaatgtgcatttttactgggttcgcaggtgatgcagatgctgctggtccagaaacaatactttgagaaccactgcatttgataataggtcttctatgctaattctgtaagacatatatcagattgaatgatgctgctgagagggcagtcacgagtctattgtaataaaactcttgatagctgatggtcataaaaaatggttggattctgaatattttttggagggctgatggattcaatgtggggcttaagagaaaaaggggagtcaaggattacatcaaaagttttggcctgaacaaatgaaaaaatggaatttctgtcagctaagaagaaagaaatcatggtagcaaaggttttgtgagtaaaaagcctgagttcaatttgggacatgttaagttggagttttctagttagaaatccatgtggaggtatacgaaaagtctcgtgtagaggtacaaatctggggatcattaggctatagacagtattcaagtcatgagactagatgaattccccaaggagtgcgtacagacagaagaggaccaagtactccaacattaagacaaagcagaaaaggagactgagaaggaaccacagtaaaatagaagaaaaatgaacagtatgatgtcttggaagccaggtgatgaaaatgtatcaaggaaagaaagtgacttgtgtcaagctctatcattagatcatggaggaaaagaactaagaattgatcatttgcaatttagatgtcattgagatttcattggagacagtaaaaatatgatcgccatgggtttaagaggaaaggatttggagacaataattatagacaacttttgagcaagcttgctccaaaggggtggctaacaaagggggaagtgcagtgaagtccagagttgtggttttgtttgttcatttgttgtaagattgaaataacagcatgtgtgtctgttaatgggattgatatagtagggaaggggaaaatcagtaatatgatttggctgtgtccccacccaaatctcatcttgaattatagctcccataattcctacatgtcatgggagggacctgatgggaggtaactgaatcatggaggtggtctttcccatgctgttctcatgatagtgaataagtctcacaagatctgatggttttataaatgggagttcccctgcacaagcactcttgtctgccaccatgtaagacatgcctttgcttctcttttgccttccgccatgattgtgaggcctcccctgccatgtggaagtctgagtccagtaaacctctttcctttataaattacccagtcttgggtatgtctttattagtagcatgagagcagactaataacatcagattgtcccttcctgatcagaatctttcagtaggcaactaacaataatgtctgctacatgtattctttgagaatgatgagtatgtgcagattactgttttcattacctcattggttgagtgaataccttatggtggttcagtgttaccatcttaaagagatatccttgaagtatcaggataaaagggaaatgaaaattactttaataagtagagtccttgatgtttaacattaaaccttaagcagaagaaatatataattttataatttgaatttctaaaattattctttaagaatatcaattctctgtttaataatttatatggttacacatttaataattagtatggaattgtcatttcatatttaactgattaatatgagtaaataagtatttagctggagtaagtaaataatactgtcaggtttctgatttcctaactttatgttgatataaataggaaactgtgagaaaattagatctcaaatacttttttaaagcctgccataaattctcttctaatgtagcaaatatcaagaattaatgaaacaagaaatggaaaccattttgttgagacagaaacaactagaagagacaaatcttcagctaagagaaaaagctggagatgttcgtcgaaacctgcgtgactttgagttgacagaagagcaatatattaaattaaaagcttttcctgaagatcagctttctattcctgaatatgtatctgtaagtatcttatatctatttttaactatgacatatattttcagactaaaatttaccatttatatagtagcaattacttttgaagtacccaattgatacattattttatggctatggatggtgaatggtgttgagatccaaattttaaaggatcatgaccattgatctccaaagtcaagcaataaataggtttctgaagttaatgactgcatagtccatagaaatgaattatcgtaaactggtggtttcttacattctcaaaatgaaaaattataaacaacagagtagttgttgccaggggttggttggggatagtgggagagaggagtcagcgtggttataaagggataggatgagaaagaactttgtggtgagagattggcgcaagatcttgattgcagtgctggttacacaaatctagaacacctaggattaatctatggcagtggtctcaaatattttggtgtcagcattcatttacattctaaaagttattgaggaccccaatgagtgtttgtttatatgggctgtatctattaatatttaccatactagaattttaaactaacaacttttttaaacacaagaataagcacacaattccattggccttaagagtgataatgtcatatgtcatgtagccactggcaaactccactgaacagtcatgagagaatgagaatgaaacggggaaaaaaaatcttaataattactaggaaagtcgttttgatcttgtgaattccctgaaaggatctcagagtggcgagtggggcagagtccaggagtcccaaaaccatatgttgagaactgctgctttttaatatgtagatgtcattttaccctgagaggcttgaattttttaatccctaaaaagggttaatagtaacggtgcgtttctattggggataattgtaaagactataactatgtatgtaaaatgcttgtgagcatagtgcttagaagatagtaaacacataaaaatgttgtctattgtttttgctggagtggtggttgctattcttggttctcattgggaaaagatttgcagattagtgatgtctgataaaatgaagttacttttttgttcagctgttttttttttttttttaaaaggctcaaatacagcttttctgtccaaagtatactgtccaaaacaaattaaatatctcaaattctgtttttgaggcttcatttacagtagatataaagtatcacactggtggcagttacacatatttttgctgtttgttttcttaatattccttcttacatcttttgttttcacagacaatattatccttaactaattaattatatgcagattctttttgttgagggctagtattaagatttgcctcttaccaaataatggtattcttgtaataccgtcatatgttaaggagtttcagattgcatgcctatatgatagcccctaattactctctcctaatttgctgtgatgatttcttagttttatgggaccttgtcagatggaacactttactgagctagggtaggaaaatttctctgagacaagtatgagtggaaagagagacctgaactaaatggaagtaatgacgtgaaagatacctcttgattcattctgattagacttccactgtagggacagcagtaaataaagctttgccaagagcctgggatgaaaataaagaatacactttacctcttcatcaagtatttattgagtgcttatcatatatttaggcattggaaatacagcggtgtataaaccagacaaaaatccctgccctcaggttgtgaaagtggagcaacacaggcaataacttaaaaattaaatatgtagaatatctgtttgtcaaaggtgctacagagaaaagagcaggggtgaaaaatagggagtgctacttaaaattaggtaaagaaatcagggagggctttactaacaaggtaatatttggtcagagacctatagggagacaaggcatgagccatgcatttatatgggggaagaacttctctagcagaagaaacagcaagagcaagactcctgaacatttgtgatatgttccagaagtttacaagcacctagtgtggagtgagcagtagtagatgagtagtaatggagtgtcagtagaagggaggaaatactgtcaaaggtaagaggttataaatcatctggcccttgagggaagttaattgaacattaaggcttgatagaaagtattagtggctagggtccattaatgactgtcttgttgtagttttgtaaatatttatctttattactgataagtgagagcactacaaattacaaattttaattgtaatttggatttaagactgcttattaatttaatttttttcaaggttcgcttctatgagctagtgaatccattaagaaaggaaatctgtgaactacaagtgaaaaagaatatcctagcagaagaattaagtacaaacaaaaaccaactgaagcagctgacagaggtttgtatggttttgattgctggtgggaagaagcttcggctttttctgtagagtccctcaggatttgtgataaggcatataaaagtcagtgattgaaaaatgggactatgggatggtgactgctacagttcaataatgggaaggaggttaaattggaagtagtcatcttaaacattgacaagacaagtctgtgttattgacgtatcctatagttgagcttttattgttgcaagtcaattttataatcaactgcttttgaaatcctaatatgggctatatctgaaaattgctgtgtatccttagatgacgcatatgcatgtatttatttagtaatttgtctctatttttaacatcactttgtcaggaaatttaagcaagaaacaagaaatgtaggccaagctatgcaggggatctcttgcaggtgccataagaaagaagaaaaggagaatatttttactttgaactaagttgactcgtaggttctggtttgcctaagactgttgccattattcctgtgaataaatattaatagcacccctttattttcaaaattatctcagcctagacgatgaatatagtaatcataaatcaacatttatatagaagggtggactaatcattaacttggttgtattattgaccagatatcctagaatactatcttgtagttatagtctactaacaaaaaaataatggtagattgattcattctaccatgtaacagttggaaatgggtggctgtttttcttcaaatatttcgttattctaaaaggaaaacacttctagtttacaaatgggggctgctgcagttcttcattacaagttagccttgttcgtgatatgagatggagctactgtccatttattacttacgtggcttctttgtgaagtgcagttaactctcataatatttattctgagcatgtgtactgatactagcattaaccccagtggtgtgcatggtgctgtgctaggtgctggcagtgaacccaagagaggcaatgcctgcccttctagagtttactttctagcaggttaggattagaacattaggtgatattttgacactctcatttactgtgtgaccatgaccaggtcatttaatgtttcctgttctgtcaaatggagaaaataatactgtttgttcatttatttaattgcattgcctatatttctgtttcagagtaaaaacatgattttagcaaagttgcatacaaacatttatgtcctattttaagggcagtttttgtcaatgatattatccagaaataaataattataatttaatttgtatttttaatgctctactttgctgtactattagtcttagagataatttacttaagtcttgccatagaaccaatatttcagacaaaataagaaggcttagcttcctctcctctgaggagcagtgacatcagcaggagcaattagaggggcagatgtgcccccactccaaacttcagttgttttcttttcttctcctagcatgtcatattgtgcaggtaaactgttttgcacatttagaaagatagttcaattaaaaaaaaaattcaactgtagtcaaaatagtagagaacagagaaggccactgtttggccactttctaattttgcagccttgggcaaatcatttatactctattgtttctgtaaaatgcccaggatggttttggtggtacaggggttattggggaagaggcagttagacaaggtcttagcgttggttctatacaccttatggtacctcagcatccctcaaggacttcttactgtgtagtaggagggctggaggagctccctatccttgtttttatcaagccaccctttttaaaataaccttaatatttgggacttctcagcatgatttctcttgaacacagattcctcaggccattcttagagtttgtggtttttctgccctgtcaaggacctggtacaggtcaacttgccaaacactaggaaaaaagtaaatatttttaaataaaaagcaaaaccaatatcattaaacagctttatttatttatttaaacagagccttgctcagtcgccccagctggagtgcagtggtgccatgtctgctcattgcaacctccacctcctgcgttcaagtgattctcgtgctttagcctccccagtagctgggcttacaggcatgcgctaccacacctggctaatttatgtatttttagtagagatagaatttcgccattttggccagactggtctggaactcctggcctcaagagatccacctgccttggcctcccaaagtgctgggattacaggcgtgagccactgcacctggccaaacaggatgtagtaaacaataaatagtactactcaatattcaaataaatgtcacatattctggagtttattttttgaaatggttcattaaattatttactgctatttatttgaggaattaaaagacatagtttctcatctctgcgacttgataacaatgtgatgatcttggataaaaaacagtctgtctcctatcttaacagcttctccgtccgtaaaatagggacgataacatgtaacacctaccacacgtggtcatattataaagaatgaaattcattcaataaatgtgtatcctgcatttactatatacggcatgcattattcttggtacttgggataccttgttaaacaaaacagtaatccctgccatcatggagtttatatttttaaaggatatctgtgagatgtatattgtattttaaaagggaaaacaatagcaaatcatgtagtgtgacaaaagttgataattgtaatagaaaaaagaaaaaaatagttcaagataaggtgaattgagtgctatatggagagcagggaagagagcattgtcagaattctgtaaggttggctagtaggtctcattaaacagcttagaagtttacaaagccttgaggaagtgagagagagaacaaggctgtcttccttgagacagctcagggaagagcttctaggtagcaagaacagccaatgcaaaggcaggggggtactttggtatttgtggaacagtgaggagggcaatatgactggtatgcttgaagggtggaggaggatagttgtagttaagatcagagaggtaatgagtctgttgaggtcatcatacagactttgattttaaccttaagtgaaatgaaaagttgcaggattttggaaagaggtctgacatgatctgacatgtacagttgactgttgaacaacatgggtttgaactgtgtaggtttatttacacatagattttttttttcagtagatatactggaaaattttttggaggtttgtgacactcgcagatgaactatgtagcctagaaatatagaaaaaatcaagaaaaagttatgtaatgaatgcataaaatatatgtaggtactatattttatcatttactaccataaaatgtacacaaatctattatcaaaagttaaaatttatcaaagcatgcatacacagaccttacatggtgctattttcagtagagagaaatgtaaacaaacgtaaagatgcagtattaaatcataactgcataaaattagctgtagtacatactttactactgtaataatttcttagcctcctcctggctattctggtaaactcaagtgtttgggatatctgcttaaaacgctgtatgatgctaatcatccccacatgagcagttctccagtaaaatgtgaatcacaataaaaagtgatttctcgcagttctggcatattatttttcatcatgtttagtgcagaactgtaagccttgaataacaccatgggaaccatatgaagtgtcaccagtgatgctggaagagctctcaagcagcagagaaaatttatgacattgtaagaaaaagttaatgggttgcctaccattttggacagaccattaattttgtaaacaaattatgtaaaacttagagcatccataatacagtacagttatgtaaatgtattttcttaggatttttaaaaaatgttttctctagcttttattgtaagaatacagtatataatacatataacatacaaaatatgtactaatagactatgttatactaaggcttccagtcaacagtaggctatctgtagttaagttttcagtgagtcaaaagttacacatggattttttttttgactgtatgggagttggtaccccaacccctgtatcgtccaagggtcaagtctatttaaggtatcattctggctggtacatagtagaccgtcaacaaatgttttctttattgaatttctttttaatgagtattttaaaaccttcctgttgtcctggataatgttttttaaagaaagttctctcctgagaacagactgtagagctataaggatggaaacaaagagacttgttaagaggctgttgtaatctaggggagagattattgtgtttcagatctagatggtagcaggggaagtggtagattctggatttattttaaagtagagccaatagaaaaaaggtagagtcatgaattggatggaggatgttaaagaaagataggagtcaaattaactctaaaaaatgttagtttgaataactggaaggatagatttctgttcagctgagataggtaggttgtgaatgaggccgacttgagtgcaaaagagtgtggatcttagacatgttgagtttgagagatctgttagatgtacagtcaaaggtatgtggatatacaggtgtgaactttagaagataagcattcaagagtcatcagcataaagacgatatttaaagccaggatgagattaccaaaggagagtgagtgtagggaagagaaggaagaccacagcttgagctccagggcacttcaacattgaaatgtgggagagagaaggaggagttaccagtgaaatagggaaattaagagaattttatgtccaggaaatcaaagggcaaaagtttgtcaaggaaaagagagtgatcagctgtttcaaatgctgttgataggtacagttagatgaagactaagaattgacattgtatttaacaaggtcattgaaaaccttgtcaagagtagttctggaggagggatagggtcagcagtttgattacagtgtttgagagtgaatggaggaaataaactggacatagagtatagacaactctttctgagtaatactactgtatagaggaacaaagagagttggcaattacaggaaacatggagccagggaaggcttgttttttttttgtttttttgttttgttttttgttttttgtttttttccttaagagagatgacagctgttgtatttaaaatcacattgtaaccataaaaattttctcattgtcgacaacggtagaaggacattcatgtaattgttaaccaacagtgtaggtagtactgttggatacccagttatagttatgtttaaggctccccactttagtgctatccgtgtaataaaaagagtcatgtatatttggggtattgccaatagtatgtgtttctgtgattatgatatttggggaaactactagaacagaggggtgtttgttgattgaattactcctgattagttctgtgggactttcttaatatctaaatagtggtttaaagaataataatttagtaaagtgagataatttatctcttaatagctagagttttaattatgtcacaaaaagttgagtttcgatttaaaaaacaactgaagaatatatttataagtgagtaaggaagatagagaatgttatgaccactagaggagggtttacaaaaagatctgggttatttaaatgaggctgggggaggttgaagaggtgattggacactgtcaggttactgaggttcaattgtcatcagtgagaaccattgtctctagacttttaaaactaatcacaaacccctaatttatgaaagtgctaaatgaaattgtcagtttttcatttgaagttttctgttttttcttctgttacttggaatgttcttatctgagtgttttttgcccagtggtatttcatgtttctttcctcttcagtctgtgggctgcatatatatacttattgttggcctgaagcagacaataaaaacagagaaatgcccatcatatccaaaggaagtagcaagaaaatttcgacttttccaatggtgtcattaattttaagtttcttgacccaaaagagtaaattttcctcttaactatagtgggagaaaaaataatatattttcctcacccattgcaaggtttatggctgagactccaataataaaagagtaataagagaaaagcataacaaatttatgtataatttatatgtataatttaatataaattttatgtgacatgggaaccttcagaaatgaagactaaaagacccagggaaaatgtatttttgtggattgtcatgcataagtatgattggaagacaaaagtgtatgatctgatggtaatcaactgggagaatttagcaaggcttgtttgttcacattcttcttgggctgtctgtgacattccttcccattaggtatagggcaggacgcctgtcaccttaggggagaggggagggagaaagagagtggccttcctaggtttgatgacctgcttcaagggagaaagaggcaaggggaattttcatttatgtggcccacttcaagagagatgggttgggagaaggtcagggagacccccctgtttctgcagttttcttaatttccttcaggttaaaatactcagtatgccagggtgccatgtttcgaggtgtctgttctaagtcctaacagaggaattaatattttattttgtagtgaacaaattgaaaatatatccagtaaaagtgtgtacactgattctgttttcctaaatttgacaaataaaaggaagtgttactttgttcaataagtgttcaataagtaagatacactgccatagtaagtttcaggacaaggtccatgatatatagctgcaaccaccataaagttactaaattttttcttttttgagccagagtcacactcttgtcacctaggctgcagtgcagtggtacagtctcggctcactggaacctttgcctcccgggttcaagcgattctcctgcctcagcctcccaagtagctgggattacaggcacccaccaccacactcagctaatttttgtttgtttgttttttgagatggagtctcgctttgtcgcccaggctggcatgcagtggcacgatctcggttcactgcaagctccgccttctgggtttacgccattctcctgcctcaacctcccgagtagctgggactacaggcacacgccacgacgcctggctaattttttgtatttttagtagagacggggtttcaccatgttagccaggatggtctcgatctcctgacctcgtcatccgcccgccttggcctcccaaagtgttgggattacaggtatgagccaccacacctggcctgaagttactaacttttaataagacatgatccaaatttttcatatgacattattcgaaagatcttcataaagtgattcaacaaatattttattcttcaactcatacttatttaaggttggatattttaagataaacaacattagtcttattaatgactttatgtaattttaaagttggatacaatataagctttggggaaaaaaacatgactagatggtattcacccaagaattttaagggacttaaaggatgaacctgaaactgcagcacatgtataatattgctatcaaacagagcacttgaagtaggtgtaattgcttgaaagctggtaaattgcctgcctgagtctagaaactaaagacctccacacttaaaactgataaagcactcttttatgcttactgagcttgtgtaatgcatgaagattaggatcagtgaatacttaggcaagttaaatacttccccttatgggggaaggtcaacagagtggtacaaatggacaaattatatttcacatatatataaagagaaaatagagaacaaattatatagactttcaaaaagccattgacaggttttaaattctagcttttaaaaattggcaggcttttaaaaaattacagtgaataacataacattaaatttaagactttattttcatgtatacaattcagtaaagaatactcacattgtgcaacagatctctagtacttttgtatgttgcaacactgaaaactacccactagacactgattctccctctcccctcccccagtcattggtaaccattttttaactttgtttctatgattttgattagtttagattcgtcatatgagtagagtcctacagtatttgcccctttgtgattggtttcaattagcataatgccctcagggtttatccatgttgtagcatgtgacagaattttcttttttttttttattgtactttaagttctggggtacataggcacaacgtgcaggtagtgttacgtaggtatactcctgccatggtggtttgctgcacccatcaacccgtatctacattaggtatttcacctaatgctatccctcccctagtcccccaccccctgataggccccagtgtgtgatgttcctctccctggtccaagtgttctcattgttcacctcccacttatgagtgaaaacatgtggtgtttggttttctgtccttgtgatggtttgcggagaatgatggtttccagtttcatccatgtccctgcaaaggacattaactcttccttttttatggctgcatagtattccatggtgtatatgtgccacagtatctagtctatcattgatgggcatttgggttggttccaagtctttgctattgtgaacagtgccacaataaacatgtgtgcatgtttttatagtagcatgatttataatcctttgggtatatacccagtaatggaattgctgggtcagatggtatttctagttctagatccttgaggaatcaccacactgtcttccacaattgtctttcacagtcaggttgaactaatttacgcttttttttttttctattttaaggttacataatattccattgtgtgtatataccacatttgctttatccattcatctataaatagatacctgaattgcttctacctcttgggagaaatgggcagactttgtaagaagtgttatcatgaattctcaggaaattgttttctctttagtaggtgaaggataagagccaaaaaaaaaaaaggaataaaaagaactaaatgaaaaacaaaaatagaagtattcttcagatacaactgttaaatccaatcttattcattatttaacattttaatacatttattgggctgggcacagtggctctcgcctgtaatctcagcactttgagaggtcgaggtgggcagatcacctgatgtcaagagtttgagaccagcctggttaatatggcaaaactccgtctctattaaaaatacataaattagtcaggtgtggtggcaaacacatgtagtcccagctactcaggaggctgaggcaggagaatcgcttgaacctgagaggtggaggttgtagtgagccaagattgtgccactgcactccaacctgggcaacagagcaagagtttgtctcaaaaaaaaaaatttaatacatttattgatgaggaagcacaaagtataatctcaagtttgtagacagtaaagtttttctgagcagtggaacaccaaactagtagggcagattggaggaaggtctcaaaaggtaagtggactgattataaatgaatgtgttttctttttaataactatcaatcagcttatattcccaaaattagcatgttcaaaattgatcacctgccccagagtgtaattttttgccattttattatagaaattttcaaacgtaacttgaatttcacaatgacaccagtatatttatcagtaaatttctgccattaacatttttattgtatttgtcttatcaaatacctctccatctatccatctgccagtcacatttaattttatgggaaaatgctgaacttttttttccatttgtcagtaatttcttccttttcattactgagtggtattacattgaatggctctagttatttaccatttaatgggcatttgagttatttccgattcagagactttacaaacaaagctctgagaacatttgagtatggttttttgtgtggacatgttttttctcttgagtaagtacttaagtgtggaattttttacttctagaatttcagtttggttatttattatagcttttatttctctatttgtttacttattatgaacatattttcctttacaccactgagaattgttaaaataggagctttaaaattcttgtctgctaattccaaacactgggtcaccttggagttgatctctgttgattgtcttttcttttagaaatgggtcacatgttcctctttcttcagatgtcaagtaacttaaaattgtttagaccatcgagtaagtgtagatgagaacattgtgagtattatgttgttgagactctgcattttatgtacctctaaacggtggtgatgttcttgttttagcaggaaattacttggttgtactcaaacagcatactctgtctattgggcaggtgttcaaatttcagttcaattttttttggtattattggggctgctcagagtctgtcctacacatatgttgtttagagggtagccagatacttaagcagaaattacccagagaattcagtttcccctctctggctatctctgaaatttcctcctcatttagagcagctgcagttcccataaataccaaagattttctcatgcaccttgatccatccaacctggcacagaatgggactggcctcaggctaagggctactaaacaaaaacaaaaaataccaggaaactcacctaaatgctgaaaatgatagcaataatgacaactccatagtggtttactaagagaaactaaggtatttgttaggcatatctctgagttttgagaccagcaattaagaaaacaaattttccattttacttaaaaagtttattctctacagagagttcatgaatctggagaaaataaaattactctcagtctttccgttttactttatggatctttcttatccaaaatggtcttaatttttttcaccacttgggggcagtatatgtcccttttttttttttttttttttttaattaaacctgttgggggctatttggaaaatgtgattatttttgagctagagacccaaagctttacatttagttaccttattttcatttatattcattatttcatataaaatgcctgcaatcaatcacatagtatctttttctagtaaaatttaatatatttagaacttggagaatggagtatcaaaacaaaaatttgtgttccataatatgtattcagagatgtctcagttattgcactaatttcataattatgcctaccagaaatattgagaatttttaattctgttaaaaccaaaaacattcagggttttaaattctgttaaagccacatgaaatcattaaagccacacaattacacagttaatttgactctgcttttgtttgtatgagattaaaactgtttaagaaatttaatagaaggtttttttttggtttttttttttttttttttggagatggagttttgctcttgcccaggctggagtgcaatggcatgattttggctcactgcaacctctgcctcctgggttcaagcaattctcctgcctcagcctcccgagtagccgggagtacaggcatgcgccaccatgcctggctaatttttgtatttttagtagagaggggtttcaccatgttgatcaggctggtctcgaactcctgacctcaagcgatctgcctgccctggcctctctaagtgctggaattacaggcatgagccactgcgcttggccagaatgtgattcttgacctttaaaaggaaattactctttctgaagtggcagttttagtggatttctgggatttccttttgtaattttttccagatctttagttatttgcaaataacatctagatactattataacactggaaaatagggctcatcttttacttcaagtccggagtttatttaaaagtgtcagtaatgtagtctaattctggcttattttgagttacattatgtatatgatcttgtgtatggtactttatgtttataaaagtgcttatagataactttatttcctatttatgaattttctctattagcaggtcaaaattttggttgatcacatgcaactcagctatatgttgctgttttgctattatagagttagttcagcatgctttttcatatcaaaaggatgtgatgttagagatacagtgtaaggcattagtgaatctgcacttaataaaactattaaatttcatgaggaaatggtgaaatatttttctcttatgagaactttggtaactaggaagcaagaagaattttgtcaagagtacttccttgtttagaaacatagttacattctttaaaaaattctgcaagattatcttgaggttcatcttaagtattcatatgtaagtaattcagttaattttatttgtatgaaaatgagttatttcattgatgaaacatatttgtttattaaagtttttatattttagggagtgttaactgttttctgagatttctttttatcttatccaagtgatgagcttaaagtttctttgtaaggtacatatttatgatgatacccatcagttataattatcctagaatgcttaacaaattagtaaacagtgatagatttgcctctttatattaaatttaaaatgtataagcattgcttaaaatttagattcatagccacctgcatgggttctattttggtctgaggtggaactaagaacctcaatttttttttttttttttgagacggagtctcgttctgttgcccaggctggagtgccttggcacaatataggcttactgcaagctccgccccccaggttcacaccattctcctgcctcagcctcccgagtagctgggactacaggtgcacgctgccactcccggctaattttttgtatatctttttagtagagacagggtttcactgtgttagccaggatggtcttgatctcctgacctcgtgatctgcccaccttggcttcccaaagtgctgggattataggcgtgagccaccgcacccagccagaacctcaatttttaataaacaacccaagattctaatgtggcgggttcatggacactgaccacaaatcattttttaagctatttttgttaacttattaattgagatttaaaaataactttgaatttttaattacatttcctgatttgaaatttatatattggctgggcaccatgactcactgctataataccagcactctgggagcccaatgtggatggatcacctgaggtcaggagttcaagacctgaacatcgggaaaccccatctctactaaaaatacaaaaatcagctgggtgtggtggtaggcacctgtaatcccagctacttgggaggctgaggcaggagaatcacttgaacccaggaggtggaggttgcagtgagcggagatcgcgccgttgctctctagcctgggtgacagaacaaaactccgtctcaaaaaaaaaaaaaaagagagagagaaatgtatatattaatgccatttcttgccgccaatataaagttaatatgttttaatatatttaacatattcaagaatataattgaagtcatacactattacgttacaacttggacttactaaaatccctctcttgcctatacctctaaaacctctaaaaaattgctccttcacaaacctgttaagtttttacaaataatacaaatggcttacgataaaagtgcatgagggaaaaaaaattcatgggaaagctaaaatgaatgcaattttaagtacgacataattgggaagaagtttcatttagctgattgttttatacatgctgtatgaagagacataatcttttaaagagtcataagacttttttttccctttgctactgtgtgtataatctttagtaaatctaggaacttgtaaattttaggggcaagttttgaggggcttattgggttttgagatgaaattttgaacccagtggccaaaaggatgtatcactacatgatggcacgggaaaactcaggagggaccttaccaaatactttggtttaaatccagagataccatgataacttcgttctcttgatctgcatagtgtttctaagccagattccacagatatgttttggagtatctaagagttctttttgataatttttaactttatgatttaatttttttaatgacctcagaaattaacagatgcatatgatggttcatctgaatgaataatttataatagagtactatcactatgatgtcattgcccatgtttgcatttaattttgtcatggcattagcaccacagatcacagtttaaaaaaacagtagtcaactgtccaggcacagtggctcacggctgtaatcccagcactttgggaggccaaggcaggaggattgcttgagctcaggagttcgagaccaccctggccaacctggtgaaaccctgtctctaccaaaaatacaaaaactccagcctggccaacatggtgaaaccctatctctaccaaaaaatacaaaaattagctgggtgtggtggtgcaggcctgtagtcccagctactcgggaggctgagatgagagaattgcttgaacctgggagccagaggttgcagtgagccaagattgtgtccagcctggaagacagaatgagaccctgtctcaaaaaactacaaaaaaaaaaccccaaaacaaaaacttagccaggtgtcgtggcacacatctgtggtcccaggtaggaggattgcttgagcccggggtaggggtaggggagcagagtttgcagtgagccaagatcgcaccactgtattccagcctgtgtaagagtgagactccgcctcaaaaaaaagaaagaaaaaagaaaagaaagaaatagccatcaacttaatttgtaagataggtatttcagccaaataaaggccaggtgctatcatgcatcactgtatgaataaaagtttcacagttcaaatagagaaaaatgatgacaatatagagttgtcacactactgagcatagtcatgccaaactcaaagctaaatgaactcctacttattttactattttaaggttaaattatatagtcaacattaactactgaatagaataagcattgctgtttaggcttagttgaaaggaggaagtaaagggattctaggagatgaaaatgtgaatgcatgtcatttttcctttcttttccagttcaaagtatccctctctcagctgtcttctggcaggcagctggatctgagtggaagtcttgagctttgggaaagctagtgttccagttacgtattgctgcataacaaatcaccctaaaacttgctgtctcacaataatttattatttgtcacagctctgaaggttgataggttcagctgagtttttcttacctcactgaggctggggtcatctgaagtcttctttagtcaccagtttggagccaggatgatatgaccaaaacattactcccttttgcacttggcctcttcatgtgattagtttaggcatccttcaacatggcagtctcacagcatggcagctggccacctccaaagcaaatattcaagaaactcaggcgaaacttaaagacttcttaggatgtaacttcaaaatcccagaaaattgcttctcccacatgcttttggttaagcagatcattaagaggaatggacccacttcttaatcagaaaatagcttcctgcatacaagggaagaaattgatagagaccgtcttggagataagctaccaaaatttgagatttctctcccctgacttgagtgaaagcctagaaatagtgtgagagaaccctgagcaagagcagaacagattgtcggcagagctcggcctataaaaatctatggattactcccttcactcctcaccccaaataaggtggataaagtctcctttgcctccactaggtgagggaatcgatgtacagtgttctgttaaaagaaagactcttattatgaccttcaaaccaagcccagctctatttgtttataggaaatatgcttaatgaaaattgataaagattgaaaaatgggccgggtgcagtggctcacgcctgtaatcccagcgctctaggaggctgaggcgggtggatcacctgaggtcagaagttcaagaccagcatggccaacatggtgaacctgtctctactaaaaatacaaaaattagccgggcatagtggcaggcatctgtaatcccagctactcaggaggctgaggcagtagaattgcttgaacccaggaggcggaggttgcagtgagccgagattgcgccattgcactccagcctaggtgacaaagcaagacttcgtctcaaaaaaaaaaaaaaaaagattgaaaaataattacttaaataatttttaagtaaaaaattatataataaattttaagtacagattatatagtttctattttttatcataatttagtgaaaccagagattaaagatgaggaggaataaacttacttggcaattagaaacgtatcttttggattaaagagcaaagaaaaactgaaataaaacaatgaaaatgagaacatttttatatcaaaattcttagacacatttaaagctatgccaaaggaaaatctgtagccggaaatgcctttattatttaaaaaaaaagatgaaaaataaatacatgtagtactcatcttgagaaagctggaaaaagatgagtagaaataaggtgtttggaattaactgacatgaagtaagggaaaatacatacagttctatggcagtaagcttgaaaacaaaaaggaaagtgaactgtgccaacaaaatatagattactaaaattgacagaagtgagaacttgatttagaacagttaccatagaggtattacaaaaataagtaaaagtgtacaactgataaaattaccaacaggttcacagatagattactgcaaatgggttcacagttgatttagaaaaagacagctagttccacttacttatactatacccactattgaaaaagaaagttctgagaaagagactacaaaagcaaaataaaacatttaggccaattttgcttattactacagatgtaaaaatttgaaataaaatgttaaatgaattttaccattgtatcaaaagaataatactttatgattaaacagagtatattccagcacagaaagaataatccattgcatcagcaaattcatggagaatagcttcatgaacacattaacgtatcagatgcaacagcaattagtgttgaacacttaagattttatcgctttcttcatatgagtttgttaccttgtgaatgaaatatgttcccccaccgttcatctctagcaagaaaagaaattgattcatttgaagaaaactataaaatcttggaacatggaagcatcataccttaagtaagacaagctcattaaaatagcaatttttatgattaacatattaatcaaatgtagttcagttatagtctcctttttttcctgataatttgcaggggttgttggagggaggaagtgtggtacaggactttatcctttccatcacctgtgttaatactttttaattgttattgatctatatttccagacaaggtctcagtctgtcattcaggctggagtgcagtggcatgatcacacctcactgcagccttgaagtcctaggcttaagccattctcccacatcagccgcttgagtagctgggagtacaggcatgcaccatcacactgttaatactgttaaggcttatctcaattattcaaaaggcatgagaatccatacttttcttgcattgataaatttgggggttaatatgtgatacttttaagataatttagcaacttggtctctttaacattaagattcaaatttgtttggttcaatcatatttgggtcaatgcctgttgagaagccagtatttcaaatttgttacagtagtttgctgaataaaatgttgggtataaaaattgcctcctaatacatcagtgtagcattttgcaatggtggggtctgctagacccattagctagtgggtgatgtcttaatactagtaatagagtgttatactacaataataaccacataaaaataaatgagccaatgaatcagttagtatacacactctgcagaagcatcaggtaagtccagaaaagttgacttgctagagcaaaaagtaggagagacagaatctgaacccatgtttgttattccaatctagggtccaccacatgtgatgaaagttacctttcctcattcttgagttttgctgggcatagtggctcacgcctgtaatcccactttgggaggctataatcgcagcacttttggggctgaggcgggtggattccttgagtccaggagttcaagactgctctggacaccatggcaaaaccctttctctactaaaatacaaaaaactaactgagcatggtggcatgcctgtagacccagctacttgggaggctgaggtgggaggatcatctgaggtcgggaggttgaggctgcagtgagccaagattgcaccactgcactccagcctgggcaacagagtgagaccctgtctcaaaaaaaaaaaaaattactgagttatttttttctttaaaaaaaaaaaagccttaagtttttatttgaattcacatgtattcaaatagatataattgaaaatttagcatgtaatagaaattattaagatttttgttttaatgcatagcagactttaccacttcagattttgtctgtctttagaatcaattttttttttgaaaaatttcttgaagatcttaacaatgacaagagttgtctctggcagcaaaacagacttcattgtggcttataaagggacagcctatagcagtcaaagcttaattaggtttcttgttcttttcagtatttagttgcctggattagattattgataatgtgaaacttgtgggaattctgacaagtgaattcttagttttccagaatagctaaccaactatttcttaccattcactgaactgctgtccaatgtaaactgcttcagatttgaaccttaaggtaaatgtcattatattctatttccaatttccttagttgtcctccacacagacaggagttgttcatttattaaagatttattttgaaacataggttgctgcttttttctcagtttacatcatgggagagacaaaagacttaaatggagtttagaaattcattacatccatagtaattgccttttattgagaacagaaattgaggcttggctattattatcccatttactgtgatgtagaaattttctgttagtaagggctgatgactggaaattttatgtgtccatttctttatgtttgaaaagtttactttttttgcttcttttgttttagtctatttaatgtcctcttttgttcctcctcttccacagacattaattgcaaaccttctatataataggcagagtattagttactaggattacagaaaacttccttagagttttccttatgatgtgggagacaagtaatggctgcccacagcacatgtgatacattttctgacagataagaatcaggtgttgtgaaaaaataggataaactctaggttattgctggagcttagtcttcccacaaaggttgatgctaagctcaagacatggaaggatgcagaggagaatacaaaatagtcttttctactctctatagctttaacaatggttctacatagtcatggggtttattttgagggaagatgctatttttcctgtttccaatgctatggcttactctattttaattgctaacaataaatgcaggagatttttaaattcaaaatacgaaagtaataatttcgtttaaggggaaattgtccaattgaaaaattgtaaataaagtgctggtcgaatatgtgcattcttatactgcacttagacttgcttctgtttatacttgcatatggtgtttatatttaaaggaaatttataaatatatacatatatatacactatgtatataacattaataatatactctgtatatttattcttccatggaactactctctgaatatcctaaaatactctgcatatttcagagtcagatgatctttacctttttagatctttgcagttgcactcacagaaaacactgcttctttggaactcatcatctggataccccaacttacagtattcttcatttgcagaccactgggacattcctctttgtttaatgaaagccttgctctagatttagtcttcctttccacttcagctgctacctaggttacttatgtgattaattcatctatagccttggccttgaattttattgatctcatctctagtgattgccttttctccattttaacactcagtcttatagcccacatttggttccttgccatccagaactgatttacttctgaagttaccaattcactttcatccactaaacatcttatttcctatattttttatgttttaccattgtctgctttcaacttgtctttaacagaatttccaatccatataatttgtttctttatcaatcctttcctaaatttattttcttcccttgccaccatgttatcagtcttaaacttttttttttttttttttttttgccagtatcatctaattcctctcccagctttctttttatcaaaccagactgaaaaactctcaactctttatttttctagctgagcactactggcaaaaatcacacaagcagtaacaagcactgtcagtttattgttatcagcctcaaatggacccacacaattggtcgtaattctattatttctagttctctcatttttcgcagagattacttaaggcaaccagccactcttcttacatctccagttttccacgtttcttgtcgcattcagcagatgacttggtatttcatttcacagagaaaatggaaatcttcagatgagaactcccacagtgtccttccaacaaatctactcacatctgcactcattctggtttgtttgttcttagtgtttataatggaaagagtctcgccctcaagggatgggaaaatcatatgcctctagaaaccaggtggataatataaatttgtgaagccgtagggtaagattaggctgtggcctgtagcaaattgataagagctatctaaattattcaagttgttaatactctgtatcagctggaaaaaagcctgccttgatgaacatggcctctgatctaagactaatctgcacatctaagctgtggatcccatctcctaaagcccttttcaggagtatatgcttcattcccctgagtatgcccccttttctccaacagtaattcatcttttgctgttgtttctcaccaatatttgaatattgtcaagcttgtttcattttttaaaaccttcattggccctgttttcttctctagctactatactttctccacttttactattaaactgtagaaagagttgccgactgatttggatttgacaaacttagattggagtcctcactctactacttacgagctctgagactttccaagcctcagtttttttcatctgtgaaactggggataatttttagatcccatcataagtgttaagtcgacaatgtatataaaatagccaaaaaagaggacatactgagtatttagatatatttgttttagtccctaacactctaccttctgcccctaccgctaaatactttaaaggctttttgttggttctcggtaatatttcttagtaccaatcagtagtgtttctcaatattattgactgcttcaaagcactgtcttccactgtttttcctgacacacacccctggtttacccattgtttctgcgaatactcctttgggttttttgggatccctgttttttgcccatcctttaatgtttatattccttgtatttatgttcctccaaattctgtcatggcgtttgcacagttattaagctgttaatttggctatgatctctttggaagccaaagcaaagaggaagcattataacaatattaatttatagttaatcagcatttactacgttagacatttttataagcactttacatgtattacttgatatatgcttcacaagaactctgaggtaggacaccagaatagagaggtaaactaacgtgcacagagtcttactgcaggaattcagttttagacagttgaattctggagcttgccttcctagccataacactatactctcttccaaaacagtgacatgattaatgatgtttagaaggataaagcattcttcagaagaactaaagattcttgtaggacttaggtccgaaatgatatatgtgatgatctttcgggaggtgatagcgtatcctcagctgtaatcccataataagtaccatagtaacattccattctcatggaaaacttcagcgtagaacaagaacataataccataccaaagcaaaacacactgaatgtagtttttccataattacttctctcaaatagccctttgatagaaatttggggactaaaataatcaaagttacatttagtagtttaaaaaggacaaaatcgtcttactcatctttgtatctgtagtgcctaatccgtgaccagtcacacagaaatgatccagtcagtatgtgtggagtgaatatgacctcatttagctggccagctacttaagcagtaatgacttaacacaggatgcatttaacatgccagcttctgaaggtggagttgatgattggttgcaagatttgatgagttcaaagaaggaaaataagtaggaatttagtcccgtctgcttcccctcccagcttcccatatttaatcatttcttttttagcttttatttaattcttattatatacctggcagtgtttaaagtggtggaggtccagcgttgagcaagacaaaatccccacccttaagatgtttacactctggtgagataaagagaaaactaatgtgatggtaatgatacagtgagatcagtgctctgaaggagacaagcatttagattatatgcaggtattcaggcagtgggaacaggttagaagcagcattagtgggttcagacaatttcagatctccattagggttggagggtgaagtgtgaatattaggaatggtgagaaatggggcttgtaggaagcagcaccagattgtaaagaaccttgtgaccaactttaaggtttttacttccattgctcttcccatatcagcaatgcctttcttaacatgctactgacatggggagagtagagggaagaacaatgtaaagatgtgtttcgagggtcacacgattcctttttttctgagtaacacaattggaactgcatgtttaatctcttcattaattatttttcattgtagatactgatatccatatgacttttcatctctaaactgtaaaatcctcaagaacaggaagtgtgttttattcacttctgtatcttcagcatctgatagtaactcagtaaatgtttttaaaaagtcatttaacatttgtagtcattttatgttttagcctagtaactaaaacatagttgttgtgttatttatttgaaaaacagtttaagttttaaacaactgagtttacagaccactctgtgaacttaagattacttgcctttgaatagggaaaaattactaaatttaaaaattgaggaattttttttactgtttaattacaaggacaatcacagcttaacagaagacttcaatacagaatttgggcaactatgttaagtgtttagtctgaaatgtgttattattcctttggtttatagacatatgaggaagatcgaaaaaactactctgaagttcaaattagatgtcaacgtttggccttagaattagcagacacaaaacagttaattcagcaaggtgactaccgtcaagagaactatgataaagtcaagaggtaagtagttaaaatggctgcagtagtagttctctatttttagggtgcatcaaagtcacctgagtttttaccaacaatcagttgttaattttacttttaccttattcttctttgcacaaatgcatgcagttttggcagtttgttgggtttatattgtatttttatattggttgtttttgttttatttagatgtcactgctgtcttaaaatgtaaacagagatagaaacccagtaaaatcacacgtgtgtaaatattttttcagtgttatttgatgattatttttatgtagtggaatcaatttaaatacttaacagttttccctgaagtttttttcagctgtttcttcctgacaaaagacacacactctttcaaaaaaaaaatgacactttctgaaaatatgtttcctaatatttgctacttatagcaaatacctttttttaactggaatattcttttctgttgtttgttcagtaatttaatgagctgctacttagctgtatgtccctcagtacatctcttttcattctgagcctaagtttcatcatttatgagatgttgctaatacggataactgcactatataaactaagatcaaataaatatgaaagcctttaaatatatatgtactgcatatgtaatataaatggaatgaccttatcttaattgttcactccacttgaaataattcttaaaatgtagtagtcagtgaatatttgttaaatgaatgaatgatttaaattgtgtaatttaaattacaaattgcataataccgtatgtgaatttgcaaagatttgtggatagaagattgtcatttctactcccattatgactgacacatggtatttcttatgtatatggcattatgccaaaatatgataattattggagctttaaatccatgagagctgtgctcagtgggctctggaataaagctggagttcaaaagaagcatttaaaaatgaagtagagggcatagtggcacatgcctttagtcccagctacttgggaggttgaggtgggaggactgcttaagcccaggaattcgaggctgcagtgaactatgatcatgccactgcactccagcctggtggcagagtgaaacttcatctcttaaaaatataaaataaaaaagaataaaaatgaaatagattatgatgctaagatgataccagttggtattttcatgtcccctctgccactatcagtctatagcaatgacagatacaatataaaaagagaaaactaaaaagcacagtcatcagaataatccatcggggccacggatgatcattgaaacaagatgagtcatgagttgataattactgaatttgggtgatgggagcatgggtgttcattatatcacctctatttttacatatgttttcatttactataataaaaacctaggaaagaaaaatataacgttgatcaaaaagcatgataagcatctttatggtagaaatggaatagtaaaacaagaaaggactcaaactatgaccctttttagttcactcagcagaatgaatgagtttaaaaacatcggtcataaaatataagataaactggggaagaaaaaaaagcccttttatgccccgggtaaattctcacaaatgtacaaaaggaaacaggtgtatggatgttaattgtgtcattattaaaagaaattcaaatgcttttcagtagcagaatggaaaataaattgagatttactctgcaatataattttatgtagcagttaaaatcattaaattagatctgaatgtatcacttttttttactaaaagttccttattttctggcataacataatgttcctagttttggttttcgtttgttggttttgtaatttcattgcctcagctctttgtctaagaagtcttgatctcttagtggggaatgctatttagaaatttaggatttgggtgctgtggtcatggctacattggtcattatttctaggccctttgagtaggcagagaaagtagagggagaatgaggaggaggcttaacacactatggatgagatcatactgatacttcttttttttgagacagagtctcactttgtcacccaggctggagtgcaatggcacgatctcggctcactgcaacctctgcctcccaggttcaaacaattctcctgcctcagcctcccaagtagctgggactacaggtgtgcgccaccatgcccagctaattttttttttttttttttaagtagagacatggttccatggttgaccagactggccttgaactcctgacctcaggtgatctgcccaccttggcctcccaaagtgctgagatgacaggtgtgagcctctgcacccagcccacgttgatacttctaattccaattcaacactgcaacagccacttggatgaggtgccaactggctaaatatagcaaacttgaatatcacaataaatattggcaataatgaattacagtccattgaatagaataagagtttataagtgcaggctaataataaatacagaaagaggatcttaaaatttttttaatacatcatctttaccatttttaagtgtacagttcagtggtaataaatatatcctttttgggaaagaggatctttatggttgaaatccaagcaataaatgtatatgcatgtaagaatgaccattttgtagccgcataataatattgattcagaatcatcattggaatataaaaccatgaagtataagtatgttagggaataggatatttacacaaagcatctcttcacaattacttactaattttaaagggcaaaaggatacctttatagttaaactctggcagatgctaccttaacctggtgatcaaagttactatcaccaataatgggataaactgacgtcacatacctcagtacatcttcacataacatactgagaatgcgtttctgtatcagagaatcatttctgagaatcatttctgtagtattcctgcccaagtgcctaacctgaatctaataatgaagaaacttcagacaagtgaaaattgaggagcattctatgatgcagctagcctctgctctataaaaagtcataaaacacaaggaaaactaagaaatcttcaaggttaaaggagactaaaaccccatgacatctagatgcatggtaatagattataatatgatgataatagatccttggattaccattatggtaatagagccttggctcagggaaaaaaaaattcacaaagggtgttttgggagacagttgacaaaatttgaaaatggattgtatgttagataatattatattagggctaagtctcctgaatatgataattatactgtgattatataagagactatctttaatcttagtaaattcacactaattatttagggataaagggacctaatgtctcagttgaggaaacaaatgcacatgtatgagtatgtgtgtgtaggtgtgtatacacatatagatacatgacccttgaccaacatggggtccacttatattcaggtttttatcaacctaacaccaatcgaaaatacaattttcacgggatgtgaaacctgagtatacagaggactgactgtttggtgggatctgcaacaactgcaggacttcagcatgtacagatttgcatattcaggttgtgggggtgggtctggaacccattctccacatataccgttaagacacctgcatatattcacatatattaacaagagagagggtttgaataaatatgacaaagtaatatttatttaatattacaaaacaaatacaacagtgttaatgattggtaagtaaaagcattaaaaagaaccaagctggttacagcgtgtcatgtctgtaatcctagtgctttcagaagcacaggcaggaggatcacttgagcccaggactttaagactagccagggcaatatagcaagaccgtctttacaaaaaaaaaaaaaaaattaaattaggcacatggtggcatgcacctgtagtcctaactctctggcaggctgaggctggaggatcacttgagtgcagtagttcaagtccagtctgggtgacatagcaagacccccatctcataaaaaaaaaaaaaaatttaaaaaaaagattttttaaaaaattgcatgtgaaagcacaaaataaaatttaaaaatttttttaattaaaaataatctaaacattctaaaaataaaaaagcacaaaatacgtatagtaatatgtatcagaatagtaatactgatagtcatctttacttattgggtttgtaggtgattgttattttgtgctttgctcagtttttcttcaataaacataatattttgttaactagaagaaaaaaggctttctaaacgtttttgaaaaactgatgcaaaggaaaacaattcctaacagccctctctgtggaaataccaggtgggtcagtgaaataaagtgcaaaggcactgcttctgactgcagggaagtagttaagagttagtaaatctgtttctctgctcattttaaaaaatgtgtgttgtaggttttagtccaattcttggtataacttttttggggaacttgtcttaaaatggaaattaaaatctgggtaatcataaacaatttgtgaatgaaatagtcacaagaatgcctgcctacgtatctactatgcaatctaaatgataagttgtatttttttttttaccttaactgaactgaaagcctagagccatgtatacattctttaaaagttttaacctcaagataagattgaagatgactaatgaaaaaataccaaatgtatgttagtaagttttattatttactgtactggcttatgtagtttgtatattccttaaaggtaataaattgatatgtatgtatttgaacaaggtctgaaacagagtcccttctaaatctgaaaagtaggtactttatagttcatggaattacactgaagccccattgctagtgtctctattcagcgtcctaatacatagtcaacccttttaaagtgtacgctgtacaaggggatgtaaaatttacatgtctctttgaattttattttaacagtgaacgtgatgcacttgaacaggaagtaattgagcttaggagaaaacatgaaatacttgaagcctctcacatgattcaaacaaaagaacgaagtgaattatcaaaagaggtaagcttataattagagtcacttatattatatagcatagtattagtgaaaaaaatagcccagagtagatttgaaggagagacattttttttgttatgtagttcctcccaaaaagataaattttttttttttttttttttttttgagacaggagtctttccctgttgaccaggctatagtgcagtggtgcgatcttggctcactgcaacttccgcctcccaggttcaaacgattctcctgcctcagcctcctgaatagctgggattacaggcgtgtgccaccatgccctactaatttttacatttttagtagaaacagggtttcaccatgttggccaggctggtcgcaaactcctgacctcaaatgatccacctgccttggcctcccaaagtgctgggattacaggtgtgagcaaccatgcccagccccaaaaagagacttttagtagctatttttagattttaaaaaagttgcatgctaagaattagccctttttaaaaggaaaattttcatgtggtgaatgaaaacatgaaggaaagaaattaatacagtcaagcttgaaaagtaagatggcatcactgtggatactttttgtttctacatgtatgtaggtagtcaccttagagcaaactgttactttactgcaaaaggataaagaatatcttaatcgccaaaacatggagcttagtgttcgctgtgctcatgaagaggatcgccttgaaagacttcaagctcaactggaagaaagcaaaaaggctagagaagagatgtatgaaaaatatgtagcatccaggcaagatttgcattatttcccacgtaaatagataccaattaacagattttctttgagggaactcttggctttggggaagatttagtgatttttttaaggtctattctatatgataatactaagataataccttattttattttattttattttattttattttattttttgattttgacatttctgctttctgtttgcatacatttaagtggtgtaattttcccatgtgcctttattttaaaactttgtcatttggttttaggtacgtttcttgaatacagtaatgagctgatgtatccattaggataatttgggttgcaaataatgcagaagggtttaaaaaatgaagtgagatatgtttgcttttttttttttttttttataaattatactttacgttctggggtacatgtgcagaatatgcagttttgttacataggtatacacatgccatggtggtttgctgcacccatcaacccgtcacctacattagatatttctcctaatgttatccctcccctagccccccactccccgacaggcgccggtgtgtgatgttcccctccctgtgtccacgtgttctcattgttcaactcccgcttatgagtgagaacatacggtgtttggttttctgttcttgtgatagtttgctgagaatgatggtttccagcttcatccatgtccctgcaaaggacatgaactcatcctttttaatggctgcatagcatatatattccatggtacatatgtgccacattttctctatccagtctgttattgaaggacatttgggtcggttccaagtctttgctattgtgaacagtgctgcagtaaacatacgtgtgcatgtgtcttttatgttagaatgatttataatcctttggatatatacccagtaatgggattgctgggtcaaatggtatttctagttctagatccttgaggaattgccacactgtcttccacaatggttgaactaatttacactcccaccaacactgtaaaagcattcctatttctccacatcctctccagcttgttgtttcctgactttttaatgattgccagtctaactggcgtgagatggtatctcattgtggttttgatttgcatttctttaatgaccagtgatgatgagcatttgttcatatatctgttggctgcataaatgtcttcttttgagaagtgtctatatcctttgcccactttttgatggggttgtttggttttttcttgtaaatttgtttaagttctttgtagattctggatattagccctttgtcagatggatagattgcaaaaattttctcctgttctggagtttgcctatccaccctaatgatagtttcttttgctgtgcagaagctctttagtttaattagattccatttgtcaattttggcttttgctgccattgcttttggtgttttagacatgaagtctttgcccatgcctacatcctgaatgatattgcccaggttttcttgtaggatttttatgatcctaggtcttacatttaagtctttgattcatcttgagttgatttttgtataaggtataaggaaggggtccagtttcagttttctgcatatggctacctagttttccaaacaacatttattaaatagggaatcttttccccattgcttgtttgtgtcaggtttgtcaaagatcagatggttgtagatgtgtggtgttatttctgaggcctctgttctgttccattggtctatgtatctgttttggtaccagtactgtgctgtttttattactgtagccttgtagtatagtttgaagtcaggtagcatgatgcctccagctttcttcttcttgcccagaattgtcttggctatgtgggctcttttttggttccatatgaagtttaaagtagttttttccaattccgtgaagaaggtcagtggtagcttgatgggggtagcattgaatgtataaattactttgggcagtatggccattttcacgatattgaatcttcctatccgtgagcatggaatgtttttccatttgtttatgtcctcgcttatttctttgagcagtggtttgtagttctccttgaagaggtccttcacatcccttgtaagttatattcctagatattttattctcttagtagcagttgtgaatgggagttcactcatgatttggctctttgtctgtcattggtgtgcaggaatgcttgtgatttttgcacatcaattttgtatcctgagactttgctgaagttgcttatcagcttaaggagattttgggctgagacaatggggttttctaaatatacaatcatgtcatcaacgaactgagacaatttgactttctctcttcctagttgaatactctttatttctttctctttcctgattgccctggccagaacttccaataccatgttgaataggaggggtgagagagggcatccttgtcttgtgccagttttcaaagggaacgcttccagtttttgcctgtttagtatgatattggctgtgggtttgtcataactagctcttattattttgagatacgttccatcaatacccagtttattgagagtttttagcatgaaggggtgttgaattttgtcaaaggccttttcttcatctattgagataatcgtggtttttgtgattggttctgtttatgtgatggattacgtttattgatttgtatgtgttgaaccagccttgcctccctggtatgaagccaacttgatcatggtggataagctttttcatgtgctgctggatttggtttgccagtattttattgaggatttttacattgatgttcatcagggatattggcctgaaattttgtttttttgttgtgtgtctgccaggttttggtattaggatgatgctggcctcataaaatgagttagggaggacctctttttctgttgtttggaatagtttcagaaggaatggtaccagctcctctttgtacctctggtagaattcagctgggaatccatctcatcctggatttttttttggttggtaggctattactgcctcaatttcagaacttgttattggtttattcagggattcgacttcttcctggtttagacttgggagggtgtatgtccaggaatttatccatttcttttagattttctagcttatttgcatagaggtgtttatagtattctctgatggtagtttttatttctgtgggatcgttggtgagctcccctttatcattttttattgtgtctgtttggttcttcctctcttctttattagtctggctagcagtctatctattttgttgatctttacaaaaaaaaacagctcctggattcattgattttttgaagggttttttgtgtttctgtctccttcagttctgctctgatcttaattatttcttgtcttctgctagattttgaatttgtttgctgttgcttctctagttcttttaattttgatgttagggtgtcagttttagatctttcctgacttctcttgtgggcatttagtgctataaatttccctctacacactgctttaaatgtggcccagagattctggtatgttgtgtcttcattctcattggtttcaaagaacatctttatttctgccttcatttcgttgtttacccagtagtcattcaggagcaggttgttcattttccatgtagttgtacgcttctgagtgagtttattaatcctgagttctagtttgattgcactgtgttctgagagacagtttgttatgatttctgttcttttgcatttgctgaggggtgttttacttcctattatgtggtcagttttagagtgagtgtgatgaggtgctgttgatttgggtggagagttctgtaatgtctattaggtctgcttggtccagatctgagttcaagtcctgaatatccttgttaattttctgtctcattgatctatctaatattgacagcggggtgttaaagtttcccaccattattgtatgagagtctaagtctgtttgtaggtctctaagaacttcctttatgaatctgggtgttcctgtaatgggtgcatatatatttaggatagttagctcttcctgccgcattgatccctttactattatgtaatgccctttattctcctttgatctttgttggtttaaagtctgttttatcagagattagaattgcaattccggccttttttttttttttttttttttttttttttgctttccatttggttggtaaatattcctccatccctttattttgagcctatatgtgtctttgcaaatgagatgtgtctcctgaatacagcacactcatgggtcttgactcttcatccgatttgccagtctgtcttttaattggggcatttagcctgtttacatttaaggttaatattgttatgtgtgaatttgatccggtcattatgatgctagctggttgtattgcccgttagttgatgcagtttcttcatagtgtcgatggtctttacaatttggttatgtttttgcagtggctggtaccagttgttccttcccatgtttagtgcttccttcaggagctcttttagggcaggcctgttggtgacaaaatctctcaggatttgcttgtctgtaaaggattttatttctcctttgcttacaaagcttagtttggctggatatgaaattctgggttgaaaattcttttctttaagaatgttgaatattggcccccactctttctgccttgtagggtttctgcagagagatccgctgttagtctgatgggcgtccttccctttgtgcataacctgacctttttctctggctgcccttaagattttttccttcatttcaaccttggcgaatctgacaattatgtgtgttagtgttgctcttctcaacaagtatctttgtcgtgttctctgtatttcctagatttgaatgttggcctgtcttgctaggttggggaagttctcctggataatatcctgaagtgttttccaacttggttccattctccccatcactttcaggtacaccaatcaaacgtatttttgtcttttcacgtagtcccgtatttcttggaggctttattcattcctttttattcttttgtctctaatcttgtcttctctccttatttcattaagttgatcttcagtcattgttatcttttcttccacttgatcgatttggcttttgaaacttgtgtatgcttcttgaagttctcatgctgtgtttttcagctccatcaggttatttatattcttctctacactggttattctagttagcaatttgtctaaccttttttcaaggttcttagcttccttgcattgggttagaacatgctcctttagcttggaggagtttgttattacccaccttctgaagcctacttctgtcaattcatgaaactcattcaccgtccagttttgttctcttgttggcgaggagttgtgatcctttggaggaaaagaggcgttctgagttttggaactttcagcctttttgcactggtgtctcctcatctttgtggatttatctacctttggtctttgatgttggtgaccttcagatggggtctttgagtggacgtgctattcctttgtgtttgttaattttccatctgacaggcccctttgctgctggcctgctggagtttgctggaggtcccctcccgaccctgtttgcctggatatcaccagcggaggctgcagaacagcaaagattgctgcctgatctttgctctggaagcttcttcccagaggggcacctgccagatgccaaccagagctctcctgtatgaggtgtctgtcggtccctactgggaggtgtctcccagtcaggatacacgggggtcagggacccacttgaggaggcagtctgacccttagcagagttcaaacgctgtgctgggagacccactgctctcttcagagctgttaggcagggacgtttaagtctgctgaagctgcacccacaggcacccctttccccaggtgctctgtcccagggagataggagttttatctatcaattttattttcttacacaatattactttctagttggtttttaaaaagacactgtggtttttttcagcaatatcaaaagcctatttcttttagatagatagatatatgctatgacagttttttcatttgtggcataattttttaaattcctatgactaatatctctatagaagtatttttttaaagaaagtatgaaagtatctctatagaagtatattttggaagaaaatctcagtatgctaacgatttcctgtgtgaaatgtaaaagaattatgaggagatggtatcgcattgtgttttaacttatatgcccttcaatcagactccctatgttttggtcctgccttctttcttctactggatgtgtagaagttactgaagtaccttaatatcaatcgcttttataacccttgaattatatcgacataccaaaacaaacatgctgggtgcagtggctcacacctgtaatcccagcattttgggaggccaaggcaggaggattgcttgaggccagaagtttgagaccagcctgggcaacatcgaaaaccctgtctctataaaaaaaagtttttaaattagcaaggcacaatgtcaagcacatgtagtcctgcctactcaggaggctggggcaggaagatggcttgagcccaggagttcggggttacgtgattgtgccactgtacttcatcctgggtgagagagcaaggcattatctctttaagaaaaaaagaaaaaaatactaaaacaaaacaaattttaccttaaaggtaaaggtaaaggtaaattttactcttaaagagttcacacattcataatttttcctagcctgtagtagtttttcataccctatataatacttcgacttggctaaaagatcacggtgtggctgtggttgtcatgcttggaagcaaaggattcatagactccgagtcatttcatttttatatttttgttaatattattcatctctcaacatcatcctaccacattattatttttaaatgaaggacattctcaattttgaagcctcaaccatatgcattaaaactactagaaaagtgttttggaagatgaataattatcccacatgaattactaagattttatatagtaattaagtcttttggaaaataatgtttaacaggttgaaatcttagatcatactagttaggaacagtatttttaggaattataaaactttatactattaatagttaagtttttcaggtaacacagtttatagagcatacttgataaaaggtattaaaatcttacgtacagtgcaaaagcctatttgtttcaaaagaaaatttatggttgttccttttcactccttgcagagaccattataaaacagaatatgaaaataaactacatgatgaactagaacaaatcagattgaaaaccaaccaagaaattgatcaacttcgaaatgcctctagggaaatgtatgaacgagaaaacaggtaaaaaaaaaaaaatgcttgtatggtattttatttatctttggaggttttagaagctttattgaaattaaatgctatttattatataatgtcttttttaatacattagagaaaagttgtcataaatcgaaatctaagtataatgagaacatgaaagttctaaagtcttagaacaagatttactagactttaacctttttgctctgttattcctgttatgtctttttttttaccctagtgacttctctttttgcatttgcttcagttcagattgaggacagataaaaagtaaagagtgctgagatatcagttcttcctgtattatagcaacgatttctcctggaaacttgttaaaactagaatagtaatttcaaatatacatatgcctcatttagctgctggctccgaaagatgtcgtattaggtaatcctgaagaaatatcatttttggctgggcgtggtggctcacgcctgtaatcccagcactttgggaggccgaggtgggcagatcacgaggtcaggagatcgagactatcctggctaacatggtgaaaccccatctctactaaaaatacaaaaaattagccaggcatggtggcgggcgcctgtaatcccagctactcgggaggctgaggcaggagaatggcatgaaccggggacacagagcttgcagtgagccgagatcgcaccactacactccagccttggcgaaagtgcgagacaccatctcaaaaaaaaaaaagaaaaaagaaatatcatttttattcatgcagttacttttagatcagtaaatattaggctcacctagttagtgattggcagaattcagggaaaataaatactatttatttcaatggcagatatttttataccgttattatagtcagtgtggtttttgaaagtttatattttaatgagaaaattattttgaaattgacttgtgatactagtttatcagcactgatttgcttatatgatattttgattgttgtcagcaaggctttaaatcagacttaatctataatagcattgtaccatgtcatttctactaggaatatagtagcagaaaatttggtatgtccacccctcaattccaggaaaaaaaagctgctgtattatagttgcttatttataagttgctgtatttataagttagccactgctataaaaactatatatgtagaattatcctttggtagtaaattaacaaagatatttttaaattactgttaaattgttatttaatatagcaggttggtagagatttttatgctaatgcctctgaggggtatgattttattctcaggtttctttgttcttgggtaaaaatatttgtggtaataagagagtagatatacaatttatgatagaacttttttaggatttttgctaaatatgacttagtagaaagtcataaaatgactctcatgaaaatcagattattattttcctcataaatttggcttgcatagatctttatctacctgtttgatcttttttgaaagtctgcattagaagtatacgccaaaggaaattaatatgaacttcaaacactgaacacaaaagaaatcattcatttgtgtattcaacagatactttgtgattatactcttctgcctattttttcttgttcttctcttatttgagctttaaaataattatgtcatatttataatctagtattatattttcaatgaaaatggcaaagaatttcaaaatataaaaattctaagtgatcattcagtactatcttagcagtagacaaactaaaaatatgctttaggcaccagcaaatacgtgtgcatgccagaagaaattatacgtattcttaaaaaatgttttgacatattaatttttaaaataacattttttatcttgggaaaaataaaaacacctctgcatttgtttacacttagtttatattttaatatttgagtatcgaattactagtaggagcaccataatcttttatgtgaataaggcttttgaagtcctaagctagccttcatatgttgaatcctgagaaaattttgttccaagtagctcaaagaaatattggaccactctttaaatagcattattttttattttaattactatgttatgattgttctcttttttgaccatatatgtttgcatgtatgtgtataaaataacagatgttaagagaaaatttcctagttttcattaaataaataattataaagaagtagaataatgcagcactacagaaatgtccttgagactctttctgcttaactcctgtcttccataactgctattctgttatgctaataacttccttgcttctccttagacttttattatctatgtttccagtatataaacatctctgcacaatatagtttagtttttcatattatattagtatcatataaatggaattatgctgtatacacatatatttttgtggcttcttcacataaccttatgattttaagattcatttgcttttgcacttagttgtcccttcatgttcattacaaaagtataacagttttatgaatgtacatgcttagggcagcagagttattaagagattggagagagaattccaaagacattctctatctttggcaaaattttacttcgtcccagccctacattagaaaggaggatcctgtaccttgtgattacttgctctgaaagttcaaaatgcagactaaaagaagaggtatacacctattaaatgctaagctttatgttggaaagttttacatttgcaccctcatgtaattttcagagcaataaattaatgaatttagcaaatatttattgaaatgtaccatttgccagctaaatgctagacatcataggtagtggtgacctttgtcttcacaaagctggtagtctaatggagggtaaagacaaatagagaaacaattatcataagtatgatgatgatggacaaaatgataggataaaagatgagaccacctgtgtatctaacctagccttgggaggaattggggaagacttcataaatgaagaactgccccttttgactaaaactactattaaaagtaaaacttcagacacattaaatttaaagtttaattgagcaatgaacaattcgcaaatcaggcagcttccagaatcacagcagattcagagagactccaggggtccctcatggtcagaacaaatttatagacaaaaaaagtaaagtggcatacagaaatcagaagtgagatacagaaacagctggatttgttataggttggtgtttaacttatttgaacactcagcagtgtatgaatggttgaagtatggctgctggggttggcccagactcagctgttgttacaggcacatacccccaagttaggttttctatcttgtctgcctattaagttaggttgcagtttgtcaatacggactcaaatatagaagtacggagtccttcttaaggccatatttagtttgcattaacactatgaactaaggaaggaaaggaaattgggggaatgaatatatagcatatataaaagcctgaaagtaggacaaaaaggacaaaatgaagctttttgaacaaactaattcggtatggctgaaggatagactgagaggcagggagttaaaagagatgaaacagaagcaggaaatgggcccaaagaatgcatttggaccattatgtaagacctgtggggaacaattgaaagattttaagaagaggcatgaattgatctgattttatatcaaaagatcactgtaatgtagagaatagattggaatggcataagcctgttagacagagagggtctacttttagaggttatttccattatccagatgagaggtgataatggaactggattagtatcagtaaagatgagagaaatgggccaggttggaaaagtatttaggagacagagccgacaggactcagtgactagattggattggttggatgagaactcgttaaggatgtcagcaaggtttctgaattaaacagctgcataaatagtgatatagtttttaaaacattagaaaatacaaagctttaataggaaaacatgataaatttagttgtttcacttgaagtgtctgtggcatctacaaataaaagagttgactgtagaagaatctgaacctcaagagaaagatctgggaattagagaggcctgtggtatagatagtattattactattttacaaataagtactgttggttctgtggttcaattctgttgtggatttaataggcttttgttgactgatataataactttaaaatatatgggaacttcctatggttattcctaagcaatccacatagccatataaactttggtatgtaatcatcttgaaaatttcctcattttttaggtttttgctgttttttaaaaaaaaatctttaaagtttatcccattgtaacataaatgtggttggtaggggtaggttggtaggtaaggctgtgtggggaaacaaccaacagagccgtttctggaagtaggaaaactgaaagcagatgtccttgtctccttgtctccagtgttcttctgaccccctatccacatcaaaatggacactacctaaccaggggattcctgggattggggctgccctgtggatgccccagccagccacagggctcagaattgattggatgtatactgaggctagagtggacaattgccaccaggtggtgccaaattgcagcctgagcccagatgaatttgaatttcacaggacacctaactagctaggtgtacaggcttgcctttatcattttaatgtcacagtaatccaactctatgttttatgtaatctttggggatcatagtttcttcattatggcagatttaactgtagttagagcttgtatcatactaatcttccacacagtaaaaagtaaattataaattacttcttttgaaatcttagaacttaaaatggctaaagaaagaattttaatatttcctgttataaaacatgaaattcataataagtttacacatttaaggttgtgtgtgtgtgtttaggtaaattaatcttttgctttggcctgagatgtgtaattatgttaattactagtattttatcaaagtgtgctgttacaataagttgaaatggatgaagtacttacacttgcatatttatatttggtctccttatctctcctccaataaactttttttttttttttttttgacggagtcttgctctgtcacccagactggagtgcagtggcgtgatctcagctcactgcaacctccacctcccgagtccaagcgattctcctgtctcagccttctgagtagctgggattacaggttcgcgccaccacgcccggctaattttcatatttttagtacggatggggtttcaccatctgttggccaggctgttctcaaactcctgacctcaggtagtctgcctgcctcggcctcccaaagtgctgggattacaggcgtgagccaccatgcccggccccaataaacattttctaaagaaactgaaatgatgattaatgaaatatattttgcctttaatttgttgtctatacattggaggatattaaaaggatactttttcttttctcttctttaatatggaaaaggcacatggaacttactctgtccaatcttggtatctgacctgcagtcattccactagttcttgaagttaaagtattgagagaaaagaaagagagtagaagatataaagacttaagaaaagggcaattataaatgaagagagaacttggatatttagatacatcaaacatactgtagttgaaattataatatgtatgtatgctttggtccagtttgtgaattaagcttttttgtcttttctgtattttctagttacttaaaattccactttggagctgtaggaaatgagtgaaaggtactacagtgctgagatgtattatataaataacttcttgcttagtaggtattatgtgacagaaatgttatggaccctcttatgcatttggaaataagacattctgtgagtgggagtatattatgaaagagatttggatcaaaagactgaacttgatcctggttctaccacttactagctcagcagataagtcacttaatatccctgaagtttaatttcttcttttataaaatgggctaataggctaggtgtggtggctaacacctgtaataccaacactttgggagactgaggcagatggattgcttaagtctaggagttcgagaccagcctgggcaacatggcagaaccccgtctctagtgaaaatacaaaaaaaattagccaggcgtggtggcacaggcctgtagtcctattaaggaggctgaggtgggaggatcacctgagcctgggaggtcaaggctgcactgagccaagatcatgccatttgcactccaccctgggcaaatggagtgagaccctgtctcaaaaaataataataactaactaataatactttttagggtggcccgtgaggtctaaatgaaataatatatgcaaaaagtacattataaattatagatgtagatgagttattttggtaccttgtgcctatgtagaatacttgaagaaaatattttcatctgttatgttgacagtttaaggaaaatcaccattatataaaagtcatctgataatattatgggattatttatcattagaagatactaatacaaaatatatattcttaagtgtttatctccatagcatttaaccagttttcttaaatgacgtaatacagacgtagagggtctacatgccattcttttctgtctaaatttctgcataagatggctagcttatgtttcctaattaggttatgagataataaggtaaagggagataaattcagctgattaagtttttccataaagtaaaactacctttatttaaggtggtcttgttaactgtaaacacagagctattctgagtggtgctctacaaaagataatagaggtattcatgatgctcttgatgcagtacagaatctggaaattgaaatagctttacaattgtttgaaagggggtaggcagtagagaaaaagagattgaaaagatgcttttaagtgcaacaattagtattgctttagtgattttattttcctgccgaatcaataaaaaccatcttgaccacaatttatcttccaaaagtactcaagaagaaactttaatgatataaacttgaaatttatgtagaatcttagagtgatattaaacaactttgaatcttgaatctatttacaaaggttagttgagtatatgtattgtattacaatggtgaatttaactagtgtacagaggttccagtcatcattttaaaagtgtatgtcctcattagtgcttaagcaaacaaacaaacttcttttgttcatatcttaccaggtatctgtataatgttttaagttcttccatggaaaaatttaatagtaattactttgtcttttcagttagataattcttgaagtatatggctctgcagataactctctcagcatcttctcaaatattttaaattaatttttattatcagttatcttttattgttaactatattctttactccttagatgtttacaacgtgtgttcactgcttcattaataatacttaaaaatttcaagctctgtagggtgttccagatatgaagcaaggtaagttcaggttgcataggaatttagatttacctttgtggtgtaattcgttgtgtgttaggagaggctggtaaagtaagattgggccagattttaaaggttctgttgtcagtggggaatttccagaggttttatagtaggaaagaaacatgacttactcattttttataactacggttgcaatgcggggtggattatagttgaagaaagcctagaagcagggagatcacgtaggaggctgttgcacagcttaggtgatgaaaataagtagaaagagaaaatgatggatgaatttaaagaatacgtaggagaattggcaagatctggtgattgacaggaagtgaacctcaggaacgaccccaacttttctacctcagtagtgtcagagtgattggtgataaggcatggccattagctccagaatgcagactttttgagacagagttttgctcttgtcgtccaggctggagtgcagtggcacagtcttggctcactgcaacctctgcctcccgggtttaagtgattatcctgcctcagcctcccaggtagctgggattataggcatgtgccactatgcccagctaatttttgtacttttagtagagacggggtttcgccatgttggtcaggctggtctggaactcctgacctcaggtgatctacccacctcggcctcccaaagtgctggggttacaggcatgagccaccgcgcctggcctaatttctgatcttttacagatgtggcagccctgaccaagctcaaaagtgcttatctgagatcacacagctttttactagagatgtttctctgctgtgccccagatttcactccacttagccctcagattagtagaaggaaccctaagctgctaaagcccctccaacagtcttctctgttttccctaggatgccattaaaaatagtatcactttcattttatacaataaaaactttgaggaaacattgctgtaattatcaacctttaaattaacatcacgttttaatttacattttcatatttaggtagcatagtaagcatagttactatttattgagtacctattatgcgtcaagcattgtactcaacactttacatacgttgtagaaaaagaaacacattttatgaagtttaggtattaataaccgtattttacaagtaaggtaattgagacatcaactgtgacttgcctgtgattattataaacatttgttggtaaaaactagatacatctgactctgcaatgcagtgcacactcccatttaactggtcagtgctatgtaaactgatcaaagatttcctatcaaaactacaattttgaagttaatttacttaaaatagaaattctgtctttttttattattatactttaggttctgggatacatgtgcagaacgtgcaggtttgttacataggtatacacatgccatggtggtttgctgcacccatcaacccgtcatctacattaggtatttctcctaatgctctccgtcccctagcccttcaccctaacaggccccagtgtatgatgtttccctccctgtttccatgtgttctcattgttcaactcccacttatgagtgagaacattcagtgtttcggttttctgttcctgtgttagtttgctgagaatgatggagaaactctgtcttttaagagaatttgcaaacgacattccatgcttgagggctgagtatggatcattagagctttataaaagcatctgtaattttatttacacacacacacacacacacacacacacacacacacacacacacacacacacacacacacacacacacacacggatgaagtcttactgttttgcccaggctgggtcttgaactcctgagctcaagtgatcctccccgccgacctcagcctcccaaagtgctaggattacaggtgtgagccaccattcccagacaagcatttataatttttgaagttagcaaagaggactttttcttttcttttttattttattttattttattttaagttctatgatacaaatgcagaacatgtaggtttgttgcataggtatacatgtgccatggtggtttgctgcacctatcaacgggtccatctaggttttaagccccacatgcattagctgtttgtcctaatgctctccctccccttgccccccacccccaagttggctccagtgtgtgttgttcccctccctgtttccgtgtgttctcattgttcagctcccacttatgagtgagaatatgtggtgtttggttttctgttcctgtgtttgctgaggatgatggtttctagcttcgtatccatgtccctgcaaaggacatgatctcattcctttttatggctgtgtagtattccatggtgtatatgtaccacattttctttatccagtctatcattgatgggcatttgggttggttccatgcctttgctactataaatagtgctgcaataaatatatgtgtccatgtgtctttttatagtagagtgatttatattccttttatagtagagtgatttatagtccttttggtatatacctagtaatgggattgctgggtcaaatgttatttcttcttgtagatccttgaggaatcgctacactgtcttccacaactgttgaagtaatttacactcccactaacagtgtagaagcattcctgcttctcaccagcatctgttgtttcttggcttttaataattgccattttgactggcatgagatggtatcattgtggttttgatttgcatttctctaattatcagtgatgatgagctttttttcatgtttcttggccacataaatgtcttcttttgagaagtgtgtgttcatatccactatcaagcctttggcacccccatactactccaacaaagatgtttttataccaaagcccctaagaccttcatgttgcccaaatccagtagtcattttctcagttcttaccatgcttcaccttactagcagtatgtaacacagttgatcactccctactcctgggaacacaatctttagcttccatagtgtcacacactattaaatttttctcttcctcattagctgcacctactcattctctttgttggttcctcctcatcttcttgacaacttttgcagctgcctccatggcatttccacttggttatctattaataatatttatcctaatgtgttcagaagcaaatttctgttccattctacctcccaattctgctccaccttcagtcttacccagttcgattaaagacaactctattcttccacttgcccagaccaaaaacctgaagtcatcttttttcacattccatattctattcattagcaaatccttttggatttatgatctctatctcacgtatattaccttgcttcaagtcaccattatctcttgcctaaaaattactgcagtagcctcttaagtggtccccagctttcttcctcgccctctccagtctcttagcacagttcttgttaaatgttaagttggatcactcctctactcaaataaaaaggctccccatcattaaacttagtaaaactttaaatgattacagtggcctatgatcctacctgatcagtattcagttatcctatcctcatttaggattttcttctggtcactcgcatagtcatgctggcctcctgttcttttacctgtaggtgtgctcctacctcaggtcctttgtattcagtttccactgcataaccatctactcctgatgatacacctgttcttgtggtcttttctgactttgttctatgttgtctttgtttttaatctatcaacatactacatatttatttactttgggtttttttcctactagaatgtgatctccatgagagtaggagttttcatgtatcgttcagtcctggactcccaggtaccagtgcctggtacgcagtaaacactcaatatacgtaatatttattgaatgaaagaatgaattggtactactttttagaaattaggtggctgttggtttagatgaaaacctactcaaaggtttataatggatttgatcaggactgagtgtcgtttgaagatatatagtagttactcagttaaccatctaccagattcattctgtttcattttgatatgttaccttttatcctgtcagctactttgtaaatcttaacacattaatggatttaagcaaatattttgcattttggtacttcaattttttataatttttcaaccataatttgggttcaatgtttatctactttgtgcttaagttttcatatctagaaacaaacaaaaatctgcttgagcaccaattgtcttcagtccattttatgctgctataacaggatacctgagactggataatttataatgaacagaagtttattggctcacaggtctggaggctgggaagtccaatatctacgtactggcatctggcaagagccttctcactacattatcatatggcataaggcaagaaggtaggagacagagcaagggggagccaaactcacccttttataatggcaccattcccactctcatggcctaatcaccattatcaggtcccacttcttaatactgttagaatggaagttaaatttcaacatgagttttggaggacaaaaacttttaaaccaaggcaccaactataataaaaggttaggaaagtgtagcattttcagtcaacaatgatctcaaaaagtttctactcttaaaatgtatagcttctcccaagaaatttattaaataagatttccactttgcttatttcgtttttatgtcctgctcattaacttttcagtcatctatgataaaggtaaaactacagtcattgaatagaaacaagataatctacatgcaacccttctattttatgccatcttaaaaacaaaggcatcagatatggaaatgagcagttttatgttgtgtccaggaagacgctggaggtagagatgataaattcaaacacttttcctataaataagcctgtcatataaaacagcctattttaatcctttgttgttctaactagaaaaatatatttacttctattagccaaaaatatttttacatgaagacagagggaagagtttggattgcttagttgcgcctgctgagctcttctgatagccatggttatttttgtttgtttttgtttttgttttttcactatttatgcttggtaaattttaagttctgaggcattagggatgtttattcaggctcagacgtattccttgcattgccaaactctgatttgatactgtttgaatttcgaagggtcctaaagtttttctcattcttctgacatttttcttaccacttttcagatataaatgtagattcagcctattggtactgtgaaatttatcatctagtagtaggcaaatacattctaccctgtacgttagtctattgttacgaatgttttataatgaggttttcaagtttcagttgtgagctactgttgaataaacttctgtgtattaaattatctgctgcacaaatggcactatattgcatatgaattatgtctattttgttataatattaaaacccttttatttaagtaaatgattaagaacttaactcttggccgggcgcggtggctcacgcctgtagtcccagcactttgggaggccgaggcgggcggatcacgaggtcaggagatcgagaccacagtgaaaccccgtctctactaaaaatacaaaaaattagccggcatggtggcgggtgcctgtagtcccagctactcaggaggctgagccaggagaatggcatgaacccgggaagcggagcttgcagtgagctgagatcgcgccactgcactccagcttgggtgacagagtgagactccatctcaaaaaaaaaaaaaaagaacttaactctttaagtttctcatttgaatgttataatttaagtaaccatacctcttggtttgtctaagaaagtagtggtttgtgtgtgtttctttggcataatttttaatagcaccctcttttattctaaaaagtgcaccaggttgaaaaatacattatttgaatactctagttataaaagtaggatactcacttaccctttgcatttcacatagtatttatttaagatttattttcttcaatctttcctctcaatatgtctccatcccacaacatagggtgaatgggaaaaatacatatgtgtatatgggagatacatagaattgctaggaaacaacatgaaagaatcatgaaaaacacagtgttggaatctaacgttaactttatacaagtattttaaggatgacatattcagatttttgtattttaaaacacttatctttctttgttataattacatttgattatacgcttggtttggacttctaaaacttgagcttcgttagcttgtacatgctacggatagcttctatcaatttttgaagtttctcttttgaagaacatttgaattcctgtaatttgttttgtaattgtatttctgttatattttctaatgcatttaacatttgaaatggattacttattatatgaaagttattgtcttatctgtggaaggaatacatctagcattttatcaaacagtttatttttgaaagagcatgttatatactgtgggccataaaagctaatgtatagtatattcacaattctttcaaggcttattttgatttcccatctattggtgccttgaggtggtcatgtaatataaatctcataatgtcagaatttctcaaggagaaaacatctgtgaagcaaaggaaattttaagaggcagcatagtatgattcacagcacagactctggagccaaattgtttgggtgcacatttggactctgtagcatacttcctgtgtgactttaagctaatacttaacctctttgtgttttagtcttatcatttgtaaaatggaggtaatgatacaactgctttgtgggattgttgtgacaattaaatgagttgtgatatgtaaagtgcttagaacggcttctggcacatggtaaacagtatgctattgctatttattgtcagtagaagaatacattgagtttttctctctcagacttcatatgaaacctgtgaattggtaatattaaataaagtatctatttcttataaggaattatgctgcgttttgctaaagaatgcaggttgtggactggatatggaaggtgtggtacttgataaggagattgggtttacacagaaatgttacccacaaacacctgtgagaggacctcttggtagaagccttagcttcttctggtccattccccagttcatttctgttttctctttctgaattgctttacctatttgtccttcaagacccaacttacatgtcacttttaaaaaatgtttcactttattcacctacctctcttactccagtaaagaataatcaactccttctctttgtggccatagaattttgtttatgccttaacatagtacttaacatagtacccgctaatcatacctcctttcacaagccctgatgttagcttgttctaggttttatttcattccctttgtcttgttttcatttctcatgtccattgttgcaagaaaggaaatgttattagggactgaagcttctccatctaccaattgagcattcgtgattcattagtcctgtaaatgtgctctacttgtaattgtgctgccgaaataacatatagaataatgaagctgtatttgagaaatgaacattgaaaccaatttgtggtgatttactgactaaaatatttacatcatttcgaaatgaaaaatatataaatgtttaatatagtttgagaactttatctataacattaattttttatgtttcagtttgtttgagaatagaatatttttgaaggttgttgcaatcaggatgacatctgaaaataataatatgccattttttgatagctactttagaatgcacttccacttagtaacccacaaaagtagtttcttttcttttcaataagagttatctatactccagcatttctgaagaaactattttatttctggcttatcaactattttactgacaaatctctaatggttgacatttttaaaattttaaatttgttgttaatattgatggcagcagcggcccatctggagcagctgttgtaaagatgccagctgcagtgggggaggcgcgtccagggctgcatgctccactgagccagcaggagccggaaacaggcagaaacccagaccccttccgagttggaggggcgggagccctcccaggcgcagctgcagtggcccagtcgcagctgcggacccaggcattccctcactatcttcggcctagggagcccccttcccccacgggttcagaaatgcctgttcccgctgcctgacctctccctactcccagcacccactctgatttcagagcaaagttgaggccaagcctgggcactgttgcaggtgtgcccgctcttggggcattgctgacaccccagccccctgccacctcggcctcctctggactttggacactgacaagcacggaagggaggctggccaaagtgggggatgagggtgtcttggtgcaggcctgcaggtgccctttggcactccaggctgggcgccaggttacagctggttgatggcggcaggaggcaggctggcttctgggcggaaaggggtgggtccctggtgaagccccaccctcaagccagggatagcctggagcatgggagctgcgccaccagtttcacagaacggagtgagaacttacagtacttttttcctctggcccacccattgccacctatggaccaatcagcatatacttcctccccactgaagcccacaaaaaccccagactctggcagacctctggacgatctgcctgcagagaggagctaccaactgtgggtctcctctcagctgagagctgagcagatgtagagacaacctgcctgcagagagaatctacccactgtgggtctcctctcagccaagagctgagcagacagtgggatggcctgcctgcagttaggagctacccattccagatctcttgagagctgtactgctgctcagggaagcacctctttgccttattcatgctccggttgtctgtgtacttcattcttcctggacacaggatgagaacttgggacctgcttaatggtgggactgaaagagctgtaacacaaaaagagctgaaacatgcccctcactcgccacattgcaacaaggagagaattgctgcagccctttggggagcccagacctaggagctccctgagcaagggctctgacacctgtttggggctctgcagttcctggcatctccaagcttccggacaccactgcattccccggtgccagcagtggaagctgctttcagtatgcctgtccagtcgcagcctcacaggaagcctggagccgcctaccccacggcagccggtgtgccctgctgtgtgcagtggttgaaccctgtactcactgacttgctcacgcaccccttgctcacacaccccttgctgctctgcacttggcttgccctcagcaggtgtgagatcccggccagtatagcttgagccgagtacagcctgtgaggccgagtgggtggaacaagcccagtgggcctgagcataactcgggcaaaggcgccactggccacaaaggtttccagctgacaaagtgacgccccaaggatcctgtgacagcaccaccatgcaaaagactagattgagtactggtacagcaaatatgactactaagcatttctatccaatattcaatagataggtttattcaaactttatggctttcatgactccctactcatattctgtatgaataataaaaaataataatttccaacccagtttttcatgagagatagtgtggcatgatgtaaaaagccctggctttggagtaagaaataactggattcaacttatggtcctcttaggctgtgtgacttgaggctaggtatatgagctctctaaacttcagtttactcagctaaaaagtaggttataacataaagggctttgtagggattaagtgagcaaaatcatttatattacattctttttatttatgttgtaactgctagagaaggagatttaaaaaaaaaaataggtgactatctgaaagaaacttactgttggtattttttttttattcaaagtttcatcttgattaaaaggcaaaagttttgatctttggaagctcatggctagttgtgtaatctcccagttagtcattgttgttatcttccagctccccttaactgacactaaatgtattctttctatcaatttcagttccttcctactgtcctcacaactgttaagtagatgacttttccagtaccctaacttcatacttctttgagccctacatgaatattgaccttcatctcagatctacttaatttagtcatactaattttcatacccgatcttgttagccaccaaaattctgccactgaaaagtgctgttctacctccaaatcaccattctccagtcttccatcttgcttgtacaactattacactttgacttaatctgtcatatcttatcaggacctctaattctttgtcccttctactttctcctgtctgtcaacctgtgtttccttcccattccttcctatataactgagacttcaaggttcttcatttcaatgattctcttgctcgtatcccaaaccgcacttttattttgattctccacaatatatctttcacttaaaatattttatgggacatttattaacctccccaaacctcagttttctagtggataatatatgaataattacacctatctcattggattctcgtaaggaatacataaattactatatatacaaactggttagccaaccctttgacccatgcggagaagggtggtgtgacatagagatagaccatactggcacctacactggtgtatcctgctcttagatactcaaccaagccaagcaggtttatatagtgtacactttgggtccccaacttctcagatgggtccttaagattgtcagatagtccatctttaagaaagaacatagataaatcacgcatttgaaataactgaaatccatgtttaaaatttagaaatctccgagaagcaagggataatgctgtggctgaaaaggaacgagcagtgatggctgaaaaggatgctttagaaaaacacgatcagctcttagacaggtaagcatcataaaaatagaaatgttaaaactcttccattattgtttctgttacatattcttttagaaaatgtattttaaggagagaataattttcatttcaattgaggagagactaattttcatttcaataattttcatttcaattttcatttcatttcaatttcatttcaataattttcattgcaattgctttatttttacaatatacaattattgtggatattgaaaatgtggtatagaacagttcagttactccagagagtttccttatggcccttcagtccttcttaactgctactactcaagaggcaccactttctgatttctgtcacaatagattagttttgcttctcttagactaaaaatactcttgtgtccaggttctttcattccactttgttgttgtatcagtagttcattccttgttgttgctgagtatgaatatattttattcacctgtcaatggtcattttggtggtttccagtttgttactatcgtgaataaagctgccatataattttttgaaagtgtgtgtttttatttatcttggctaaatacctaggagtggcattgttcatcattgggtagataaatgttttacttttaaaaaacctgccaatggtaacaccaaagtgattctaccattgtatactccctagttttttttttttcaaaatctatatgttctaaagtatgtgttttggaaggaggatatcagagagaatgatatatctttaatttaccaatagaaaatgatatttattttaatagccttgttaaaaggaaaataactgatgggcattatggtaaatatcattacttcattaaacattctacactttcaattgtttgactgcatagagagtaaacagtggctaccttatttttttaacttttcattttaaaattatttcagaaaagttgctaaaatggtaaaatttctgcgtaccgttcacatactaataaacttttgaaattaagttcaatgggtcttttaattgttaaatgaagaccagattaatttgaggtataagcaatacataaaactaaaatttgaggcaagtcttcatataattaacctattgtaaaaatcttttagaatggctcaaattgtcatacttctgaattcacatcaactttataaacttggcctatggaagaattttaataaatgttatattgaagaagtcattcctataatgtggaagtatgtcttattctaaatatcatgctatcgggctaggcactggaaggctgaggcaggtggataacttgaggctaggagtttgagaccaggttgggcaacatggtaaaaccccgtctctactaaaaatgcaaaaattagtagtgtgtggtgatgcatgcctgtgatcccagctactcagaaggctgaggcacgagagtcacttgaacccaggaggcagagattgcagtgagcagagatcatgccacagcactccagcctgggcgacagagtgagactctgtctcaaaaaaaatttttttagtttatctaaaaaaaataaagatcatggtgtaaaagatcatggtatgtaaatcagctcctttcattagagttcctataaagcgtttgttttatattttattacgtgtaacgcttccacttacaaaactatatgatgtcccctaaagattcatttgactttgtgttgatgtcagtttttaatgtgtagttttagggatgtatatttttagggatggctctagaataagatttatgggcaaactaataaggtttaaaagaaaacgtaagatattacctagtaaatcagaacttacattcatcacttgatagctactgtgtggttttgtaaagttggagagaataatatatctgatcataaaactgaccaatttatatttatcgtaagctacactcttaacctaaatccttcttatcctacttgtatgtacatttgcaactgatgttcatccgaaggccatgcgatactctaatacctaaaagtatctattaaacaatagaggattcaattatttaatgtttgtatagcacttagaacagtgccttcctatgataactactattatcatagaataatttgtccaatttagtgttgttgtgaaactttactaactgaattttgttcttcacaagttgatatctttccaacgaatttttcactaaaattttagataaactggaaaacctcattttcaaactgccagataggaggaggcttatttttaataattctttgaagtcatagtaaagccttgcttattcagagcccaattttcagccaaccttaaatatttgtgatagttttaaaatcaagacaaggaaaaaaaggtgtttctagacaccactaaaaataacccttgagcagcaaatagagctaatgctcaggactgtaaaggacattacagaaccagagacttatgaataaatgagtgaatgaatgagaataatatctgggaatgtaaaactcaaaataagcttaggctttaacaaaatgcttaaaatagctaaagttacttatctgttttttaagatataatatcaataaatgaagggaaaagtatccctggttaggactgtaatgttgataaatgacatttttaaaagtagaattctagatgtaccatcagtttaattctttcttaattaatatataaattcagtgcagttcatgtcaaaattttcaaatgactttgaaacttgacaaaccaacactaaaaattctttttcacaattattatgcccattcttgtacatttactcttccatataaatttttatagttacagtttttacgttatgccttcatgtgaagttcaattttggggtagtgtacatagagaactaattttatttttcatgaaaatgtcagtttccttaagttaaactatgcatttaatgtaagccaaatagaataccaaaaatatttttttgaaaccagacaaataagttctgtggcttatatggaaaaattaagtaagtgcatttctaaataagaacaatgaattgtgacaggtcactagggtagccagctaaggggaaaagaaaattgagatccatacctcataacttacaccaagataaatttcatatggatcagagatttaaatgtaaaaccattaaaaacctaagaagccataggagaatgtttttataatcttgaattacaaaaggcctttgcaacttaggagttatagaagtaataaattgataaacttgattccctacaaatgaaaaatgttggtgtggcattactgccataaggaaagtcaaaaaacaaatgcaaatgtaatcttggaaaaaatatttgcaacgtctgtcacagtcatgtgactgattttcccttctccaaatcaataagtcaacattaaattcatattaaaattatacctattttcagctggacatggtggctcatgcctgtaatcccaacattttgggaggccgagttggttggatcacctgaggtcaggagttcaaaaccagcctggccaatatggcaaaaccctgtctctactaaaaatgcaaaatattagcctggcatagtggcacgtgcctgtaatcccagctacttgggaggtggaggcaggagaatcgcttgaacctgggaggcagaggttgcagtgagccgagattgcaccattgcactccagcctgggctacaagagtgaaactctgtctcaaaacaaaaacaaaaacaaaaacaaactatgcctgttttccactaaaaaccaaaaggttgataatacattgtgtttgcgtgggtatggaaaaacaggcaatcttaacattagtgggagtttaaattggtacaactaatatgaagagtaattcgataatacctatcagaagtacaaatgtacattgtgtgtgtgtgtgtgtgtgtgtgtgtgtgtgtgtatgtattatgtgagatggagtctcactctgttgcccagtctggagtgcagtggcacaatctctgctcgctgcagcctctgcctcccgggttcaagtgattctcgtgcttcagccccctgagtagctgggattacaggcacgtgccaccacacccggctaatttatgtatttttagtaaagatggggttttgccatgttgcccagtctggtctcgaattcgtgacctcaagtaatctgcccgccacagcctcccaaagtgctgggattacaggcgtgagccactacgcccagccatacattgctcttgatcaaggaattttatttctagtacgttatcctgcaggtatacttgctaggttcaaaatgctatatataccaccttatttactgtagcatagttgacatttaagcagtagttaaaagaattgtaattcatgaatactcttacagaatacaacaatgtagttgtacaaaaggaagtaagtggctctttatatcaggaccaggaaaaatctattaacatttattgcttctggagaaggaaattaggtgttgcatggttggtggacagatagagattttgtacctcataaatatgtaccctcttttgtacctcatacatattgaaacttacaatgtgtttttttcttttttgtgtgtttttaattaaatttaaacaaagagtggttattaagaatacttatatacaagtttcaaatcatagttactgagaaacttcagaaattatgtttttaatactcctggtgaacaatgggagtgaataaagggagtcaacaaataccatcttgttttcataaaagggaagaaggtagtagattcttgcaactattaaggaacatattagtagattacattacataacatattttgataaattatactctaataatttgatgcaatcttacataaactttaagcaaattacttgactttttttaactataatggatgtaagtactttgataaacctttgcttttttcattgtcagacgtgatgtttctaaccatttaggattgctttgagccttagatataatatattttaagtgtatggcatagattatgctcagtaagcagccatgcttgcaatggtttttaagattgctgctgaaagaagcaagtatcaccaagagttaggatgggttctctaaaaataaagaagactacatttcaatttttaagagatatattgcaggggtaaagcatggaaatgagttagatagggaacaagggatttgataagactttccatgacatccttttaaacaatatggggaaaatatgggagcaattcaaggccaggtaaatggattagtaactactgaagggctttatccaaatgttgttagagaattattaattaaaaaatgggtatatggtactcatctataatatcctgcagtactatatttctgcatttttgtcagtgatttcaggaaaaattaaaaccatatttaacaaatttgatataaaacaataacaacaaattaattgaataatgaagtaaggatctaatagatcttttcaggcagaagtaattaactgaatgaattttaataggaataaatgtaagatcatgcagttgggtccagaaaacctatggtttataggtttataggcttagatgtgaaatgtgaaaatgacctgcatggtttcaatatggagatattatcctacagtaatagaagttatatgtagaatgtgatctgtaattaccttacctatagaattatgctgataactgggcacccaagctttaaactaaaaggtcttcagaggaatatggccataactgcaaaaagattcaaaagtgccctattagtgctaggctgtaactacctacaagtattttaagcgttcacatatgaaaaagctggatttcttacttggcaagacataaagtagtagaattgggaccactgggtaatcactacaagaaagcgtaaagatagtaggacttttcacaatgccttagcatctgatacattctctatcagtagaagtattcaggcataagccaaattcagtagaaatgtgcttgtaaaggttgaagcatcaagtgggtagcttgatgagtttaaagccccctttcatcctgatgtgacaaccgtgtaaaagagttgacgcactcattaaattaccatgcaaaagaaatggtgaacacaagctaattttgaggatattatttaaaagatttctgtagttcgctttccctgtgtttttttaggggtgtgtgtgtgtgtgtgtgtgtgtgtgtgtgtgtgtgtgtgtgacagtagagagacagagaatctactgaagttattttgagtatagagtgcctatgttgcctatgtgtttaaactcatatattttgggaatatcgtatatattttgtatatagtgaagcttaaggaaaaatattttattcttcagaggttaaatttttaatattcaaatatgtgattctggcttcctttgtcacttcctatgttttaatctttatgcggaatgtgatttccctgaatcatgcttaagtaaagcctctggcatgcctatacataattttctagtcaggtataatttgtctcatctttttcatttatgttagaagtttttatttatcaaatgccacatttttatgattaaacaacctgtgttataaagagaaatgtatggaaacggtgtgccatttttcaaacgagtgaaaatggctttttactcaaagacttttcttttctacaaaggaaaggacttttctcaggcaaataaaagactcatgtatgtcccaattcaagctcaacaatttgataagtaacaaatacccagttttcatgaacatgaacagttattatgtcgtattctgttgctttgaatccctgcatgtactcctaagattctttcttccaaaaagtagaaattttaaaattcagtgtttgtagtagaataaattgaatacactgttacattcgtgggctactacatagaatactatattgggatctaaaatgtaaggttgcaattcaaaattaattttaatagtgaacttttttcagttatggtttgttttatttaaaaaaatatattctatgcaaggtacagtggctcacacttgtaatccaggcactttgggaggccaaggtgagaggattacttgagcccaggagtttcagaccagcctgggcaacatagtgaaacctcatctctacaaaaaatgtaataattattacatataagaatatatattatgtacatatattatgtattttaaaagaattttcattgcaagtatttttaaattaatattgtttgaaattatgttttcaatcccaacttctctggtaatggtaggatttttgtcctcattttgtattagtacaaggccaaaataagaaggcatgggaaatcagataagcagagtaagtgatttttatgtcatattgggctagtttaaagcttgataaagaaatcagctgtcctaaatttcctttcagtgctttttttcatatttctatatacttttatctttatattttaatctgctactaggccagagtgcagtggcatgatctcggctcactgcagcctccacctcccagagttcaagcagttctcatgcttcagcctactgagtcgctgggactacaggtgtgtgccaccacacctggctaatttttgtatttttagtaggtatggggtttcgccatgttggccaggctggcctcaaactcctgacctcaagtgatcagaaaaaacacagcaatctttgaagcgaaaaatatggcaacagaataagatggtagaaactaatgagagaaactatatatgaaaatgatagtatagaaataaaaaggaatggaagagaaatagtatttagggtcaggggagttccagaaaaccatgttggtaatttgaggctggaggtttctagagcagaaaaaagaataaagtgatgaaaacagttagagaaaaagtaattgacagggaggacagacagtatatattcatcttcagtgtgccaagggaagaaaacaaaatggaccaggaaaaaaaacatttagagattcaatagaagaaaacattttctgaaataaggaatctgcaatttagaagaactcatcacattctgggtagtgggaagaggatgggaaacagcaatgttgtaaatctaagtgaagttacagaacatgaatgttaaaggaatagaattagaagtatctgcgcaaaataagtaagtcatttactaaggaaaaaataaatctaagctgcatgcagtggcatgcctatagacccaggtacttgggaggctgaggcaagagaatcgctaaagtccaggagttgaggaccagcctaggtgacatagtgggatgcccatctcaaataaataaattaattaatttggttgagctcaaggttttcttccataataatactttatttatttagcaatatttattaaccaccaagcaccattttcaggcactgtgattaagggtttgacaagatgaaaggctctctgtcttaatggaacttgtatttctgtgatgtaaatcagaaaatatacaaataacaataatttttagagagtagcagttatttgaaatatatgaaattgagtatgattcagggaggtttgcagtctgaaagatgagaaggaatcagtcatgtgaggtcccatgaaacatattacctataaggccttcctgaaaaacctactggaaattgtaacttcaccaaagaaggaaagaatcaaagaactcatggactgagatgtcagggtaaagaagaactggaagtgaacgtttagtgtaaaatgtaatcttaatgacctttgtcattttggttacaaaagattgtaatcataattgttaacaagaaattataacataaaaataatagaagtagaggcgaaatagcagaaacttgcaactaaaattagggaattgatggtaagagaaatagtgtttgtacatatataatgttctcagatttcatgaaagaatcaatagttttatgaagaaatacatgttttaatatataatttaaaactataaatggaacagactatatattttgcatactaccagagggaggaaaaagatcaatcacaggctatataacaaaggacagacagcaaagcaaacaccaaagaagtaaaaaaacagagaccataaattaagatggaagaaggctacacccatcttttctaatagcaattgtaaatgtgacaaacacaccatgtatataggaaaagaaatacagtttggattaaaaaataaaattttttccacattaataagtgactcagggccagggcgcggtggctcacgcctgtaatcccagcactttgggaggccaaggtgggcggatcacgaggtcaggagattgagaccatcctggctaacacggtgaaaccccatctctactaaaaatgaaaaaaaaaaaaaattatccaggcgtggtggtgggcacctgtagtcctagctgctgaggaggctgaggcaggagaatggcgtgaacccaggaagcggagcttgcaatgagcagagatctcgccaatgcactccagcctgggcgacagagtgagactccgtctcaaaaaaaaaaaaaaaaaagggactgaggatttttaaagatggaaaaaagacaaagtaatacagaattaaaactattctgcaataatttattaaggattgtcttaaaataattcagaaccttgagaatccctctgtaatgacactatgtacacaataaagatatactcaaaaatctttacgtgtgagatttccaagagggaaagtgcttattttcccattctgggttccatgcccagcctaggcagctcaactgttgccagaggcaatgatcacattttaaaaacatggtttaggggtatgtatactgtctagataaagttctaaataaaaagcatgctgaacagataattcagttaattgcttattatggttcctgcttcaaaacacatttgatgaagcaaggaaactaaactcagaaaatataaacaagttggaatcatgttgttaattcataagcacttattaactaaatcctgcttaaggccacattaaagttacaattacggatatatatttaagtgtgtgactcataaattagcttaaaaatcaggttcattcatcttacagaccttgcttgagagtgaggaggatggggtgttccatggtcttttctaagtctagccagctgcctcccaaatgtgtaattcggggttacacgttgagagagtagactgaatcaatacaaatatgtaagtgttactagaaaaagaactcaagtacatgttcttccgattattcatcaatagcatcaaaaggaaatgatgtggatgaaggaaacattatatgtgtgcacattttttaggatgtttcttagaaatctagcgtcatagttggtcattatgcttgtgaactgaaaaccagagaaagtaagagtgagttgtgtgtgtgcgcatgtgcgtgcatgtgtgtgtgttcatacagctttctttataggctgctgctctgttgccatagggggaactttttatagatttacatttggtaaatatacccacatccaaaaaaagacgtatgaaaaattgggatgccagctaactaaatcaactcataaaaactaaagttaagggtaagattattttccacgattattttaaaatatgatgtttactggaaggaaagtccagagaattaccacagatgaagtgtgagtgtatttctcccacttgtaaatgagctcttatttcctacagtgtatattctggtccacaatgagtcattttcaacatgtttcagtttaacttctaatacatttttaaacttggcaggcaaatttagatgaacattacttccagttttagagactgcttctaaattatacttcagtggtgtagtcatcatgaaaagttctttcagtaaaaggaaacaggattgattggaaatgtatgttttggaggagcaaaaaaatggttaccatttttaaattttgttactacataaaccctgttaacattatcttaaaaagttgtagatgtgaggtccttttatggatagaagatactttagagaagagaatatatgatgtatcctagataataataaagttaatatttattaaacttttactatgcctagcattgtttaactgttctatacgtattagctattttaatgcctgcataataggcagtagtatgttttctgtaagccattcaggccgtgtttctattagaaaacatgaagcccggcacagttctggccgtttgactaaaactttatgtttgtaaaaactagcaatttatatagagaattttacatagttgccagctctgaataagtatttaataattaccttgtataaatttatgcaatcctgtgaatcttctggcaaatttcagtggccaatctatctactgttatcttttaaatatgcttgatttttgttactataatttttacactgtgtcttattatttttaacactttaaaagttcataaaaatttagtttgaaaaatgcttcaagatgattgcaagcattgcattcattttgcaaatgaggaaacaagtctaaagaagtaatatggcttgtcctcagttacactgttactagaaacggagccataattacacatctgttctctttgttcccatcccagttgttctttctgccacaccagtatgttatacttagtaaacagtatatgaagcataatatgtgtgaagttgaacatcagtaggtatatttttgttctcaaatatacacatcaaaaacaacacaatttaaaactatactgtattaatttcatagggttgcaatgataaattgccaaaacttggtggcaaaacaacagaaatttattctccattctagaggccagaactctgaaactaagatgttgacatggctttactgtctcctaaggctctaggggtaatcctttgcttgcttcttccagcttctgggggcctccaggcattccttggcttccttggcttgtaaccgtatcactctagtctctgcctctgtcttcatgtggctttctcctttgtgtgcctcttatatggatatatctgattgcatgtacggcacactcagataattcaggacaggtctctcatctcaagatgcttaacttaatcacatctacaaagactctttttccaaataaggtaatagtcacagcttttgggagttaggacatggacttctcttttttggcagggttgggggcaccattcaacctaccacatataccttttaattcatgtgaattatatttacttgagttcttcaataaaggtaacattttattttgaaatgatttaactaaaattttctaattttaggagttactgaaattctatgatatttctatggactatctttcaacctactagctgttgaacaaaatcataccttagagattctagaatctgccatttgatctatgacatacatttattatgacttaaaagtcttcctgtgtgacttttaataacattctttaagaacatcatgacagtgacattaagattaaagaaacagtagttatacatttttaacagatacagtataaaaacctagctttagacaagctatgttagcttcatttaggccatttaattgctagcaattaaattttgctctactgtgtttgagatcctttagatttgggatgctcttataatgactatttaatgttttattttcgttccttatttttttcattcaagtgattcctgattttaataaatgtttatgcataatgtgtatctttgtattatatatcccagatgtatgatcacttagtttctgcttctgtagaaattattgctagatgtgaagatatgctgaattcattttagccattgaaagtatattactgtaaatgaaaggaaaaacaaccaatatataagtctgtgcttcatacagttattgatatggtttgggtctgtgtccccacccaaatctcaccttgtagctcccataattcttatgtgttgtgggagggaccaggtggaagataattgaatcacgggggcagatctttcccatgctgttcttgtgatagtaaataagtctaacaagatctggtggttttaaaaatgggagcttccctgcacaagctctctctctttgtctgccaccatccacaaaagatgtgacttgctcctccttgccttcacaaggaggcctcctcagccatgtggaactgtaagtccattaaacctctttttttgtaaattatccagtctcaggtatgtctttatcagccacatgaaaatggactaatacagttattaatagaattaaatgaaattctttatttaaagtactcaaaaaatattaactattattattaccatcatctagttagttgatttttaaagtaagatgtgtctatgttctcttttcagcaccataaaggtagagcagtctctgactagatctggtaaaaaaatattttatgcagatgagtaaacttcactattacaatgagctctctaaagaaagagtcccctttcctcaacttactgtatattctaattgttagcaactcattcaattgggatttttcttgcatctttttgtaaattataaagaagatccatgtgttttaaaattgatgtgctttttaaaactccaaggtagtgtgttttcattttacaaatggaaagtgtcggtattttttgtaaaaagtagaaaattagtttatgcgtcttcaaatagcaaagcttaattagacagtcgcatatctatcattaaaattcaaatgttttaattcacttggaccccaaatgtgaatttctcttggctagattattcatagattctctgcatgtaatgatgcctatggtttctaaaattctttttgtctaaaatcatgaagatggcagatgcacaaaataatacatctctgggctgtgtgtggtggttcacacctgtaatcccaacactttaggaggctgaggcaggaggattactggaggccaggagttcaggaacagcctggcaacaaagtgagaccccatctctgcacacatacaaaaaaattaaccacgcagagtgggcatgtgcctataatctcagctcctcaggaggctgaggttgaaggatcccttgagccttggactttaaggctgcactgagctaagatggtgccactatgcccctgcctgagcaacagaataaaaccctgtctctttattaaaaaagaaaaaaaaaaaaaagactatttctccttgccttcaggcaagaatgcacccagatcatcctagtctgataggctatccatatgcaaacctgtaaaggaactcacatacctgtaaaggtactcacgtacctgtaaatgacaatgaaatgttagcttcaaaatagtttatataagtagtttacaggaaagtcaaggtatgataaataacctgtcatttataagaatggaatgttctgtatgttggtgtaacaaaacatgtctattcttttgtgtcatgttttgccattggttaagccatacatttgattaagaagtaagtcagcagatacttcaacttggtatccattataaccaatatcacctcttcattatagaaacaacctcttccatggctgggtgcagtgattcattcctgtaatccctacactttgggaggccatggtgggaggatcactagaggctacgagtttgaaaccaggctgggcaacatagtgagaccccagctctcccaaaaagtaaaaaaaaaaaaaaaaaaaaagatgaaactacttcttccccattattgtctgtaccctaactaaatattaagcattccacttgagataccatctcacaccagttagaatggcaatcattaaaaagtcaggaaacaacaggtgctggagaggatgtggagaaataggaacacttttacactgttggtgggactgtaaactagttcaaccattgtggaagtcagtgtggcgattcctcagggatctagaagtagaaataccatttgacccagccatcccattactgggtatatacccaaaggactataattcatgctgctataaagacacatgcacacgtatgtttatcacggcattattcacaatagcaaagacttggaaccaacccaaatgtccaacaatggtagactggattgagaaagtgtggcacgtgtacaccatgggatactatgcagccataaaaaatgatgagttcatgtcctttgtagggacatggatgaaattggaaatcatcattctcagtaaactattgcaaggacaaaaaaccaagcactgcatgttctcactcatggatgggaattgaacaatgagagcacatggacacaggaaggggaacatcacactctggggactgttgtggggtggggggagggggaagggatagcattaggagatatacgtaatgctaaatgacgagttaatgggtgcagcacaccagcatggcacatatatacatgtgtaactaacctgcacattgtgcacatgtaccctaaaacttaaagtataataataataaaaaaataaataataaaaaaataaaaaataaagcattccacttataagaaagttattagctctgatcgcctctctttattcttatgtatgagttttcattccacaagttttagacactgtttataaagtataaggtataccaaggcatagctaaaggttgtggctacttaaccccccacctccacacacacacacatatatatatatctttaatgatagagaccactagagcagtattgacttaaatggctcaaatatttcatgagttttcaataaaaaagactagcaatagtaattcttttgagtttatttaggtagaattatgaaaaagttatcttttttctttttattaattttgtttgtaaaaattataatttaattgtataagcacttttatgaatttttaattgcagataccatctgataaatgttataaatttgttcccacataattgtacatgacatacaattccatatagctaaactcattttccattaccattttataatagaacctaatggaaattaattaccatgactgcctttttcctgtgagaattaagtctccatagcccattctatgaactgttctctgccttccttaattctttaatgtatagatgaacctaacattcccttcctgtcgatttcaaatgtttaatgttgcttgccttgtttccttttattttaaatgagagccgacattatgaactcagcactttactgagtacatcaaaaggcaaaagagaaacgtatctctccccatggtttcagatgagaatctggagaaaaatatgtacgtgtgctcagatttctctttgttggagtatggactatggaaagagaaataaaatgccaaagtatctctctaaactttcctatggtgggctagaaattgttcaagtcaatatttattgaacctttgtgcatgacacactgtagagaattttaaaaattaaaacaatttcagttttgaaagagctgaaatacatatatacatatttatattttaaagcaaaattttatatatgttaagaagtctgttgtaggctgtgaatgtccctatctgttttggaaatggccttttagaagaggtggtacatgaaacaagcatttgaagtgtgaaatttgacatgcagatataagagaagactattccaaaaattttgtaaacctaaatatagaagaaacaaaagaattttcaaaaaaaaaaaaaacagataattcattcacctgattcagagtgtacaagtagataggagataaggatagacagtttcattttttggtagaatgtcagaataaagagcttttatttacttcagtgtgcagtgagggctgacatgatgagatttacattttagagaattagcttggcagtaatatatgcatatatatttatggtaattcaagatgccctgaataggagttcctgaagtccagatgattggtaactatggcctgaattggatggtggcatagataataaagatgggaaaattggttttagaaatacaacttggacgtgatgggtagtagagatttttccacctgttctctattgccatcctccatccctcacaaagaaaaaaatttttaatgcatttagatcatattccaaaatatagtttgggccatgtttctagtcaagtggtgtctgtctgtctgtctctctgtctctctttctctctctcttttgagatggagtcttgctctgtcgcccaggctggagtgcaatggcgcaatcttggctcactgcaacctccacctcccgggttcgagcaattctcctgcctcagcctcctgagtagctgggattacaggtgcccaccacctcacttggctaatttttgtatttttagtagagatagggtttccccatgttggccaggctggtctcgaactcctgaccttgtgatccacctgcctcggcctcctaaagtgctgagattacagacgtgagcctccgcgaccagcctcaagtgatctttctctaaaagattgcagtcatgattagagcttccccttccacatcatcttttcctagctctggaaaaataggttggagctcacttgcaccacttgtcagtcttctgccatatatacatgctaatatcctctcttaaaccttatcagagttctacgcaagaactcttagttggagtttttactgcaagcccaactaataacatagtcataattttatttcctgttagctactagcccctttttcagaagcctcatggtaagggaatgcttattttaataaagcatttagacattttttgaattcaccctaatatcatttaatagcacccagtccctgtatcaccactaacagatggatcctcttacaatagaggcaatataagttacgtttaagagtacagtttctggagggtaaatagcctaggaggttatgatactggctctattgttcctgggtgcatgacttcagggaagttacttaacctctatgtctcagtttcctcatgtataaaatataataatagtaacttatagaattgtgaggattaaatgagtgttagagatagtgtttgttacataatgtgttaaatattagctattgtgattattacgggattcagtaactgacaataattgaaagtatcttggagagttatcaatgattcctgcagaattttctgggtagtttgagatgatagtgatttcattatcagaaataggactttgagaaaacagaagtgattcatgtgttaatgaaggctataattttgatttaggaattgtacttgaaatgctaaagcaccatttaggtatagaaatagagttgacatataagaataaggatctcgaacctgggagaaagaacaagcctatacataaagatttgggatatatcaagaatgctgaaacctgtagtaagtgccctgaaatttgggaagagatttaataattgctgtggagtaatattgtgctaaatgttttaggagttttgtttaattaattttattctcagtttttatttctcataattgctttgtatgaggaaattaaggctccaggaggttttctgaaaatgccatggctagaatttacaaataaattacaaaaactttaagtaactttagcaagattacaggatacaagttactatgaaaaaatttaattgtatttctgtatgttagcgctatacatttaaaacttggaaattttctaaaataaacctttacaacagcagaaaaacatcaaatacttagggataaaattaacaaaatatgaagcaagtacaggacctgtacactgaaaactagtaaatattgctgaggaaaaacaaaaacctaaataagtggagtaagatatcatgttcatagatttgaacacttaattttgctgtagtgtcaaattttcccaaaccgacttacagagtcagtgcaattctgatcaaaaactcagcagactttttttgtagtctaatcagctaacctaaaatttacatggaaatcgaaaggaccagaacatccaaaacaattttgaaaaagggagatgaaggtgcctagatagttcagtgaggaaatgataatcttttcaacaaatcttgctaaaccatttagataccatatacaaaaaagtgcacctccacccctacttcatacatacaaaaattaatttgtaattcatacatctaaatgtaagatcaaaaactagaaaaaaagggaaaaccttagaaaccttgagttatcaaaggttgcataaataggacataaagaacgtgaaccattaagaaaaacttgttttctttttttttgagctggagttttgctcttgttgcccaggctggagtgctgcagtgggcacgatctctgctcactgcaacctccacctccccagttcaagtgattctcctgcctcagcctcccaagtagctgggatttcaggcatgcgtcgccacgcccggctaattttgtatttttagtagaggcgaggtttcaccatgttggtcaggctggtctgacctcaggcactccacccaccttagcctcccaaagtgctgggattacaggcatgagccaccacacctggcctaagaaaaacttgatattccaacttggctggtagttgggggacaaaaagaaaaactcgttaaattggactttactcaaaataaaaaaaaaaattgctcttctgttaataaaggagaaagacaagccatagtcttgaggaaaatatttgaaaaccacatatctaataaagggcttacatccagaactcttgcaacttaagaagacaagctactcaatttaacattttttaaaatggccaaaggatttgaacagccacttcatgaaagtagaaatacagatgaccaataagcacaagaaaagatgctaaacattattaatcaccaggaaaatggaaattataccaaaattcattaccactacaaccactagaatggctagattttaaaacacggatattaccaagtgttggtaaggttgtcagttaactcaaatgtccacacagtgcttatgtgaatgcagaatcacagtcactttgtgtgactgtgtcaaacagtttgacagtttttaagaaggttaaacataaacttagtataagacccagcattcctatttctagttatttactcaagagaaatgaaaaacctatatacatataaagacttctgtgtaaatgtttatagctgctatatttctaatgtccccaagctgaaacaactagtgcatcaaactaaatttgagtttacacatgccatggaatactacatagcaataaaaaaggaggaaactacttatatgtggaaaatatttttattataaaagttctatgttgaaagaagacaaacacaaaagactacatagtgtttgattccatttatgtgacataatagaaaaggcaaaactaatgacacaaatccaatcaatagttgccaagagccaggggtggaatgagagaactgactgaaaagcagcagcacagagagtttttgggagtgatgggaatgatgttatgatcatagtcacagttgcatggccaaaacagttgttgaaacttatgaacttgcacacttaaaattagttaattttgtatgtaaattatgctccaataaaactggttttttaaatggcttaagtggctgtttattttttagagcagttttgggttcactgcaaaattgaaaggaggtacagattgctcatataacccctacccctacacatgtatagcctaccccattatgaacatccccaccagagtgctacatttgttacaattgatgaatctacactgacaaatcattatcacccaaactctatagttttcattagggttcactcttggtccggctactttttaatactttcatttctggtccaagttcactcttaagggttgtacattctgtatgtttggacaaatctgtaatgtatatatctatcaatgtagtatcattcagaatagtttcattactatattattttactgtctccatggttttatctttttcaaaatgtcataatcatacagtttgtagtcttttcatactgtctttttttacttagtagtgtgcatttaaggtttctccctgtcttttcatgacttcatagctcatatctttcagtgctgaatagtattctattgctgaggtgtatcacagttcatctgttcacctactgaaggacatcttgtttgcttccaggttatggcagttatgaataaatctgctataaacatccttgtgcagttgtttgggtagataagtgtttaattcctttgggcaaatatgcaaagagtgtgatcttatggtaagagtgcttagttttgtaagaaaccacgaaatgtgtcagtgtagtgtgggggaaaaaaaaaagaagaaaccaccaaactgttttccaaagtggctatatcggtatgcatctccaccagcagtgaatgagaattcctgttactccatatctttgccagcatttggcattgccagtgttctggatttgggcctttctaatacatgtatagtggtatctcattgttgttttaacttacattttcctgatgacatatgatgcagagcatcttttcacgtgtttattggccatcactgtatcttctttggtgatgtggctattaaggtctttagcccattttttaatagggttgtttgttatcttgttgagttttaaaagttctttgtatattttggataacaacccttcgtgagataagtattttgcaagtatcttctcccagtctggggtttttattttccttctcttgatggtgtctttcacagtgcagaaacttttaactttaatgaagtccagtttattctttttttcatggattatgtgtttgttgttttgtctaaaaagtcatggcccagaccaaggttatctagattgtcttatgtgttatccttaggagttttataattttgcattttacatttaggtatatgatttattttgagttaatttttgcaaaggtgtaagtctgtgttcagattctttttttttttttttttttgcatgtgaatgtcctattgctctagcaacatatcttgaaaagactatctttccaccagtattccctttgtctttttgtcaaacatcagttgactgtgcgggtctatttcagggctctctattctgttccactgatctatttgtcccttcttttgccaataccacactgtcctgttcctgtaactttatagtaagtctcaaagttggatagtgtcagtctgctagttttattcttctctttccatataatattggctattctgggtcttttgcctgtctatattaactttagaatccgtttgtctatatccacaaaatagattgttgggattttgattgggattacgttgaatctataaatcaatcttgcaagaactgacatcttcacaatattgcgtcttcttacccatatatgtagagtatttttacattattctttgattgtcttatcggagtttttagttttcctcatatagatcttgtacatattattttagacttatacctaaatatttcattttaaggggtgttaatataaatgttactgtgtttttaactggaaattccacttgttccatgcagatatacaggaaagtgattggcctttgtatattgcccttgtatcctgcaacattgctataatcacttactagttccagtagttttcagccaattctttcagattttctacataaacagtcatatcatctgcatacacagttttatttcttccttcccaatctatatactttttcttttcttttcttattgcaattagcatcaacttcgaatatgatgttgaaaagttcctgatcttagtaggacaacttcaggtttcttaccattaagatgttacttgtaggatttttgtgttattttttatcaagttgaggaacttcccgctattcctagtttactaagagtttgtatcatcagtagatgttagattttgtgaaatgctttctctacatctattgacaggatcatgtggtttttttcttcctcagcttgttgatgtgatggatcacattaattgattttcaaattttgaaccagccttgcataactgggataaatcccacttggttgtggtgtatagttctttttatgcatgaatggtttcgatttgttaataatttgttgagggtttttgcatctatattaatgagagatgttggtctcttggtttcttttcttgtaatgtcgttgtctggttttggtatttgagtgatgctggcctcatataataaattagaaagtattccttctgcttctagcctctggtggatactgtagagaactggtatactttcttccttaagtaattggtagaatttaccagtgaacccatctgggcctgtccttctgctttggaaggtttaaattattgattaaatattttaaaacacatgtaggcctcttcagattctctgtttcttcttgtgtcagttttagcagattgtgtctttcaaggaattggtccattttgtctaatttatgaagtttgagagcacagagttgttcatagtattcttttgtttagtgtccatgggatctgtaataatgaccactgtttcatttcttttttttcttttcttttctttttttttttttgagacagagttttgctcttgttgtgcaggctggagtacagtggcacaatctcagctcacctcaacctccgcctctctggttcaagcaattctcctgcctcagcctcccgagtagctgggattacaggcatgcaccaccacgcctggttaattttgtatttttagtagagatggggtttctccatgttggtcaggctggtcttgaactcccaacctcaggtgatccgcccacctcggcctcccaaagtgctgggattacaggtgtaagtcaccatgcccggccttcatttctgctattagtaatttaggtcctctctttttcttagtgtagctaaagttttactggttttattgattttttttttcaaagaaccactttagatttcattggtttttatcttgatttttgtggtaattattttcttagtgcttactttggatttaatttactcttttttttctagtttcctaagatagaagtttagatgattgattttagatctttcttcttttctaatatacgtatttaatgctgtgaattttccaagcacttctgcgttccacaagttgtatttttatttagtttaaaatattttctaatttctcttgcattttcttctttgatgtatgtgtcatttagaagtgtattgtttaatatccacatattttagaatcttccagttatctttttattgttgatttctagtttaattacattatggtttgagagtagagagcatatgatttttattcttttaactttgttcatgtgtgtttatagcctgggatgcagtctgtcttctgcatatctgtatttcgtgtgagctttaaaagaatatgtattctgctattgttgataaattgtgattataacctgttgattggtggtgttgaattctactatgtctttaatgattttctgcctactggatatgtccatttctaatactagcgtgttgaagtcttcaactatagtagtagattcatgtatttcttcttgcagttctatcgtgtattttgacatctgttcttggacatataaatgttaaggattattatatctacttggaaaatggacccctttatcatgtagtgcccctctttatccttgataacttttcttgctctgaagtctgttctgtctgaaattaatgcaagctactcccagtttcttttgagtagtgttataatggtatatttttctctatctacttttaatctgtatgtatctttatatttaaagtgcatttcttgtaggcagtatatagttgggtgtgtttttaatctattaattggtgaatttagagcatttacatacaatgtgattattgatacactgtaggtagatttgcagctaccatatttattactgttttctattttttccctcattctttgtttctatttttcactctttttcttttttggttttaattggcattatgttgttgggcacataaatgttaggaattatatattttctgggaggaagaacttcaaaaaggaaagtttgcaaatgtaagctaaatgtgagatttcaggaggttaaagtgtttttagtatcaggaagtcaaggagatctacaatcctcccaaccagagaaggaatgttctgagttaggagtgtagggaaagaaagaaaattagaatataagcaattttaaggtagagaggaggggattgaaataaacccttgttggatagatcttgaccttagtaaaaggaagtcatcaaatgacaatggagagggctccaaatgacctgagagtcttaataaaagaaggcagtttttagaatgacaactatagagaatacaataatgtaataccttgggaataaaagaattccaagcagcaataagagctaggtcatggacttggtcagtatggcatccctaattttccacagcttctcttaattcaagtcagaggtcgacaaactatggccgataggccaaatccagcctaccatctgtttttggacagcctgcaagctaagattggtttgtgtggttttttttaattatgagggggaaataaaaataaaaataaatatttaatgacacatgaaaattatatgaaatgtagatgttagtgtatataaagttttattggaacacaaactcatttgtttacatattgtctatggctgcttttatgctacaaccgcacatttgagttgttgcaacagaaactttttggcccacaaagcctaaaatacttactctttggtcctttacaaaacatgtctgcatgccagctttcagcagcatcagttaagcagcagtgataattgtctgtctgtttcttggagatcattcacaagcctgaatagatgggtcaccatttatcaatgctttcgagatatcagcatgcatatctttcccatgcatctctttagcagggtaggaaaattatgactttgaacgggtaactctgtttcttggtaaggataagatgttacattccactgaatggaagaaaaatcaaattctgtgcttccaaaattccaatattttaaagtattagaacatctcatggtttatagaaaaacatggaacatgacaagacatcttggccagactaaaaattggaactctgcagccaggaaacatacaaagtcacctgttatttttcttatgacaagctttaaaacaaagtgctttggcaaacttgaatgtttaacacatagtgcttactgtaccaatacagttttaagcattttaccaatattaactcatttaattatcctaattacctaatgagattatcactgttatgctcattttataattatgaaagctgagacacaggtagtaaagagtggtatggagtttgaactgatgcagtctggcttcagaacccttgcttaatatagttacttgtgaatatttaaccctctgaatctaaaataaaatttgaaactataaaaataaatacttaaagtcacattacattgaaaaatacttcaatctcatgaagcttcaagattatttgagaccttttttgttctagatcccttattatatatgtatgtattcaacttttaggttcaggggatatatgtgcagatttgttacttagcccagaaatttgaggcagacttgaatgcagatttcagctttgctacttacttgggcaagttgttaacttctctgagtctcagaatctttatctctaaaaagagaataactgcttgcccactttcaccactgttattcaacattgtactagaattcccagctaaagcaactagacaaggaaaagaaataaagggcagtcaaattgttaagggagtagtcaaattatccttgttattagatgataggattttttttttttttgaaaacaaaatgcttcatgattttgtatgtcatccgtgtgcaggaaccatgctaattttctctgtatcattccaatttgaatatatgtgctgctgaaatgagcacaatgataggatcttctatttggaaaacctaaagactccaccaaaaaactattagaattgatgggcaaattcagtaaagttgcaggatacaaaatcagtgtaccaaaatcagtagcacttctatatgccaacaatgaacaatccgaaaaataaattaagaaagtattcccatttacaatagctacaaataaaattaaatacctaggaattaaacaaagaagtggccgggtgcagtggctcatgcctgtaatcccagcactttgggaggccaaggcgggtggatcacgaggtcaggagtttgagaccagcctggccaacatggtgaaaccccgtttctactaaaaatacaaaaattagccaggcgtggtggtgtgcacctgtaatcctagctacttgggaggctgaggcaggagagtcacttgaacccatgaggtggaggttgcagtgagccgagctaatgccatttcactccagcgtcagtgacagagcaagactccatcttgaaaaaaaaaaaaaaaagtaaaagatctctacaatgaaaactataaaacactgatgcaagaaattgaggagaacatacaaaagatggaaagatatattccatgttcatggattggaagaatcaatgttgttaaaatgtccatacttacccagagcagtctacagattcaatgcaatccctcttagtataccaatgacattcttcacaagagtagaaaaaaaaatcctaaaatgtatatggaaccacaatagacccagaatagccaaagctatcctacgcaaaaagagcaaaactgaggaatcacattgcctgacttcaaaatatactacagtgctatagtaaccaaaacagcatggtaccagcataaaaacagacacacagaccaatggaaaaaaaaaatagagaaatcagaaacaaatccatacatctccagcaaacttatttttgagaaagctgccaacaacatacattggggaaaggacagtctcttctatagattatactgggaaactgcatgtccatatgcagaagaataaaattagacccctatctcttgccatatacaagggtaaaatcaaaatgggttaaagacttaaatctaagacctcaaactataaaactactaaaacattggagaaacgctctaggacattgttctgagcaaagatttcttgagtgataccgcacaagcacaggcagccaaagcaaaaatggacaaatgggatatcatcaagtagaaaacctcctgcatagcaaaggaaacagtcaacaaagtgaagagacaacccacaaaatgggagaaaagatttgcgaacaatccatctgacaaggaattaataaccagaatatataaagagttcaaacaactcagtaggaaaaaaatctaataatccaatttttaaatgggcaaaagatctgaatagacatttctcagaagaaggcatacgtatggtaaacagggttatgaaaaggtgctcaatatcactgatcatcagagaaatgcaaatcaaaactacaatgagacatcgtctcaccccagttaaaagggcatttatccaaaagacaagcaataacaaatgctgatgaggatgtggagtaaagagaaccctcctacactgttggtgggaatgtaacttagtacaaccactatggagaacagtttggaggttcctcaaaaaactaaaagtagatttatgctggatcatatggtagctttatgcttgatcaatgattgctggatcatatggtagctctatttttagtttttgtgtatatcccaaaagaaaggaaatcagtatatcaaagaaatatctgcacttccatacttattgcagcactgtttacagtagccaagacttgggagcaacccaagtgtccatcaacagataccggataaagaaaatgtggtacatatacataatggagtattcttcggccataaaaaagaatgaaattctgtcatttgcaacaacatgaatggaactggaggtcattatattaagtaaaataagcgaggcacaataagacaaactttgcatgttctcacttgtttgtgggagctaaaaattaaaacagctgaactcatagagatagaaagtagaatgatggtaaccagagactgggaagggtagttgggagaatggggcatgggtaatgggtacaaaaataatagggaggttgaataagatttatttggaagcacaacatggtgactatagtcagtaagaatttaattgtacattttttttagacagagtctctctctggctttatactggatcagtgattgctggatcagatggtagctctagccctggctggagtgtagtgacatgatctctgcccactgcaaacctccgcctcccaggttcaagtgattgtcctgcctcagcctcctgagtagctgggatcacaggcatgtgccaccacaccagctaattttttctattcttagtagagaggggctttcaccattttgaccaggctggcctcaaactcctgacctcaaataatccgcccacctcagcctcccaaacttctggaattacaagcgtgagtcaccacgcctggcctaattgtacattttaaaataactagaccaggtgtggtggatcacatctgtaatcccagcactttgggaggccggggcgggaggatcacttgaggtcagcctggccaacattgcaaaaccccgtctctattaaatatacagatatatacgtacatacatacatacatacatgcataaaataactaaaagagtataattggattgtttgtaacacaaaagataaatccttgaagtaatggatacctcatttaccctgatggaattattacacattgtatgcctgtatcaaaatatcccatatacgtactacgtacctataaaaattaaagattttttaaaaagaataatcctaaattttgtattagcagtttggagatgattaaatgaaaaaactgtttatacctgtatatgacagtaaataaaagcactcaaatgttagactcctttccttcgtattggtctctacacaccctgataggcatcatgccaattcaagtttcctcttagtataataaatgcctttaaagttcatcactggctttttattaatatcgcaagcctctcacaacccacttagtcatggttacaatggaaagtgagataaaaggaataagtgacagagcaataataaaagcaccaaatttcagccaacctagagaggaaaagcaacactttctgcaaggggaggacataagaaaagtgtagggagaaaagcaaggcccaggaaaatgtttgagagaagacatttcttcaaaataataatgtaagatgttaaaaattagagtttgtttaattaaattaatactgagttgctttgattatattaggctctttattatttcatttttatcctgaagtgttggagatggttaaataaataccaaggtatgtagacattttctggaacttttaaactttctcattttataaacagctgtagaaaataaaaatataattataacataatatgtgtttactgagtgcctaacataagattatatttactatctatttgtttgaacatcccaagatagaatttaacagaaatactaacaagtaattatttggtccattaagtctaatgagagaaataagaggtggggaaatagtgatttagttcttattatgtgatttagttcttattatgtcttctatttatgtcttctttacttctgttttgtatgccctcatgataaactttattacattcttgtaggtaggctagtgagtcacgcatagattcctaaaattgtgtataaaatttgtaataattttaacttgttacagaactcagatagagcctgtcatatcacactacttttgctcccttttttgcatttcttttttgtaagtatttttagaatgttgtcatgtctccttctaccaccttagccattatccacactgtatattttttggaagtttaatcttttttgtagtttggacatacctaacctataatcattttggcttctcttttcttcactctctgtaatttgttttcatcttttacggacacctaaacctggaaacaataatcttaattcactggttttttcatacttcagaagagactgcccctcatcaaattagtatttaatattttaatgttttctatcctggcttgaacctatttagcattctaattttataacacctaaaaacctcatggttactatgactccattcattcactcagtaagcattaagagttagtaatattctggatataccattatctcattaagagcttataatatgccagaatatttactagatcctaggaatccaaagatggattagacaagattcctgcactgaagtaacttgtattttaattgtacagtgtgttgttgtgagcattttacttttgttagctcacattatcatccagaactcaacatgcccaagttttcccccaagaattttgattcagaaagtctcaggcagaaccgtggcatctagagttcttagaagttccacaagtgattctgatggtcctccctggttaggctaggtaaagtcaacctcaggagtcatccgcatccttagaaaagaaaaaagtgttgctaatgatccatctttactaccagaccatctaggcttaaagacccatgactctggttgctgtattcaggagttttttggagtattccttagcccatttcagaacactaatttggataaattaacatttatagggcttccctattgttaggaagcagatctaaataaatgacttttacatccctttttgccttttacaatatgtatgttaaccatagtaaattcatttcttttcttgagctatatattactgaaaaataggacaaaagcatgattagcctccatcgtgctactattaatactttacactattcttcataaaagcatccccctaaaagtgctttttctaatgactttttaagattcagtttatatgttctgaatttttttctttagtgtagatcaacactgagatatacgttaaaagctgcatgaaatagagttttgagtgctatgaagcactaatataataaatactcttggttcggaggataattcaagctgaattttaagggtttgttgtcatgttgacacaaaagggaaaacagacccaatcagacctagtgttataaagtttttataacactgttataaaaattttataacagtgttataaaatgtttcactctaattttatctcatacatgcttttattttatggcaacattcctttccttacatttgtttcagttaagtactcttcacatacctgtagtacctatttttttgactttataagatggccagatattactacatgttgtttattttattaatggcattacatattttatttgatcatgatatgatagatgcattgaattactccaaatacatgcttgaaattcttataaatccatggtacagttgtcaaacatactcagcatttttaactcagcaaaaaaagacctctcacattcatttaagaattagcttgtaagccaaaaatgacagatgtagtattgcagctgagaagtgaactggttgaagaaatcatctaaatggcagaaacgtttggagaaatacccaaacttcttttaaattcctttctcacgttctttagtcatcattgttgcgacattaatgttggctttaaaagttttccctagtttgtttctttacaatttggaaaatttcacattgaaaacacctgagttaatagaactgtgttactctatagtttttctttttttttttttttccaactcactggaaatctgtgggctctataattttatatgtacattttgaactaatgtaattgctcccctaattttcatcaaaaataattttgattcagtatccaggtatatatttaaaatttttaaatatacagataactaaaaagcaaaagaaaacagttggtagaacaataggtagcagtaatgcacaaaagtaaaatctctaagataacattttgtattttaataacatgaaaggaaagtaatttcagatatgttctctgtaagttatgatatggatatatatgtgtgtgaatatagtttacataaaacttgtatactttttgttttcttaaagtaaaaaaattagaagttatagattgggtataatagggtaagtgtgcttatttttgtattctgagatctttcaaatattttcagggtataaaaaataactaaccaaagacctataccatatactagccactgatgtagtaatacttcatctctgtttagctaataacactttgttttgagaagtaaaggatatatctaagccaaaattatttaaatggaaagtacttaattttttatttttaaatttctcatataaaaattttttgagttgccttcagtaaaattaatttttaagttgaaccatgtaatgtaaaaatgtaattttctcctctcacctctcttttcccagatatctttacctgtatgggatattatttcttatttcttcaggatgtacacttcctttctttttatataactcagtgtccttgtgtgattttagatatatccatgattcacgtctaaatatgtatataatgagtcaagtttttatttttaaaagaaacacatcagaatatatggacacaaataagaataccctccaccaaggtcaatacagtagaagcccgtatgctttttccgaccgtgttggtattgctcaattcagttattttacagcacagttcttggaataacttttcattttaacagtcttcttccttcaaagagaagtttttgtttttggaaattcaaccattcagagtaaagcccattgaatttggtgggtgaataaactaggtatactgtttgttgtgaacaatgggtgagaaattggggagaggttaactatttaacaatgaaagaattgttgagaatggaaaattatgaggccaattgaaaatcttatttttgaaggaggtttaataacataagaagatttttaagataatattgggggaaggagagcaaattttatatgaaagcataattcatatgtaatatgcatagcaaacatttatagagaataatatcaaatattggtgaggagatggagaaaccatatttcatacacttagagttgcattttaaattgatgtagccatttgagaggaaaaatggcagtatcaaaatttaaaatcttttgacccaacaatttcacttcatggtatctttcttaaatgtttgcttgtgcatgggaggcaattcttaggatgatctttgaagcactgtgtataatgctttgaagcattttgaaacaatctaaatgttaatccgtttagaattaaataaattggaattaattaaatgattatgtccacattgtggtctattatatagcaaatgaaaagaatgaggtatagacatggaaaaaacggatcccaagacagtctacatgaaaaaaggaagttacagagaagaatatgtgtgatatgccatttgtttaaaaaaaaaaaactgatatatcaattcatatgtgatatacatacatgtttaaaaaaaaacaaacctcttagatacacagaaaactagtcacagtgattatctctcaaaggagaaatggaattgagagtagtgatagaggtctgggctgggtgcagtgacccacacctgtaatcccagcactttggaaggctgagataggaggatggcttgagcccaggatttcgacaccagcctgggcgacatagtgagaccctgtatctacaaaaaatacaaaaaaaaaagaaaagaagtctgtaatatttatttgtaatgtttggagtttttagcctcacagtggatttgataaattatttatagaattgaaaataaatttgaaaatatttacttgtgcagagaagaaaatttatgaaaatataaacagcttatccttataagcaagattgaattctcagttgactagacacatcagcttctgtccttgtcaactccaatttcttatagctgaatctaccaaagactgaatgtatctggagatttaggcccatctttgtttcacagttctttcaagtgtagaaagtttgtcaacctctgccccacttgcttgtggagtttaaaactaaactttcctgcccacacaaaagacttagcagtctatctctgactacctacttctgtgtattcttctaagctccagtattctttctttattgacccatctccccatatttcaacataaagttgaaaatatctttcagtgctttgttattagttaatttgcctaataactgaatactaaaaatccttccctgaacccttactggtactggagatcttgtgactttgcttaacttctcttgccagtctaccttggggcagggtcttacttcccatactctttatctgtacacagttgtcctgccacatacagataaatgctttgcctcagctgctgcactatcttactttcaacctggatcagttgttaaatttcttaatgcaagtaccatattctggccctggtcattacatgaacctcaccactgagttttagtactttttaggtattctgccttagaaaacctgtttaccgaatgagatttgataactgggttcaaaatttttaatgtaatacaagccatgaacattttgtgtacagaattcaaaaatcagttgtttctcattgaaataaaaaagattaaataagcagttaaaatgggttaaatatgggtctttcactgtgttacccaatgatgaccttgttaataagagttgggaataaaccatatacatgcgtggcttaatacatcagagtctaacaagtaaaacttcccctgtagagtctacatgtaaagactgccaatgtaaattttgttatgaaaacctgttatttgatgttttatccagtacttttattaccaaatatgttttcctgtttctgagactccactgtcacattgatgtctctcctgtggttatttctcagcatcccagaacatgtcctgctactgggagtttaattcatcctagcctgagagcacttcttatggattactttctttgtagctccctgtgtaatagctgattttcaccctttaacattttttctccctgtacttccaaacccagaagtgctgttgcagtgaatattccttcagagcaaaccatcagttctagtcctttctgttatttttaaagtagtatttggtatatggttgggtcttatgaaaactaaaaacccggttacaaatgtagcataaggacaaatggagccaaattttaggcctggggatgagatggttgtgagaataggtggagattctctgtggaaaattttacctcttaaggttactatgctaataaattagaatatcaaacgtgaagttgttaatgtatgaataatactgacttacctcaaataagatgttcagattgagagtacgagatgagaagtctgagtcaacaaagtaaaatgtgatgggttatattagcaaaacaagttaagtgggagttacctgaaactagctcctgggcatcatcagttcctcactgttggagctacttttgtagctatgtttgttcaacattttcagagttcagtttaacaaaatacttacacaggcttaataatttgaggcagatcctttcacttacataaacaacatggaaatagactagtcctttagaattaccatttcattttacaaagcttcagtttatgaaacttagactatattcaaatttttaggagataattcttgttaccacctagatggtttattgtttaacttctgttaaattttctgtattctaaatgtctaaatattgtttactgtttaacttttcaatataaggaaataatattagtgccaaaagtaactttcaggtgccatgtaatgaataaaaacaggtgatgctaaaagctaagtctttaattacctatttggagttggcagtgatatccgaagcaacatcccgaatccataaaaaggcaaaatttgcagtttaatcttttaggataaattatcttaaagatcaatatcacattctaaattacttatccagaatttatttcataatatggtctctgtatgtcctagtctcacatacaaagaaagtattgatttcacacatttaattcatttatatttataaaacaacttgcctcaaagagtacagggacatttgtatgtcataaaatgttgaattaatacttttttttagtaaaaggtatttttttttaccacttcacgcacactagaatgcataatcaaaaggcagacaatgataagtgttgttaagaatgtggagaaattggcaccctcgttactgctgatgggaatgtaaaatggtgcaaccctgttggaaaaaagttgggcagtttctcaaaaagttaaaaatagagtgacatatgacatagcaattgtgttcctaggtatataaccaagagaaatgaattcatgtttacacaaaaacttgtacataaatgttcatggtagcattattcatcatagccgaaaatcagaaacaacccaaatgtccatcaactgatgatggataagcaaaatgtgatgtagttaaacatttgaatgttattcggttataaaaagtaatgaaatgttgattcattctacaacatgaatgaaccttgaaaacatcagaaggccacatattatatgattccattaatacgaaatgttcagagtaagcaaacttttagagacaaaaagtagatcagtggttgccaggcctggatgaagagaagaatagggagtgactaatgaacatggggactttgtagggtaattaaaatgcttttaattagataatgatgtgcaaatttgtaaataagctaaaaaccacagaactgtgtatgttaaaagagtgaattttatggtatatgaattatgtctcagtaaaaaatttatcagtgtttgtttttctatataaaaaggtattttttaataaaattgtaaaaagttttatataattaatgccaggattttccaaaaaagttagtcacaaaaactgacattcactttaaaactttactgtatattaatgtgtaatgtgcattgtatggaacttccaccgatctgagacttgaagtagcccatggtgtatatctaatgcctatcttctctgattatattttgaatggtattttcactcactgacaggagtgaaatagcctttaaaaagcattttaaagtttatcttacctcagaaatgtcagttatgaatattatgtaatagcagaaagactatcgctgtgaagtctaatataaaattgggcttcatcctgaaatttactagcagtgtgttcctattaaagaaattatttgacatctctgagcctcaggttcttcatctgcaaaatacctagtagatccgttataagaattaaatgagataccatagataaaacagactatgctctctgcttcactgccctgcatataactcacatttcttctccctagaatacttcccaccccttacctcctcctgccttacacacacacacacacacacacacacacacacacacacacgcacacacacccctctatacaaaccaagttaggtctccttcatatatgttcccactgaacctagggattaccctattgaagcacttaccattgaattttcgtgtttatttgcctgttttccccagaaaactataagttcttttaaaaaacaatattttatctaccaatgtatacaccttacctagcatactgactagcttaataaatatttgaataaatgaattttaatatcatacccagcattatacttggttcataataactccctgaaaagatacagtgtatgtgtattttgcttttctgttagaacacaatcaaccttaagtattttcaaatttatagtatgtggtgatttatatgttaagtggaaatgtttttattaccggttatacctatggaatgaagagaatgttccttatctgagttgtaatagcctacttgtaggtctatatttatcttcacagtttgtacatttttttcttgtaatatcaaaatatatgtatatgtactaagtttattttgcaagtgtttcaagaatttgtagtttaatatgcatatttcattgctttcttctccatctgacattatttagacttaggatgaaatagcaagctgggaaacaatgccatagatttaaaaaggcctatgagaagtatagaaattaaatcattctaagcaatgtaactgaaatttgctcttgccatttacaaaatgataggaaataattattttggctagaaagaatgaaaataagggtagaatggtgaaagttaattgatatgttcactgtaattacttattttcatacatatacctacctaaattatttataaaagctttgctgaataaatataaattattaactccacaaatatgggggagtagaaaacatagaagtaaggtttatgattacttaaatcattgagactgctttctttagagtgtcataaccattctgcttctttcaggtacagagaactacaacttagtacagaaagcaaagtaacagaatttctccatcaaagtaaattaaaatcttttgaaagtgagcgtgttcaacttctgcaagaggaaacagcaagaaatctcacacagtgtcaattggaatgtgaaaaatatcagaaaaaattggaggtacatgtacaagcttttctttcaacattagcatggcatgtaaactccctaagtacaagatttatattgagctttatttctcctataggatgtatcactatcctgcacaaaaaaaaaaaaaaaaaaaaacaaggaaatacgtatttcagaaagatgtatactgaaaaggactagaattgttgagaaacaaaaaaagcaagaaaagatgtcattcacaatagcaaccaaaaatatataatgacttggaatattttaaataagaacagtgcagaatgtatacgaagaaaactatagaacttcactgacatgtgaaatgaaacaccatgtttctgggagggaatgaagtatacattttttcagttttcatcaaataatatgatatgtttctatctaatcaaatgccagcatattttttaactgaaaataattctatagaacaactggaaggaaaaacatacagaatagtcaatatttttaaaagtactttttaaaaagaaataatggaaatatatatcacattttaaagtgtgttctgaggcaagaataattaaactgcacacaaaattagttcacaaatggtataaaatgtaaagccccaaaacatatttacataaatttaagaatttatacatggtaaaggtcatatttcaaatcagtagggaaagtatggattggacaataaatgatgctgtgataatcatttgaatatttagagaaaatagttgactcaatacctcataccatatagcaaaattaaactcagatggattactaggctgcatatatgtacaatatataatatatatattatatatatatatagtgtgtgtgtgtgtgtgtgtgtgtgtgtgtgtgtagctataaaggtattagaagtaaatacagatgatccaggggcagtgagtgactcacgcctgtaatcccagcacttttggaggctgaggtaggtggatcacctgaggtcaggagttctagaccagcctggccaacatggtgaaacctcgtctactactaaaaaaatgtaaaagttaggtgtggtggcatgcacctgtagtcccagctacttgggggttgagacagggaggattgcttaagcccaggaggtcgaggccacagtgagctgagatcacatcactgcactctggcctggcaacagagcaagactacatcaaaaaaattttttaaagtaaatacagatgaaattatatcttatgtttactttgggaattaatctgttaatctgatgaaagccaggaaagaaattatataggaaaaataaaacctgaatttgtttttaaaattcataaattttaaaattcataaattcataaaattcataaatttttaaatttatatttaaacttaaataatatttaaaataatatatataatattaaaggcaaaatagaaactgaaaaacagtatttgtgttatatatgacaaagggcttatgtccttaagtttaaaagatattttatcaagaggacatgccttcgccttctacataaataagtgggaaaaaaaaggaatggaccatttccaagaaatgaaatgcaaattgctaataaataaataaatgaaaatatgaattctcactgataagtaccaaaatataaatttataaatttaaacttttttttttacctttagataggtctgtgtgttgtttttaaaatgctggcaagagtacccttaagtgggaaatctcatgagttagaaaatgaaacagcccttctggacattatggtaatctgtgttaaaagccttagaaggttgatccagattgtgaattttagctccagatcgactgcaagaacaaaccagcaatcctgagaggacccacagaccctctgaaggaagcggactgctcctgcaggacccggaagacaccccaaatactctgggaggtggaaagcctcgggcaagttttcaagcccaactcactctgggcctggaaacagactcttgggctgttgtgttggggggagccagtgggagcgagaccagcccttcagttttcgtgggaactgggtgaggcctgtgactgttggctttcccccatttccctgacaacctgcatgactcagcagaggcagccataatcctcctaggccacctccaccagaataggtgctggtatccatgatggagagacccatagacagttcacatcacaagactgtgcagaaaaccccagtaccagcctggagctgggtagactcactgggtagctatacccagaagagcgacaacaatcactgcattttggctcacgggaagccacatccacaggaaaaggggtagggtactacatcaagggaacacttcgtgaggaacaaaagaacctgaacaacagccttcagcccttgacttgccctctgagagagcctacccaaatgagaaggaaccagaaaaccaaccctggtaatataacaaaacaaggctcttcatgaccctccaaaaatcacactagttcaccagcagtggatccaaaccaagaaatccctaatttacctgaaaaagaatttaggaggttagttattgagctagtaagggaggaaccagagaaaggtgaagcccagtgcaaggaaatccaaaaaatggtacaagaagtgaagggagaaatattcaaggaaatagctaaaagaaaaaaaatcaaaaattcagtgaactttggacatgcttttaaaaatgcgaaatgttctggaaagtctcagcaatagaattgaacaagtagaagaaagaaactcagagcttgaagacaaggtcttcgaattaacccaatccaaaaaagacaaagaaaaaagaatatgaaaatatgactaaagcctccaagaaatttgggattatgttaaacaaccaaacctaagagtaatcagtgttcctgaggaagaagacaattctaaaagcttggaaaacatatttgggggaataattgaggaaaacttccctggccttgctagagacctagacatccaaatacgagaagcaccaagaacacctggggaattcattgcaaaaagattttcgcctaggcacattgtcgtcaggttatccaaagttaagacgaaggaaagaatcttaagagctgtgagacagaagcaccaggttttcctatagaggaaaacctataagattaacagcagattcctcagcagaaagcctacaagctagaaaggattggggatcccatcttcagcatcctcaaacaaaacaattataagccaataactttgtatctagtgaaactaagcatcataaataaaggaaagatacagtcattttcagataaatacatgctgagagaattcaccattaccaagccaccactataagaacagctcaaaggagctctaaatcttgaaacaaatcctggaaacatcaaaacaaaatctcttcaaagcataaatcacacaggacctataaaacaaaaatacaagttaaaaatcaaaaacaacaacaaaaaaagtacacatgcaacagaaagcatgatgaatgcaatggtacctcacatttcagtactaacattagatgtaaatggcctaaatgctccacttaaaaaaggtgcagaactacagaatggatgagaacttgcaaactaaccatctgctgccttcaggagacacacctaacacataaggactcacataaacttaaaggggtggaaaaaggcatttcatgcaatgaacaccaaaagcgagcaggggtagctattcttacatcagacaaaaaaaactttaaagcaacagtggttaaaagagacaaagagggacattatataatggtaaaaggccttgtccaacaggaaaatatcacaatggacctaacactggagctcccaaatttataaaacaattactaatagacctaagaaatgagataatcagcaacacagtaatagtgggggacttcagtactccactgacagcactagagaggtctttaagacagaaagtcaacaaagaaacaatggatttaactggatttaaactgtaccttggaacaaatggacttaacagatgtaaacagaacatttcatcgaacaactgcagaatacacatcctattcaacagcacatggaactttctccaagatagaccatctgataggccataaaatgagcctgaataaatttaagaaaattgaaattatatcaagccctctgtcagactgcagtggaataaaactggaaatcaactccaaaaggaaccttcagaatcacacaaatacatggaagttaaataacctgctcctgaatgagcatcaggtcaaaaatgaaatcaagatggaaatttaaaaattgtttgaactgaatgacagtaatgacacaacctacccaaacctctggaatacagctaaggcagtgccaagaggaaagttgatggccctaaacacctacatcaaaaagtctgaaagagcacaaacagacaatctaaggtcacacctcaaggaactagagaaacaagaataaaccaaacccagcagaagaaaggaaataaccgagatcagagcagaactaaatgaaatttgaacaaaaagaaatacacaaggtaaatgaaacaaaaagctggttctttgaaaagataaataaaattgatagatcaggccaggcacggtggctcacgcctgtaatcccagcactttgggaggctgaggtgggcggatcacctgaggttgggagttcgagtccagcctgaccaacatggagaaaccctgtctatactaaaaatgcaaaaaaaaaaaaaaaataaagccaggcatgtggctcatgcctgtaatcccagctactcaggaggctgaggtaggagaattgttggagcttgggaggcagaggttgcagtaagcagagatcgtaccattgcattccagcctgagcaacaagagcgaaactccatctcagaaaaaaaaaaaaaaaattgatagaccattaacaagattaaccaagaaaagaagaaaatccaaataacctcactgagaaatgaaacaggagatattacaactgacaccactgaaatacaaaagattattcaagtctactgtgaatatcattacacacataaactagaaaacctaaaagagatggataaattccttgaaaaaatacaaccctcctagcttaaatcaagaagaattagataccctaaaaagaccaataacaagcagcgagattgaaacggtaatttaaaaattaccaaaaataaagtccaggaccagatggattcacagcagaattccaccagacattcaaagaagaattggtaccaatccttttgacactatttcacaagatagagaaagaaggaaccctccctaattcattctataaagccagcatcaccctaataccaaaccaggaaaggatacaaccaaaaaagaaaactacagactgatatctttgatgaacataaatgctaaaatccttaacaaaatactagctaaccaaatccaacaacatatcaaaaagataatccatcacgaccaagtaggtttcataccagggatgctggatggtttaacgtatgcaagtcaataaatgtgataaccacataaacagaattaaaaacaaaaattacacctcaatagatgcagaaacagcgttagacaaaatccagcatcgctttatgattgaaaccctcagcaaaatcggcataccttaacatcataaaagccatctataacagacctacagccaacataatactgaatggggaaaaattgaaagcatccctgctgagaactgaaacaaggcaaggatgcccattctcaccactcctcttcaatatagtactggaagtcctagccaaagcaatcaaacaagagaaagaaataaagggcatccaaatcagtaaagaggaagtcaaactgtccctgtttgctgaccatatgatcgtttaccttgaaaaccctaagtactactccagaaagctcctagaactgattaaacaattcagcaaagtttccggatacaagattgatgtacacaaatcagtagcacttctatacaccaacagcgaccaggcagagagtcaaatcaagaactcaaccccttttactatagctgcaaaaaattaaatacttaagaatattcctaacaaaggagttgaaagacctttacaaggaaaactacaaaacactgctgaaagaaatcatagatgacacaaacaaatggaaacacatcccatgctcacggatgtgtagaatcaatattatgaaaatgaccatactgccaaaagaatctacaaatttaatgcaacccccatcaaaataccaccatcattcttcccagagttagaaaaaaaaattctaaaattcatgtggaatcaaaaaagaacccgcatagccaaagcaagactaagcaaaaagaacaaatctggaggtatcacactacctgatgtcaaactatactataaggccatagtcaccaaaacagtgtggtactggtataaaaataggcacatagaccaatggaacagaatagagaaccagaaataaacccaaatacttacagccaactgacctttgacaaagcaaacaaaaacaaagtggggaaaggacacccttttcaataaatggtgctgggataattagctagccacatgtgggagaatgaaactggatcctcatctctcaccttatacaaaagtcaactcaagatggataaaggacttaaacctaagacccaaaactataaaaattctggaacctaacatcagaaaacccttctaggcattggcttaggcaaggattccatgaccagaaacccaaaagcaattgcaataaaaacaaagctggccaggtgcagtggctcatgcctgtaattccagcactttgggaggccaaggcaggcagattacatgaggttgggagttcaagaccagcctgaccaacatggtgaaacaccgtctctactaaaaagacaaaattagccaggtgtggtggtgcatgcctgtaatcccagctactggggaggctgaggcaggagaatctcttgaacccgggaggcgtacattgcagtgaaccgagattgcgccattccgctgcaccctgggcaaccagagcaaaactccgtctcaaaacaaaaagcaaaaaacaaacaaacaaacaaaagctaaatagctgggacctgattaaagagctttcgcacagcaaaaggaacagtcaacagagtaaacagacaacccacaaagtgggagaaaaatcttcacaatctatatatctgacaaaggatgaatatccggaatctacagtgaactcaaatcagtaaaaaaaacaatcccatcaaaaagtgggcttaggacatgaatagacaattctcaaaagaagatatacaaatggcaagtaaacatgaaaaaatgctcaacattgctaatgattggggaaatgcaaaacaaaaccacgatacagtacccccttactcctgcaagaatggccacaatcaaagaatcaaaaagcagtaggctgggcacggtggctcacgcctgtaatcccaacactttgggagaccgaggcaggcggatcacctgaggacaggagttcgagatcagcctggccaacatgtgaaaccctgtctactaaaaataaaaaattagccaggcatggtggcaggtgcctgtaatctaagctactcgagagactgaggcaggagaatcactggaacccgggaagaagaggttgcggtgagcaaagatcatgccactacactccagcctgggtgacaagagcgagactccttctcaagaaaaaaaaaaaaccaaccagtagatgttggcatggatgcggcgatcagggaacacttctacgtttctggtgggaaagtaatctagtacagctgctatggaaaacagtgtggaaattccttaaagaactaaaagtagaactaccatttgatccagcaatcccattactgggcatctacccaaaggaaaataagtcattatttgaaaaagatacttgcacacacatgtttatagcagcacaattcacaattgcaaaatcgtggaaccaacccaaatgcctatcaatcgaatggataaagaaactgtagtgtgtatgtatatgtgtgtgtgtgtgtgtatacacacacatgatggaatactgctcagccataaaaaggaatgaattaacagcatttgcagtgacctaaatgagattggagactattattctaagggaagtaactcaggaatggaaaaccaaatgtcacatgttctactgatatgtgggagctatgctatgaggacgcaaaggcatgagaatgatacaatggactttgggtacttggggggaagagtggaacagggaaagggtaaaagactacaaatatagtgcagtgtatactgccccggttgatgggtgcaccaggatctcacaaattaccgctaaagaacttaacttgtgtaaccaaataccacctgtaccccaataacttacggaaaaataattaataaataagggctgtgtggctttaaaaaaaaaaaaaagaattgattgttggcatctgagcctatagtctctgcatcagtaggcaatataccaagtgggtggtattaatctttcctcagcttttaaatattaagtaaacccccaaaataaaatggaaagaaaaaaagctgatccagtaattttacttaaaggaattttatctaaggaaatagagatacgtataaaggtttatataaatgatgcatgtcgcagcattatttattatgtaaaaattagaagtaacttaagtgtccaacagtagataaagttttcaattagcatattataaattgtgtattttgctgtgtccatgcactgcatgttcttgggtattttagatttggggaaaaggctaattaaaaacatggaatgaaggatgcagttaggaaattagtatggtcttgactatggtttacatgttcagtaaaaatcatcaatatacatagaaaaacatttgaaggaaataaatcttttttttttttttgagacagtctcactctgtctcccaggctggaatgcagtgtcacaatctcggctcactgcgacctctgcttccccagtttaagccatcctcccacctcagcctcccgagtagctaagattacaggcgtgcaccaccacgcccagctaatgtttttatgtttttcgtagagacaaggtttcaccatgttggccaggctcatctcaagctcctgacctcaagtgattccccctgcctcagcctcccaaagtgctaggattacaggcgtgagccaccgcgcccagccaaatatatccagatattaaagtttatctataaatggtataattatgggtgatttttatatcttcattctccccccctagactaagacctttttaaaaatatgcttctaggtctcagccagaacctggcacatagttaattgaattgatagtatgcagtactttgtaactgagtgtctattaggcagtaagcactgtgctgggcccagttacacaaattttaagaaatgattcctatcttcaggaaactaagaattttgaacagggctttgaatagagctttctgtaatgatgcaaatattctatatctgcaatatccagttcagtagccacttgccacgtgtgatcatttagcacttgaaatatggctacttcactgaggaaccaagcttctttagttaatcttaattaaattaaatctaaaattagctacatgtatttaatgactctggtattagactgcatgctctagacaattaaccagagcatacacatccttactattaggcagtggtaggatttgaaaacttttctccttagttttatcataaaagaaaaatggaaggtattttctgcccaaatagaatttcttctggcagtattgggtagggattggcctgtgggctttaggctcaacagacctaagatttgaacccagttactcaccactctctggataaaatactcattttctttgggaataataatagcaactgtttcataatgttgttatatctgtttggctcatataaaacaaccatttatgctcagtaccaattcatagaaatcctcaaaatattgttttgatgctatagaattttgttttagttaagttgggaaatgccgggaaaatggaagtatcctttcccaaaagataattatttgttgggtaaaagattttttttttttcacttttcagatcccataatagtgtgcccactaataaactcaagcattttaatcttccaattttcctttctgcatatgaaggtttattttacagttacaaaaatatgaaattataggtcattaaacagaaactacaatgcaaagaaactgaaagttattcaattagaagcctttctcaattgaaaatcagatattaaagtagtttcccccaaattataatgcaattcagttacaggataaatatcataaaatagaactggtttgtctttattttggaaatacatgtgttgcatacatttgtcatttatccaaaatatcaaaatatttcttttttttttttttttttttttttgaggaggagtcctgctctgtcaccctggctggagtgcagtggcaccgtctcggctcactacaacctccacctcccaggttcaagcgattcttgtgcctcagcctttgaagtaactgagactacaggcgcacgctaccacacccagctaatttttgtatttttagtagagacagggttttgccgtgttggccatgctgatctcaaactcctgacctcaggtgatccacttgccttgtcctcccaaagtgctgggattacaagtgtgagccaccatgcctggcaaaatatttcttttttaatggcattcatttgatattttaagaccacataatatagaaaatacacttataatactaggtgacaatattcctttacacagctgtatgcactggatttttttttaatgtctaaggtgagaataaaagattttgaagaaatacaccataaaggggggttgttaactaacaaatcagccttgactcattttaatgttttatttctacttttttgttctagagaggttatattatttaatatcgcacaactagtaagtgactgaactgtgattagaccttaacacctgaccaacctcactttaaatcccatacttttttttttttttgagacagagtctcactctatctgtcacccaagctgtagtgtgatggcatgatctcagctcaccgcaacctctgtctcccaggttgaagcaattctcctgcctcagtctcctgagtagctgggattacatgcacgcaccacaacacccggctaatttttgtatttttagtggagacagggtttcaccacgttggccagggtggtcttgaactcctgacctcgtgatccgcacatctcagcctcccaaagtgctgggattaccggcgtgagccaccacacccagcgtaaatcccatacttttaaccaccacaatatttaatatttattacagtaatctctccaagattacacttctggaaattactctgattagtgaaactaattaaagggcctcagaaaataaagccttagtgaaaaacataaaaatatattaaatatatatgtatgtttaaaaagacaagcaaaatttgtagatggtgtctacttataaagcaaatcaatgttcagtatttaaaacttttttcctatactttcttcaggaaaatgctgtagagtcataatctgttgcaggtgattctcccacacatcctttttttattgcctttagctggttacaaacaaaattgattttataacctccaaaaaattgcaacttgcagtttgcaaaggactctcatagacctgtcaacttggtctctggatgcaggtgactagtaattattatgctttgtttaaaggtcatatatggaaaaacacctttctaaaaaatgttgtggttctaaagattctggttgataaaactgaggcttgagggcatttcttaacgttgtgtgcccctattaaactgaagccttgagaaagcagagagattattcatttatcattgtgtcagcagtgcttaacacagtgcctctctcataatgaatcctcaataaatacttgatgaatgaatggtttgattaagaataatgtagtatcatagtttgaatcttttggtgggggggattctacaaagtatttttaagacaattcttatttataattaatttatagagaaataatttcatcatggtaaagataatggacttttctgggcttttacccagtattctcattgattgttaatttggagattatttatttttgcttaattattaattggcaaaggctcccagaagcgttggctttatatatttgtctctgtttaaggcaaaattataattttgtattatcattatttaatctttgtattattcagttaatacatgtattattcaaaggaaggaaaattttactgtgagaactttatatttaatggattcctaaaattaatgggcttattttatgtatccatatttaaactgaaatgttcatgtattgatttttattaaaacaaatccttaatattatagcctaccatgggtccaacagtcaagttctctttggcatttcagaagcagtaataggtttacttataacaaccactcagacaaatccacagaaacagaaaattctctaatatggggtactagaggtattgggagatagcccacatcagtagtttttcaggacctctctttcacattatgaagatattttttaaattacatctctcgtaatggtttttaaatctctccttaaaataatatcttataaaatatcccatcttcaacattttgattccttatctctaatcatttctcctgtttttcttcgtgtggtggttttgcagggggaggtggggtacaaatgaaaaagtatcagctctgctgtgggaatagtcatttaacactgcctttactgattctctcttttgacagtggaattagtttcatcagccaccagattcttaatgaattacatcccaatgtaatgaactccatgtaagccccagataatgtcactgagtaatgatttttttataatgaattaacaagtttctagaaaacacattcccaacaagcaagaataaagaagaaataatgctaaaacacacattttgttttttctgacccaaccagagccactggaaatcaccataaaaatgctgttcccattttattccttctccactctccaaaggaatgtatatggagagtgagggataatgttttgtttactttgggggaaagttttgctgaaaattgaaggaaatgatctgaaataagttaaggaaaattataatttctgctcattgagaactgtaaataggtcttccttctccctttttccacatcacagaaaacatataatcatacacattttgtattgtgaactttatgtcattagagaaaatagttgtctttaaaagtgtttaattgtagagaattcaagataattaaattagtggaactctatttgcatgaactatttcatgcagaattgtcatatagttatatttcttacagtagcaatagtacttttcaacactatgttctaggtactctgctaagcactgtaaatttatcatctcatttaatttctttcaacagtgttttaaggtaggcctataaagaataagtaattgcctaagatcacagctagtaagtgtcaaagccatattgaaatccaaatttttctggctccaaaccatattcttcactgtagtagtctgttgcctctcaggaaacagtatattatgttgtattagaaagcaggtgtaataccactccataatttagtctgtaaaaataagtaagcattctagataattggaatttaagcattaaaacatttccgtatcactagaggcatctctttttttagttaatttattgttgtcatcatggtgtttccttcaatgaattaccattggagtgtaggattttttgcttgtatacaaaatgactccaatttccatgccctttgcatctcatttttaatgtgttttagttgttcacaaaggcattttctgatactgcctcaagcagtacttcacatttaccttttgatttcctgctttgaatttatgactgttcagaaaaccaaaaatgttattaagatcatagtaagggtaattcaataagctctgatggaaaattgaaggatttattgtcagtatatcgtttttacaaacagctttgtaagcctctgtcaaatggctttgattgccagataaatgacctctatgtaaatatgacattgtatttttttaaattctaacaagcaaatgctaatattactcctataattattcctaattttaaattcattttttattcagcttataaaataaggataaggtacttcataattttcagttaaaaacaactgaattatttaccttagaaataaatatatttaatttcctcattagtcatcttaattgagctactttctcttaatatttaaataacaaaaaaagccctatgaatgtctttgcatcatgtttttgtcttaactgtgcacctgtttaattctgcctttgtaattcttctctttcactattaggttttaaccaaagaattttatagtctccaagcctcttctgaaaaacgcattactgaacttcaagcacagaactcagagcatcaagcaaggctagacatttatgagaaactggaaaaagagcttgatgaaataataatgcaaactgcagaaagtaagtcttcccccacacacacatgcacaacttttttttttctggcaacaaaagacgcctgaccttatttctaaaactactttgggatcaggcacggtggctcatgcctgtaatcttagcactttgggcggccaaggtgggcaaatcacttgaggtcaggagttcgagaccagcctggccaacgtgacaaaaccccatctctactaaaaatacaaaaaaaaattacccaggagtgatactggggaatcccagctactccagaggctgaggcaggagaattgcttgaacccggaaggcagaggtcgcgttgagccgaaatcatgccactgtactccagctcaggcaacagagtaatactgtctcaaaaaaaaaagaaaagaaaaaaataaaactacttcggtatattttcttaaaatataattggtgactatttctaaataaaattctgtatttcaaatatttgttcatcttcatcttagaaattgcagtcaaaaaagaaacaggttaaatatgatagcttttatctgttcaattttttatcaaattcacttactccagaattgttaagtatttacatctgtcaggaactggggattaggagttcatggaaataattcccgtctcaaggggtttctaatctactgagagaggtgaacataataacaaataattagagtagcaagataaatgctataagcaaaaaatatgcagttctcagtggaaatacaaaagagatcattaattaatcccacctttaaaggaggtgaggcatatctaagagaggagatgacactgcaattagtcttttcttttttcttttttttttttttgagacggagtttcactcttgttgcccaggctggattgcaacggtgtgatctcagctcacctcaacctctgcctcccggtttcaagcgattcttctgcctcagcctccgggtagctgggattacaggcatgcgccaccacacccagctcattttgtatttttagtagagacagggtttctccatgttggttaggcggtctcaaactcccgacctcaggtgatctgcccgcctcgacctcccaaaatgctgggattacagacgtgagccactgtgcccagccttggaatgagtcttgaagtacaaataaaaattcatttgagggtactgtgttataatctttgatctttaatttctgttttccttttttcttgttttcccctcttgttatcttcctgtcttatccctaacgttaataattattttaaattaacatttcaccgttggctgtgatgtttgctacagtacattatttgtgttcaaaagtcagataaccatggcattcttataaaaatgggtttaaacttcagttgaagttgaatttgaatctaggtagggttctaattattttaggcacatttttgcataaggactgtatttacttgtaggccaaatgtaagaaaaacttatttctttcctatcattgtcctatttcccatttccaaggtcaatgtctgataactgcaatagattttaaatttatcttcaatttcttcactggagtcaaagtaatctttgtaacattcaaattttcatatcatatgctggctttaatgacttttattgtcttcattaagacaataaagtcaaatttctttacatgacttcatgattagactcatgtttatctttctgctttcatatcttgccattcccctccatatcatattattgttttgaaagtttcatactctttcttacctccgtaactttgcatatttccctttgtctaaacaaattaggaatagaagggaacttcctcgatctgaaaaagggcatttataaaaaccaacagctaaaattgtacttaatggtgaaatattgaatactttccccattgagggggagagtaaaacagggtttcctattttcatgatttatatgacatattaagtgctgtatttgaattcctaacctgtgagataaggataagagaagatatatataaaaatcagaaaggaatagtaagaatctattttcagattaccaaacaactactaaacctgataagtgaatatagcagaatatatagtcattacccaaaaatatactagaagtaaacaattggagaagtaagtagcaacaaaaaacacaaaatacttaggaataaatttaagccaaaaaaccctacagatcattgctaagagaaattaaagaaccactccccccaaaatcacgaaatatattgtgaattctatcaattcagtgttcttctagtcacagtggcaggaggcttttttgtatttcattcatatggagtgcagaggactggaatatccaaagcaatcttgaaaaaagttgaagccctgtgtggtggtgcactcctgcagtcccagctacctaggaggctgaggcaggaggattgcttgagcttagaggttaaagcctgtagggtgcgatgatcatgcctgtgaatacccactgcactccagcctgggcaacatagcgtgacctcctctcctccacaaaaaaaagaacaaattggaagaattgcactacctgttttcaagatttactataaagcttcaatatcaggataatacagtactggcttaaggaaagacaaatacagcaatgaaacagactagaaaacccagaaacagatccatacttaaataataatttcatttttaacaaaggcagcaaagcaaacaaatggagaaaggaaagtttgttcaataaatggtgctaaaaaaaattggacatctttatggaagtaaacttccatacaccaatattaatctgagacgatacctaaatggaatagctaaaactataaatatgtaacagaaaacataggtgagttatctttacaacgtggagtacattaagactttttttgacatggcccttgaatgtaattatcataaaagaaaaactgataaagtagatgtcatcaaaatttaaaacttctgttcttcaaaagacaccattaagaaatgaatagccaagccacagactcaaagaaaataaccacaattttatatctgacaaaagaatgatacccaaaataagaaaatattgaggagaaaatattcacaaaacatagattaaacaaaagaaaatgatacccaaatgtggtgggctgaaaaacatccttctagagatgtccatgtcctgttgggcatagtgactcatgcctgtaattccaacactttgggaggctgaggcaggtggatcacttgagctcaggagttcaagattagcctgacatggtgagaccccatctctagaaaaaaagagaaagagagaaggaaagaaaggaagggaagaaggaaggaaggaaagaaagagaaaggaaaaggaaggaaggaaagaaaagagaaaagaaaagaaagatgtccatgtcctcatctttggaacctctgaaaaagctggaaaaggcaaggaaacagatttcaccatagagccttcacacagaaccagccctacaaagcattgacttcaggtcagtgaggctgatttttggacttactacctgtagagctataaaataataaatttgtattgtttaaaccataaagtctggcaatctgttaacgttagcagtaggaaattaatgtaccagaatatatatttaaaaattcatgtaactcagtgattaaaaaaaaaatagtcctgtttaaaacatgggcaaaaggtttaaacacttcacaaaggaagacatgtgaatgacaagtaagcataataaaagtattcaacattactagtcatgagggaaaagcagattaaaagcccagtgagataccactgtatacccacaagaatggctgaaattagaaagactgactataccaaatgttggtgagaagtggagcaactggcagtttcttacaaaataattaaacaacctaatcagtgatccagcatttccgttacttacccaagagagaagaaagcatatgcaccttaaaagatttcctctagaatgttcataggaaatgtattcataatagtcaaaaactgacaacagcccaggtgtgtatctcaaaggaaaatggttaatcaaaccattatacattcatgtagtagaatacttctcctcactggaaggaaacaattgacttacttaacaacatggatgaatctgaaaaacataaagtgtactttatataatatagtatgattatactgtatgattatagtatgtggtatgattatactatatgattatagtatatggtatgattatactatatgattatagtatatagtatgattatactgtatgattatagtatatagtatgattatactatatgattatataaagttctagaagagacagaagtaatctatgatgaaaaaaatcaaggggtgggggtaaaaatttttttttttgtttttaaaaagacaaaaatcagaactgtagttgtctctaaagatgattgtcaccaaaaattaactgagaaaagtgacatggaactttccagggtattcagatgttctatatatcttgatagggtttgtgttaaacacatgtctgtacatttcaaaacttttacatttcaaaactcgttgaatggtagacttaaaaaataaaaataaaatttatacatggtgaaagttacaaatcttattttttagaaaataactgtaaatacatattgaattataattgatgatttgcatgttaaactgttgaggagtgaagtgtgcaaatgtccacaactttctttgaaatgcatcaaaaaaacattcatggaaacgggtggatatatgtataataaacacatagtatgtttgatttagaatccagatgttggagccaggcacagtggctcatgcctttaaccccagcattttgggagaccaaggcaggacgattgcttgagcccagaagttcaaggccagccggggcaacctggcaagaccatctctacaaaaaaataaaaaatgaaccaggcatggtggtgccagctacatgggagggtgaggtgggatgatcgcctgagccctgaacgtcaaggctgcagtgactgtgttcacgccactgcactccagtctgggtgacagaatgagactctgtctcaaaaaaaaaaaaaattgcagatgttgagtatatggatgtatactgtacattttttcagtgtgtccacatgtataaatattttcttaaaagctgcagaaaaatagaaattaatttttgttatgatactatctaaaccaacttcaaataaaatagatttacctgtactagaagatcagtaactaggttctctatcagttcacattggaaattaaaatataccttgtccttatttaatgaatacttatcgattaactaaaatttcaaagaagtgagcacagactttttttagtactacattgtgtacaattttcaaaggcttgccatttaattcaggtaatttcggctgacttttttcaacagactatttttagtactacattgtatacaattttcaaaggcttgccatttaattcgggtaattttagccgacatgaaggtgattagccttcatttattaaggtgtaaccatagcaaattaaagtatcttatttatacttgtattgctttctgtaatcaaataagtattatttggatatttgagtttagttttcaaagatttcatcaagttgttaaaagtataagtattgtctaaaagctaaataaactcatattagaaaaaaaaaacaacctagatttctagttgttaaattcagttacctgccacacatcctcatcatacttataaccttcactaggcatttgtcgaatttctcagaactcccttctctttgcttcttgaatcacctgcctttgtttattttccatcacttaacttctggataatcttttccctttccgcaacttcagttactatcaataggctagtaatttctatagttagacacagggtctcactgtgttgcccaggctggagtgcagtggtacaatcatagctcactgcagtctcaaactcctgggctcaagtgattccccctgcctcatcctcccaagtagctgagactacagacacatgccatcatgcccaactaattattttttgtagagacacggtctcactatgttgcctagagtgatctcaaactcctggcctcaagggatccccctgcctgggcctcccaaaacgctgggattataggcataagccaccatgcacagctgaaaatttaacattatttgcatttcctctttcttccctgaaacttcctaatttttctgtacagttgctctctctattagcagatactgcatctcagatttaatcacctgtggattgaaaatattggggaaaagacaataataaaaaataatacatttttaaaaatacaatataacaactattatatatagcatgtacattgtgttaggtattgtaagtgatgcagacatggtttaaagtgtatgtgaaggtgtagatatgttatatgcagatatatatatatataccattttatataagggacttaatcctgtggattaaaacttcacataccttacaagtctatgcttctgcacatggacttctctcctattccttcactgaatctcagtctccccatatctaccctataccttgtagcatgggaaatagtggcactcagatgcatttgccctgcgctctgcttctaagacacattgttcagatctctttaatagcattgttcagatccctttagtagcattgaccaagttgtataatacattgtttctgtaattaatccctgctagaatagttatcccatgatttattaatccattaagtattaaactcacatttagcatgtccattaatatctaacttatgggtttttgagatgtgaactaaatttacccctctctcctctgaatttagaactattaaggagaaacaagagtcagttacatatctaaatgttagctctagttccagtagagcttatttggagaactcatcttggatctggacttacctgctagctgatcatagtattggtaatggcatgtatcatctcttccatgtgtctctctcaactaataattcttcctcagaaagctaatcctgattcaccatgaaagatagggacaaaattaaaagaaaacagttaataaatgtttctaaaatctttactacagaagggccaatcaacaaatgtatccctattacattgataggcatgcagaagatgaaacatcatgatggttgtaaaatatgtggctttgttttaattctgaaatattcctgaaagtgaatatctttttaacattaaaataatggctggtgataaataatattatgaaagtttttatatgtcaatgactgcttttacttgagctattaaaactatagcctttgatgaaatactttttttggtgttttgggggttttttttgatgatgaaatgttttttggccaggtgcggtggctcacacgtgtaatcccagcactttgggaggctgaggcaggcagatcacctgaggttgggagtttgagaccagcctggccaacatggcgaaaccctgtctctactaaaaatacaaaaaaaattagccgggcttggtggtgggcacctgcaatcccagctactggggaggctgaggcaggagaatcgcttgaacctgggaggcagaggtcgctgtgagcagagatcacgccattacactccagcctgggcaacaagagcgaaactccatctcaaaaaatatatatatatatatatttttttaatcccaacttgcagtaaaatgtcattgcatttcaagttttttacccagaagatgttaacctgttagttaaaattccttttgggaagtagtgtgacaatagcagaatttaaaagtaaattattttcacataatttttttacatttaaaaaaagtaaggccatcaatacatgcttagagctgcacagtttttaatagagtaacctacataagtacataattttattgttgcaaattaaaataaagttgttctgataaaataatatttgtcctaatttaaaaatcatttatcaagaacagaattgatgactttgatatgttatcattatttgttatattacatagcatatttcatgcaaaaagcctttgagtccttcagaataatacatgtattattatactttttaacaagaaaacctaacatgatatgatgcaatcccttatacatttcaaaaataaatggagcaaattcaagcaaggatatactttaagaaatatgtttctacttacaaatgggctgtttaagattacatattagccctttctaatgtttttatcctccctaatttgttataacctcctttattttcacttctgccatcttttttaaaggaaaaataaagttatttcacattatacactttaatattttccagttgaaaatgaagatgaggctgaaagggttcttttttcctacggctatggtgctaatgttcccacaacagccaaaagacgactaaagcaaaggtaaaatcaatatatatttattttatttatctactcaagatgaatgtaattacatttgtgctttctgataatgtgctgagttcagtgacaaagtcctttattcttactctgcataaatattaaatttctcacaaaataaaacactaataatcatgtatttcatatatatttaaataaatttagtggtttgtagaagtgtgcataagaatttctgtagaattagattcgatgataaggaccttgtttttattttcacattaatttcagatgagctacaaatgctttgtatcaagaatattcagattaaaattcattgtgctttttttttttctttctctcatttttattcaactgcctacattccttcacatacatgttagggagagtgatttggaattaatgcatatattgtaattgaaactatgaaaggctttacaaaaccaagagaatatttagaagacccactagttatcttgtgagataatgtttaaaagtacagtcagccctctatatccatgggtttcacatgtgtgaattcaaccaaccgcttatcaaaaatattcgcgaaaagaatggatgattgcatctatgctgagtatgtgccgactttttttcttgtcattattccttaatacagttattcacatagcatttacattttgttaggtattataagtaatctagagatgatttaaagtatatgggaggatatgcgtaggttgtatgcaaatattataccaattgtatgtaagggacttgagcactcatggattttggtatccacaggaggtggagaatgtacactggaaccatgcatcccgtggataccaacagacaactgtacgctaacagaaaattatacctacattaatcaggtttccagttgacctgcctgatttttattcctaactcctctcttgcacgaaaatttatcctgctttgcaaaaacatctcacggccccattcactaccacatcaaatccatcaaatctaaatgtttctttcagacttccacgcgcctctataatgtagctctatctctccagccttatttgcctctctacccaaagtgcagtggatatacctatttctctgcctataaagcaactgttttctctgtaccacacagcagagcatttctcttatctcattagctatcatttcctgtgtaatttacccatctagatggaaagttcttcgaggtcagcaactacctatttttttttttttttttttgagatggagtctcattctgtcacccaggcctggagtgcaatggcacagtctcagctcactgcaacctccaccttccaggttcaagcagttctcctgcctcagtctcccaagtagctgggactacaggcgtgcaccaccacaccctgctaatttttgtatttttagtagagatggggtttcaccatgttggtcaggctggtcttgaactcctggccttggcctcaagtgatccacctgcctcggccttccaaagtgctggaaacacaggagagatccaccatgcccagtctagcaactacatctttttttttttttttgagacagagactcactgtgtcacccaggctagaggcagtggcacgatctcagctcactgcaacctccacctcccaggttcaagcaattctcctgtctcagcctcccgagtagctgggattacaggcatgtgccaccatgcctggctaatttttgtatttttaatagcgacagggtttcactgtattggccaggctggtctcaaactcctgacctcaagtgatccacccacctcggcctcccaaagtgctgggattacaggcatgagctaccacgccgtgccaactacatcttattcttgtttatttttcactttctctatctaactcagtgcaggatacctagtaaaattgtttcttcatcagagcgtttgagaattcagagttgcttttttttatgtgaactgatttagacatttagagacattgtacactaagaaaatgactcagaaaatagaacatctatatggctatctaaaatgatgtatcctcattaatatagtggtgaataaaaaaataaagtgatgtagaatatagagcactttatagaaagcaagaaaaggatgcttagaacttatggctcttaccagttaaactaaatatatgccaaattttgatcaaggcgagctgaatagaaagtatatatttgtagctggaatgtttaattctgtctggtgaggattcagatatttcagaattatgtatttttaaaaaatcagtcccattcccatttcctctaaaagtcacaatgggtaacctaggatattttgtaattttcagcatatctgtttcttagtccaatgttgcctaaggaagaatagaacatagttttgtgggtaagagacttatcagtagtaaatgataggtaaaatactaaaacttgaaatttaaagggaaaggtcatattcttttctctattttggcctctgaatccttcaaaagaatctttgttacaagaaaaaatagggctgggtgcagtgactcacacctgtattcccaacactttgagaggccaatgcaggcaaattgcttgagtccaggagtttgagaacagcctgggcaacatggcaaaaccccatctctacaaaaaatacaaaaacttagctgggcatggggacatctgcctgtagtcccagctaccctgctcaggaggctgaggtgggaggattacctgagctcaagaggtcgaggcagcagtgaaccgtgattgtccacttacgcttcagcctgggtgacagagtaagactctgtctccaaaaaaagaaaaacagaaaagaaagaattctgctgttagaactttgcttttcttagccccaaatgctgagttcttcagaatcacaaacaattattgctgttgcacattactatttttttaagaatttttaaaaatagaggttggtttttaatatttaaagtgaggatttaaggaaccacaactgattcatactcgaaataatgttaactgtccaaatattctaaagattctatcactgagctatctatgtgccttgaacatgtgcctaatgggcatgctattaatatctcctgccagctggtgccaggcattcttctcatggtgagccagagggttattttgaggaagtgcttctcaggtcatctaagctgaatgacgggaaagtaaggctagatatccaaagagaacatttatgcattccttcatgcattcaacaacttttattgagtgcttactgtatgcacaaaattgatcagtggcactaaagatcccaggttagggtctgatacatttctgaagtttgcaaagtccacatttgagttcataatggatatttgtaaagaaagcggtggctttgcgctctttttatgtttatttaagataaaagcagtataacctttgagagaattatatgtaatccttcacatttgaaattaaaggattggagccagacgcactggcatgtacctgtaatcccagcttctggggagcctgaggcagaaggatcacttgagaccagcagtttgaagctgtagtacactataattgcacctgtgactagtcactgcactccagtctgggcaacatagacagactcccatctctcaaaaaaagaaaagaaaaaaaaaatcagtggaaacttaaggcgaatgataaaacaactcagtcaaaacagtaaatgaactatatgcaaaataaagttttcattgtacatcagcctataccaaaatatattaaagtttcaaaggaacctattttccaactactacacaatagattccattcatattaaatttgatttaaaatcttatatgttcaacaaccagaattagatattttagggtaacatttaattggaaggagatttctgatttgttataacagtaatgtttattttattttatttttatttttattttttggagttggagtctcactcactctgtcacccaggctggagtgcagtggcatgatctcggctcactataacctctgcctctcaggttcaagcaattctcctgcctcagcctcccaagtagctgggactacaggtgcatgccaccacgcctggctaattgtttgtattttagtagagacagggtttcaccatattgtccaggctggtctcgagtgatctcaaactcctaagctcaggcaatctgcccaccacggcctcccaaactacaaggattacaggcatgagccaccacaccaagccatgtttatttcataaaattggaaaattactggtaatcctaccatccaaaataaccactcggaaatgtatacagatatatatatatactttcttatttaagatattattgcttgtaatttaatagtttaatttattgtcatagaattccattgtaaacattttcttatgtcattggatattcttcagaaaggtcatttttaatggttatccaaaacgttaatttttagtacttccatttttgagtgctatattttcattacttaattgtatagttactgaaaaatatcattagttgcctattgcaacccaggcaataccacaaaattaaaatgagaaaatggatgtgaagttcctgacatagagtagatctttagtaagtgctaggtcgttacaccttgatgtgtttgttcttaaagtaaattacatagttaattttagaggaaaagccagggttctgaaatcttttactaggcacaatttgagttttcatttaagacgatattgttttaaaattatacagaagcctcttgaaataattagcagggataccccccaaacatgaaactttctttagtatcagtccatttttaagagtctcactctgttactcaggtcggaatgcagtggcaccatcatagttcactctcatctcaaactcctgggctgaagtgatcctcctttctatcttcctgagtagctaggcatgcacgctgtacctggctaatttttttattttttatttttttgtagagacagggtcttgctgtgttgcccaggctggtctggagctcctggcctcaagcaatcatcccacctcagcctcccaaagtcctggaattataggcatgagtcaccacacccagcctattttttaaaactctttctgggacacaattatagaaagttacaagggcttatacaattaaagtagattaaaataaaatgggctctccttgactaaacttgaaaatctgaagtaatgttttcctttcagttgtgattgttttgaaaatagcaaacatgattttctagttacatgttttggttaagccctttaacctgccacactaaatggtgacacccaggcactaacatggtctttgtatatgcctctgtgtttgttttggctaatctgaatgtggagactgttctgacgttcttaaacctttcaaattgtgagattactgcgtactatagtttctctcgttttataaaaagctttaagttaaaactttcagtttactgaacttcataataaaaaaaaataaagcagaggaaactagcaaaattttgtgtatgacaaacatgttttcctttcctttattctcatatatatgagttctcatttttgtccttggggaaacttgtactcatttcatttgggatggctttaggaatagttctttaaaaagttgctgcttttctattcatgataaatttggaagtgtaagcctatagaagaaactagcgacagtctcatgtaactacagataatcagcatgagatcactgtttagtccttagtcatttccagctgagtagatagtataaggaccagccttaagctttttgaaagtgggatccttctggcacatgtccccttctttgcaaccatctttgatgccatgctagtagagacaggactctgatctactgaaaactgagaaagatcaaataactaatatagctaataagcatgcctcacatattcttgctcatttcgagttttggtaatagtaagacaccgtaccaatactgaagaacccagaacagagcgtcaatcctccattgtgctttgatatctcagatataaacaaaactctgtcatgtccacatttgctaggctaaaaatgttaggaaattgtatgtagtaatcagaaatacagactgccatggacagagccaaaaccaataacctgtatttggcatcaagaagtgctaagagagctaaaagataacccttggaggaatactaatttgaccaagtaacaggtgaaattttggtttaatatttaggtgtacaaccaatatactggtggtggtagtttctagctgatatcaaacttaatcttggtataagtgaaaatcatttaagcaattaatgtattaattacaaagaagtattgtatctatttaagtgtcccaatagatagcttataaaaagcattgctttcttgagaaattcagtacattctacaccaaaaataacatttagcaagagtcatttttcctgaccatgtttatagttattcttcttgaagatcttagcagggccaggcacggtggctcacgcctataatcccagcactttgggatgctgaggcaggtgaatcacctgaggtcaggagttcgagactagcctggccaacatggcaaaaccccacctctactaaaaagacaaaaattagttggcatagtggtgggcgcctgtaatcccagctgttccagagactgaggcaggagaattgcttgaacctgggaggcagaggttgcagtcagcccaggtcacgccattgcactccagcttgggcgacaagagcgaaactctaactcaaaaaaaaatttttttaaataaagatcttaggacttgttttcattgtatgtttattgtgttaaggaggcataaactcagctgtagttgagcagttcttcatttgtcttgttttgaatttcatttaaacactcttctttcttcccacttgtaagatcccagacttctaaagaggatccacctatagcaccaaatcactcaccaaagcaatatgcccacttaaagttttaggaggttgaatatagaagtggtgaattggtatctaagacatttgccttcttctttgtgcactttttaattgctagttcaatgcttaatactgagcattagttgtactttattttttttctttaattgcccattattggcaataggtgtaccttaatgttgaggtgctgcaacttcggagtatggtttctaacagtgtgttcatttgaacaaaatgcacttcaacaagatcagtccagaggtacttatcgctatgcacatgtctcacgcctataatcccagcactgtaggaggctgaggtggaaggatcacctgagcccaggagtttgagactagcctgggtaacaatgtgaaacacagcctctacaaaaattttaaaaatgagccaatcatcctaatgcacctgtggtcccagctatgtgggaggatgagctgggtcacttgagcgcaggaggtcaagactgcagtagccatgtttgcaccattgcacttcctggcctgggcaatagagtgagaccctgccagaaaaaaaaaaaagaagatttattaagtacctactctgataagctctacagttagataccacaggggataagactcctgtcattttatgagttgcatctgtttagggagaaatgattaacatacatgaaagaatatataaactttagtactatatcatatgttgggttaggctatgtcagtcagaggaatagagatccgtgaaggctggcacagtcaaaaatggaggaagtggaactcgacgggagcctttaaagaaaatcttcagactggaggaccaagaaaaggcagtggaaggaatacagaaaacatatttgtgagacgttaagtagagtagacatgaagggcaaataaggttagttccagtgagattatagagggtcttgatatttttaaataatttagagatagagtaaaactaaccatgaaggtcagatttgaaagtgagtgggaacaggatatagacatcagttcactatgtaagaaatacagatgtctgacaaacatgaaacaatgcttaatctcacaaataaatttaatttaaaacaggattttatgtttatctataaggttagcaaaacttccaaagattgacaatgctcagtattggttgggttatgaagaaacaggagatatgaatgaacaggaattcattcattcaatagataatttctaagtacctcctttgtaccaggtatttattgttgaactgtaacaggtttttatattttctggattcaagtctcttaactgatatgtgataagaaattttttcttccattctgcagattgtcttttcactgtttttttccttttttctttctctctcttttttttttttttttttttgagacggagtctctgttgcccaggctggagtgcagtggtggaatctcagctcactgcaagctccgcctcccgggttcaagtgattctcctgcctcagcctcctaagtagctgggattacaggcgcctgccaccacacccagctaatttttgtatttttaggagagacggggtttcaccatgttggccaggctggtctcgaactcctgacctcaagtgatctgcccacctcagcctcccaaagtgctgggattataggcatgagccaccgcacccggccctgtttttctttttcatgacaaaactgaaatggttaaaatctttttactttcttaatggtgcattttgaagcccagaattttaaaattttgatgcagtccagtttatccaattttttttgttacttatgcttttgctgccctgagaatcttttgctaaatctaattttgtgaggatttactcatatgttttcttctaaaagtttatagttttagcttctgtatttaggtctttgatccattctaattaattttttggtatcatatgaagtaagggctttgtactgtttattaatgtggctactagaaaattttaaattgcatatgtggcttgcattatatttccattggacaaagctgacctagaccagtggtctccaaactttttgatacgaatttttattgggaaaaaatttgagtacacactcagcaatatatgcatatgtattcatatttatttatagattatgtatgcatgtgctatcatatgaatagtatgcacataatgatataaaacctacacagcaaatgaaaacttaagataatttaacattaaaataaatgtaagtaaaagttcccacagttcaagaaataattttgcacataactacttttaaagaccactggtctagattatgatcataaccttctaaatgactgtagtcttcttccttctgcaggccatcctgcacactactgatagagcactctttctaaagtgcgggccagatcgtgttatgtctaaccaacttcaggataaaatccaaacatacaaggcttttcataaaatatctctgcctatatctctctagcttcaaccctcaccatgcaccatatattattgatctatactctactacttagaattttccctagcacttcatcctctacataggcatttccctctacctaaaatgctgtttctctgcttcttcaccagattagttagtatagtttttattccttagtggtatgccttttcttagcatttagcatactacagtaatttttaaatttgcctgtcttcctcagtagactattagatcttcccagtagatattatgtattctcagtgcctatgcagattataggtttttaatacatgtttcttcaaaggaagtgttcatgaatatttttcgaatgaattaatgagtgtgtttcttctaattcaccctgcttttctgcagtcattgatattcatcaccaagaaaaaatagtaatttcctttttttttttttttgaaacagagtctcactcagttgcctaggctgtagtgcagtggcacgatcttggctcactgcttactgcaacctctgcctcccgggttcaatagattgttgtgcctcagcgttccaagtagctgggattaaagatgtgtgccactgtccgggcgtggtggctcacgcctgtaatcccagcactatgggaggccgaggtgggcggatcacgaggtcaggagatcgagaccatctggctaacatggtgaaaccctgtctctactaaaagtacaaaaaattagccgggcctagtggcgggcacctgtggtcccagctactgaggaggctgagacaggagaatggcgcgaacccgggaggcggaacttgcagtgagccgagatcgcgtcactgcactccagcctggtgacagagcaagactccaactcaaaaataaaaattaaaataaaaaaaagatgtgtgccaccacacccagataattttcgtgtttttagtagaggtggggttttgccatgttggccaggctggtctcaaactcctggcctcaagtgatctgcctgccttggcctaatttttttttactgtttttgttttactgtaagtattataatgatgaaaaacagttatatttcttgtttctgctgtgttcttttgcttaaatatatctttatatttcttttcattaaatcttaatataatctcttatatccttaataatacaatcttaataaatctgagtataatcttttaatgaaagattttatattatcttttgttcttttctgtgtatgtgtgtttgtactacattagtgggctaaatgggtcttttagggcaactgagaactttaataccatttctaatatatgtgtgtatatatatatatatatacatatatatatatacatatatatatatacacacatatatatacacatatatatatacatatatatacatatatatatatatatatacatatatatatgaggaaatgtgttttactgttcttacaactgacttagaggtgagtttttaaaatgtgaaccccatatatactggagaccaattgtaccatgttgtcttctacattattatcattatgcatcataaatgacatcaacagtcatactaatactcacggtccttcccgtcaccatcaattctcagaaagtttttctcagtaaaattgtactataaactagtaatcaaagcactgtagagtatatttgtaagcaatttgaagataccttagatactttccttctatttagagttgattttccttacttggaatctcccagtcaaaatcagggaaattcctttttgaagaaagtagtcctggtgttaaggcttaagcactagcataccaagaatttcttttttttgagatgaagtcttgctcttgtcccccaggctggagtgtgatggcaccatctcagctcattgcaacctccgcctcccaggttcaagcgattctcctgcctcagcctcctcagttgctgggattacaggcgcctgccaccacgcccagctaatttttgtatttttagtagagacagggtttcaccatgttggccaggctggtcttgaactcctgacctcaggtgatctgcctgcctcagtctcccaaagtgctgggattataggcgtgagccacctcacccggcaagaatttcttgagtcagtgttttatgacttatgatatttttattggtaagtggtatcaccctatctgtataagaacattatagaattcccaaacaaaataaaagcactcaaaccaaatgaacaatttaatattattaaacttgatgtcttcaagtcattatcttgttcagattgttggtaatatgtgacctctgcatctcattttcttgcatgtctttgtcttccatttcattcatttgtaactctagttctgtgtaattgcatttgattgtgtttattgttctatactgagtatacacatacttgttctacaccttcaacatatttattgaaaaattaccatgtttaagtgaccctagtgtgaagttctgtgggacacaaaaagataaaaaaaagttaacacctaacatgtatgaagagtaagaaagcaagaataaaaatgtgaataaagatagctccaagattttttaattaacctaataaaaatagagctaatgataaactgatgcttgcaaacgtataatggaatcaacggattttaaatgcaaaattcacattaaggcttattttatttgtagaaatcttgttattttagggtcaaattagagagaacttagtatatttttattgggaaatgaagaacaatatagtcataaactgtaaactccttaaaaatttataaagagagaaagattaatggttccctaaggttgaatttgaggagcaaaggaggaagttggaatgtggggaggatggagagtgactggtaatggacacagaaattcttcttgagataatgaaaatgctctaaaattagattatagtgatagtggcacaactctaaatatactaaaaatcattgaattgtacactttaaattggtggactttatgatatttaagttgcatatcagtaaaattgtatgtcagtaaagtttaaaaaaaaagtggttgtcaaaaaatgaggactatatgctttttccatctctaatgccagttgaaagaattttagatctaaacaagcaactcaaatcactttataaacttttgccagaactcatcttttttatttggtatgagttcttagaaatagatatatagaatgatatttaacactatttattattattattatttttagagacagggtctctgtgtcaccccaggctggattgcagtggcacaatcctagctcactgtaacctcgaactcctgggctcacgtgatccccccatctcagcctcccaagtagctggaaccacaggcatgcaccatcatgcccagctaatttttgtattttttgcagaggcagggtctcaccctgttgcccatactggtcttgaattcctggcctcaagtgatcctcctgcctcagcctcccagagtgctggggttgcaggcatgagccaccgcgcctggccttaacattattttttagaatgttgtctgcatttctttatctgatattgggaaatattaaaatacaatagaattttttctgccctatgattttatttaaagcacagttatcttactttttgtcattataaaacattccatctaggattccatggattctgcaattcacagattaataggttaactagtataaaatatgaaaatatgataaatatgaaaatgttaagttactggaaatgcagagaggttctttggagcaatatgtcttctcaaaattattagcagttctttaaagaaatataccacttcctcccaccatagttagaaggaatagattttattcttaaaattgtttcttaaaagtagaattgagatgtttcatatgtaattttaaatactaaaggtcagtgcaataagttatggtaatgcagagcatcagagggagtgatttttttcttttagtacagaagcttagcctttactatagacattctctaagttttatatatctttttcatctccactttcaattaaaaacctcatttttgttttatattataacatgcattatgttgtttaaagtaaactctgatacttctcaaagtgataagctaattattgtttgtaatatttcaactaattttctgatttgtaattggaaaatatttataaaagtggagacaagctgtaaattgctgtattgtggtcttttcaagcaagtgttataatgttacctctccacttttatagcaagggctaaaaaccgttactgcagtaatcagtctatcacggttatgttttaatgttgttactctcataattctgagttgtggggtattggtcttccactactggtgcctgaaaatattatttgactctatattttttctgttaatatttaagtataattaggaaatgatgtctattttcaagtacacaaacacattttgaatattttgggcagtatttcacttttaagcattaattttcttatttcatttgcctagtgttcacttggcaagaagagtgcttcaattagaaaaacaaaactcgctgattttaaaagatctggaacatcgaaaggaccaagtaacacagctttcacaagaggtaaataacttaaagaaacccatatgaagaatcacagtattcattttaattgtttgtaactcttttatttttctaagcagttttaaaataagctgtttgctagtacaaaatgatttcacaatttatgaaactaactgaatgttaaggccataaaaaacaacttacagtgtatggcaaaactgagaacaaaagggagattaaatgcccagactaagtataaatgcagactagacagacagagctttgatttctgagaatatcaactggtaaaacaggtttggcaaactttggtgacattttaagttttttactaatcatttttaagatagatttggtttttacctctgtgtttaatgagaaatcactcctctgttaaatttaactttgtttacacttagaaaatcaggctcatattgcttctttttcttagccttatgtcatttaaactacgtatatatatatatatatatatatatgtatgcattttacatagcatttttaatcatcttctgatgtcaagatctaattttatttttctgtacttttgaaatgcgagtcataaaacaatttaaaccggaggtactactttgctaatgttccttttatttatttatttaatattcctgagtgtcaacataagaagtttttccgtttttttctttgtttctttctttttttttttttttttttctgagacagggtctggctttatcgcccagactggagtgcagtggcatgatcacagttcattgcaacctctgcctcccagggtcaaggactcctccctcctcagcctcccaagtagctggaactgtagctacgcactactgtgcctggctaatttttgtatttttttggtagagacagggtttcaccatgttgcccaggctagtctagaacttctgggctcaagcgatccacctgcctagggcctctgaaagtactgggattggagatgtgccactgcacccagccaagaagttaatattttaaaagttttaaaaactatttctcttataacaaagggttttttcaagtcatacattaaataacattaatatatgttgtttattatttgttttcttaaggatctgtttatattctttagagtgtcttttcatactataacattaggaggatctttatcctcaaatttcgaaagaccagaaatacttcattttattgcagttcctgacacatagttaatgcttggggttgacacagtggtgtgttggtaaatgttaacagccagctttccaagagggatatgagggagagcttgatttgtaacattggcttgtatctcttttataaatactcccaccatggctgacttcaaactaccaacctaaggttactgaagatggagtaaagattgtcagcagcataccagtacttaatgtttgcaccatacagatacaacagacataggtaaactcaagagcacagataatagtaaaataattttaaattgacaaatttgattgtttttacctttgtttttaataaaatgtattttactataaatttaaataatttagtttagtttttaatgctagttgtgtttgatagccagcccacaaaattcctaaaaattttcaggattcatttgtacttcattcttttcattgctgagtaatttctttgtgtggatgtaccagtttgtttatccatttacttgttgatggacattggagtcatttccagtttttggaataaagctcatatgaacattcatgtacaagtctttgtatgaaataatagagaactcctacaagctgctgcaagccaagtccagcacactgctaggtggaagcagaaaagataaataaataaacaaacaaacaaacctctgtttgctaatatattgtagatccctcatgttgcctttaatttcacagtaattttcaaaaatattttttaaaagtaaaatattaaaatacatgccttcctgagcatttcagttaattgaaataagaatttctaaatgtgggctggatgcagtggctcatgcctattatcccagcactttcggaggccaaggcaggagagtcacatgagctgaggagtttgagccttggctacaaagcaagatccaccatctctaaaaataaagaagccgggtgcactggctcatgcctgtaatcccagcactttgggaagccaaggcagggggatcacttgaggtcaagagttcaagaccagcctggccaacatggtggaaccctgtctctactaaaaatacaaaaattagctgggcatgatggcacatgcctgtaatcccagctacctgggaagctgaggcacgagaatcacttgagcctgggaggcggaggttgcagtgagctgagatcgtgccatcgtactccagcctgggcaacagagggaaactctagtctcaaaaataaaaagaaagaatttctaaatgtgaacacacgtctataaattgttgggagaaaatgtaagaaattaagtgttaaatgctcctataattaagtataattaactttgtatgaaaccatttttaaataagctatggcttatattgagaaaaagacttaaatgctgaaatatttatgatgtgaaatggtatggtgcctggaatttgctttaaaatatttcatgagaaaaggaggaagggcttaacaaataaaacaagaatcacaaaatgttaataatgtttgaagttggatgacgtttacatataggtttagtagtgagttctggacttttgtgtatgtttgaaaaaatttcataagacatttggagaaagaatcagtaaccctatattaaaggatctatgccaacttcagtatataacttttcccttaagattgaaaataaaatatttaaagtattctatggactttacttttttctgctttacaaaaattatattgcttacactgaaaataattatataaactagatgaatgattagtattagattgctgttataacaatagactattcataatagatggtgaaataatacagatggaaattatctcaggatctttattctttattttattttattatttatttatttttgagacagagtctcgctctctcgcccaggctagagtgcagtggtgcattcttggctcactgcaactctgcctcccagtttcaagtgattctcctgcatcagcctcccgagtagctggtattacaggtgcacgccaccacgctgggctaattttttgtatttttagtagagataaggtttcaccatgttggctaggctggttcaggatctctattctttggatcaggttaaatatttaaatcagtttggcctttttgataatacacagatgaaatactgataactaatgttagaattaccattgagttaaacactattcagattatgtctgagattgtacataagtgaactgacaaaatgacaatgctaagtaatacccaaaataaaaacaaatactcccctttttagcagctttattgaagtataattgatatacagtaaattgcacatatttaaggtatagtgcagtttgacatttggcacatgaatatacctatgaaactatcaccaaaatgaaggtaataaacacatatatctccccaaaagtttccatatgcccctttggaattcttgcctcccaaccttccccatctcagtccctaagcaattactgatttactttcagttactgtaggttagttagttagttagtttgtttgtctgtctgtttgtttgtttgtttgtttattgagacagagcctcactctgttgcccaggctggaatgcagttgtgcaatcttggctcaccacaacctctgcctcctgggttcaagcaattctcctgcctcagcctcccaagtagctgggactacagccatgtgccaccattcccggataatttttgtatttttagtagaggcggggtttcactatgttggccaggctggtctcgaactcctgaccttgtgatccacctgtctcagcctctcaaagtgctgggattacaggcgtgagcaagcctagcttgtatttcctagacttttatataagaggaatcatatagtatgtatatgctttttttaatgtctcctttcactctgcataattatttcaagatttatttgtagttcatttttttcattactgagtaacatttcgttgtgtggaagtaccacagtttgtttatccattcacttgttgatggacattggagtcatttccagttttctgaataaagctcagatgaacattcacatacaagtctttgtatggacgtatgctttcatttctcttgggtaaatatctaggagtagactggccggatcatatcgtaggtgtctatttgacatcttaagaaactgctaaactgtttcccagatgtttgtaccattttacatttccaccaataatgtatgaaagttccaatttttctacatccttgccttgatatggttagtttttttatccactataatgggtgtgtagtggcatattagtgtggttttaatttgcatttctctaatgacgaatgattttgaggatcttctcatttgagtttctttgccctctgtttatcttcttgggagaagtgtctcctcacattttttgtctgttttatcaggttgtttgtcctcttattcttgagttttgagtattatttatatatcctaaatacaagtcatttatcagatatatgatttacaaatattttttcccaccctgtggcttatcttttcacctcttaatgatgtctttttatttatttatttatttatttattatttatttttagagacagagtctcactctgttgcccaggttggagcgcagtggtgtaatcatagctcattgcagcctcgaactcttggactcaagagcctcaaactattgggagccttagcctcccaaatactaggactgcagttacctgcaaccacacctggctaattttttttatttttttgtagagatgaggtctcactatgttgctcaggttgtctcgaactcctgggctcaagtgatcttcccaccttggcttcccaaagtgctgggattgcaggtgtgagccatcccacccagccaacaatgtcttttgaagagatgcttttatcaagtacagttcatcactttgttcttttatggattgtgctttggtgttgtattttaaatatctttgcctaacctagggtcataaggggttttgtctatttttaattctagatgtttcatagttttaggtctgtgattcatttttagtttaatttttatactgagtggaagatatagattgaaattgatatgtttgcataattgaaacacaactgttgtagcatcatttgttgagaaacaatcatttatgtgtgagactgttctcgactctctgttccagttatctgtctttatgtcaataccacactatcttgattgctgtagctttataatatctggaaatcagatagtattggtcctccaatgctgttcattttcaaagttgtttagctgggtgttttttttgcatttctatatgaattctatcatcagtttgttaatttttttttcaaaaactagctgtgattttggttgacattacgtaagttgaatatatagatgaagcagagaaaattgacatcttaatattgaatattctgacccatgaacatactgtatctttacccttatttacgtcttctttaatttatcttaatactattattttttagttttcactgtataactaaaaactgtcaagtgtttgacatcttttattgtcaaacttttacagtgaaaactactaaaacattagcattagcaaagtgtatgtttttccagccttcttcttttaacccgtctgacaaaatatgattttcaattggagatttttttagaacacttaacatctagtatatttattgatatggttatgttcaagtttttcatcttgctaatgttttctgtttggcccatctactttttattcactttatttttcttgtcttcttttggattaattgaatttttttatttcattttatcttattgttgcttattggctataactttgttatttcagtggttgatttagattatagtgtatatgtatctttaacttatcaccatgtagctccaagtgatatttagtaaaacatatggtataagaaccttacaacagtattcttctatttgttcccccagcctttgtgttcttgttgtcgtacattttatttatacacatataaactcccatactacattactgctattattacttaaacagtgataatcaggctgggcacagtggctcatgcctgtaatcctagcactttgagaggctgagacaggtggatcacctgaggtcagtagtttgaaaccagcctggccaacatggcaaaaccctgtctctactaaaaatacaaaatttagtgtggtagcaggcacctgtaatcccagctactcgggaggctgaggcaggagaatagcttgaacctaggggttcgaggttgcagtgagccgagatcgcgccacttcactccagcctgggcgaaagagtgaaactccatctcaaaaaaaaataaatgaaatgaaataaacagtgataatcttataaagagatataataatatgagggaaatatgttaaatttaaatagttaccataccttgtgctctttattcctttttgtaggcctaaatttcaaactgttatctattccttctggttgatgcacttcctttaacaatttttatagagcaggtctatggtgatgaattctgtttctgtatatagcaaaaagttgctattttgcctatttttagtttttttgtttttacatttctgactatttttgacaaaagtctaggttaaaatgcaattctcacagatatggaataaggccaaattaactgaaagtagccatttaagagtttactttttttattgtggtaaaattcagataacaaaatttaccattttaaccattttaaagtatacgatttagtagctcatggtatgtgtatggtgtttcatacacagcaccactatctagtaaaagagcatttccatcacctgggaaggaaaccctgtacccattaagcagtgactccccattcccgcctccacctcagtcccccacaagcaataatgtgctctctctctctctatggatttgcctgttctggatatgttatataaatgaaatcatgcaatatttggccttttgtgtctggctcctttcacttagcataatgttttcagggttcgtattttgccatctatcagtgctcagttcctttttatgactgaataatattccattttgcagattaactacattttgtttatccatcagttaatggatttttgtctgttttgaatagtgctgctgtgaacatttcatgttcaaattttttgtttgaacacctgttttcaattctcgttaagtggaattcaagatgaaatggtaattctatgattcacttttcaagaaactgcaaaactgtttttcgtagtgactatgccattttacattcccaccagccatttcaggggttccaatttttccacatcctcaccaatgcttatttttcatttttttaactctagccatcctggcaattacaaagtagtatcttctaatgattttgctttgcatttctctaattaggttaataatgttaactatcattttgggttcttattggccatttatatatcttctttagaaagatgtctgttcgagtcatttgcccacttttgaattgggttgtctttctgttgttgagttgtaagagttctttatatattctggacactagacctttatccaatacatgatttgcgaatattttctcccattctgtgtgggttgtctttcctccacttgttagtgtccttcaaggcacaaaagtctttaattttgataaaatctactttatcttaggtgtcttgtgcttcacctttggttttgtgggttttttattgaggtgaaattcacatgacataagattaaccattttaaagtaaaccgtttaatattcattcacagtgttgtacaatcactatctctatctagtcctaaaacatgttcatcaccccagaataaaaccttgtacccattaagcacttaatacccactcctctttgcccccaccctctgacaactgccaaatcactttatttctgtggatttacttcatctggatatgtttcatataaatggaatcatacaatatgtgacgttttgtgtctggtttctttcactgagcatactgtttttgatgttcatccatattgtagcatgtatccagtactttaaccctttttatggccgaataatattctgttgtgtatatttaccttaatttgtttattcatttatcctttgatgaacatttaggttatttccaccttctgactattgtaaaaagcgctgctatgaacacgcaaatacaagcaaatgtatgagtacctgttttcatttcttttaagtgtatacctgggaatggatttgctgggttcacctttgttttttagaaagatattttccctgggtaaggaatttgaggttgacttttctctccctctctctctttttcagtagttgaaagatactgcttcactcccttctagtttgcatcgtttctgccaagatattgccgtcatccttatctttgttcctctctaggtaatgtgtatttctttagctgcttttaagagatttttagtcactggctgtaagcaatttgattatcatttggctttctggagttttcttcatgtttcctatgcttgggttttgttgaacatcttacatatgtgagtttatcaaatttataaatttcttaaatttttaaatacttcaatcctctcaccttcctttgaggacttcaatgagatatatattaggttgcttaaagttattctacaacagaacaaatgatgttctcttcagtttttttcagtcttttttctgcttttcttttgaatagcttcttttactgtgtcttccagttcactaatctttttttcaccactgtataatctgctttcagttcaatccagtttttatctcagatattgtagttttcatttctagaagttcaaattggatcttctttgtgtcttttaggtctctccttaacattctcaaactttattttctggaatatgtgaaatataatttcaataacttttttatattcttgcctactaattctattattttgtcatttcatggctgccttcaataaatttgaattttctcattatatatcacattgttcagcttctttgcatacgtagtaattatttactggatgccagaccttgtaaattttaccttgatgctatatattttgtattcctatatgtttttgttagctttgttctgggacatagttaggtttcttggaaacagtttgattcttccaaatcttgcttttaagcttttttaggcagagaagggtttatcgtaaggccaatttctcccccattactacaaccaaactctttgagtattccatgtcctgtaaattgtaaggttttctactttggctgatggaaataagcactatgccttgcccatgttcacttcagagattgctcctaccaatcttgtctgtagttctgtctcctgtctttatacatatgcactgttctgtgccaggtaaatacttaaggggcactatctgtaaattgtcagagttctgtctctttgcagctcccttttcttcagtagtctcccatatgaactgtaaccaccttggttattacttctatcaacagctccttaactcagggaatttgacaggctctgccttaattctccttcccagcaccacagcttgaaagctgtctctagtcaataaactaaggcagtcatagagtttaccttgtttgtttcctgtgtgtcagggatctccttcattgcatgatgtccaatgtctttcgaccgttgttttattagttggtccagtataacagagaaaacaagttattcttttttgtgtatttgtgtatacccactaattctcaagaaactgccaagtttagttaagagtcaagtgtcagtgtggagtttgttaaacagtagaaaatccagaatcataaagtgtgccacattactgccaacagtaaggcagctaagaattggtctttcttagctgcctcaaaccttgatatatgctctccttctagttattcagtaaatatttatcaatttcccactatattcaacaactgatgacaaaatagacatggtttttcacttctaacataaccaaccttattcacaaaggccttattttctactgtaagcacgcagagatttatcttttacaactgacttaatttcaggaagcttgtctagaaagtgggacatgcacagtcatcagtaaccacatggcaaggtttagctacctggaattttgtacctagaaggcattgctagatttgaaagaggcgtcaaggtgcataggtaaaataaagtagacctatatgtattaactttgaaagaaatttatactgtattgatgatttttcaaaaaacaaattgcagaataatttctgtttctctgtttgggttttaatatatttgtgtgtgtgcatgtacccagcatatacagagaggatgggattgtgtttctgtttaaacatacagaaaatgaaaaaaatctgaaaatatgtcatgcaaaggggacacaaataccactagtcatggattagcaatatgaaatgagctttattggtataaagtaagtacttgaagtaataaaacatttatctctgccccttgagttgcctgacccattcttctgcctctaacaactgctaggagtgttcttccagcatccccagtgagctcagtctcttggaaagagtctgtggcacatacaactcacaggaccacacctcaacattataaaggaggagactcacatacctaccatgtggccctaaacaatctagatctgattaaatttcaaggtcaaccatatttctaagacttcaatgatgtaaaaaaaaaaaaaaaaaaaacccactgttttgtgtaccactgtgaggaagagtggaggatgctgctgattaaactgtgatacaatgctttgttattactttaatttttttcattttagacatactttcttttagactttaggcagtgatttttgtcctatattgcacaactctgtttctgtgtttttcttctgtttcaatgccgaatcccttgtgatctttttagatacttaaatgacaattgtactcagcctatgaaggactagccatactcaaaactcaattgaagtaataatatgaacagccaagaccaattttttcatgcatgggctttatcaacagcaattataagatgtatgctattttcatagaagagattaaaaacagtatgatttatagggttcctttgcctttcaaaatgtttgtctgtttgttgatattaaaaatcctttagtaggctgggcacagtgggtcacacctgtaatcccagcactttgggaggtcaaggcaggcagataacttgaggccaggagttcgagacctgcctgaccaacatgatgaaaccctgtctctactaaaaatacaaaaatcatccgggtgtggtggtgtgcacatatagtcccagctacttgggagtctgaggcaagagaattgcttgagcctgggaggcagaggttgcagtgagccaagattgtgtcactgcactccagcccaggtgacagagcaagactctgtctcaaaaaaagaaaaatatcgtttagtaaagaacagtggcatttatttcattactagaaatacaaggcttaaaaaataacacttagatgagatactacattgcctgaatttttttttaatttagcaagtgaactttaattcatcagcctatcaaaagtctttaccttactagaataatagtagaataatagtcaccagaacctgggaaggtgaagatggggaatgaagagagggtggttaatggatgcaaacataaagttagatagaaggaatgagttgtagtgtttaattgcacaataggatgactgtagtttacaataatttattgtatatttcaaaatagctagaagatttgaaatgttcctaatacaaagaaatgacaaatgtttaaggttattgatgtcctaaatatccctatttgattttcacatatgcatgtatcaaaatatcacatataccctatgcatataattatgtatcaatttaaaaattaataattttttaaaagttccctatccaaaactgtcctctgtgctgtcaatcatgacttatttttaaaggcccatggcctacaagacaatgtccagattctttagcgtggcatagatggccaatttgattctaatctacttctcatcctcatcttctgtcatctcccctcttcccaaatcttcacttgctgtctcctcccaccactttgttaccttcgtactcctcagtctcctttgttgacttctttttctctgattatgtcttaagtgttgacatgccccagggttctaccttgtttgtttaggggaaaaggggaaaaagccaagaactttcaagttaggcagactggttatatgactttaggcaagttatctttttgtaagcctcagttttccaaagtgtaagtggaaataataatactatattgcatgtttgctccaaaatgagagagggttcaatctaagatgagcacttagcacactaactggcatatgttaatcactcggtaaatgtaggatcttatttctgttctagagtttcatttatttttctcttgctggccataatattaataaaataagtatttttcttgtaaatctggcaatttttaaaggaaataataggtccagaattggagtaaataatgattttgcctatataggagtattcagaataagccgggtgtggtggctaatgcctgtaatcccagcactttgggaggctgaggcggggtgatcacctgaggtcaggagttgaagaccagcctggccaacatggtgaaaccctgtctctactgaaaatacaaaaattagctgggcgtggttgtgggcacctgtaatcccagctacttgggagactgaggcatgagaatcggttgaacccaggaggcagaggttgtagtgagctgagattgcaccaccgcaggactctagcctaggtgacagagcaagactgtctaaaaaaaaaaaaagaagaaaaagaagtattcagaataaacaataaaatcaattttaacacaatagcaaaatgtttaataataatttaaataatttctgctcttatcaaatgcagaagtgtatttaattgcatacaaactaagcattttaggagaaaagtgaaaagctgcatttttgttttattttttttaattaagacaagtattcattgatgaatagtgtttatatgatcaaaacataaacagtgaatgttcttgttttttaatttcaacttttattttagattcaggggtacatgggcaggtttattatctgggttttttgttggttggtttttttgagatggagtcttactctcttgcccaggctggagtgcagtggcacaatctcggttcactgcaacctctgcctccctggttcaagcgattctcctgcctcagcctcctgagtagctggaattacaggctcctgctacagtgcccggctgatttttgtatttctctgggtatattatgtgatggtaaggtttggagtttaattgctactgtcacccaggtagtgagcatcatacccaatagtttttcaacccttggccccctctccctctccccattgctagttcccagagtctgttgttcccatctttatgtccatatgtatgcaatgtttagttcccacttataagtaaaaatatggagtatttggctttctgtttgtgcattaaatcacttagggtagtggcctccagctgcatctgtgttgctgcaaggacacaatttcattcttttttattgctgcatagtatcccatggtgtatatgtatgataatttctttatccaatccattgttatgggcacgtaggttgattccatgtcttcattattgtaaatggtgctgtgatgggcatgtgagtgcatgtgtttggtagatgatttatgttcctttgggtttatacccagtaatgagattgctaggttgaatgatagctgtgtttcaagttctttgagaaatctccaaactgctttccacaatggctgaactgacttacattcctaccaacaatatacaagcattcccttttctcctcagcctcaccagttttgactttttaataaaagctattctgattggtatgagatggtacctcattgtagttttgatatgcatttttctggtgattagtgatgatcattttttgaaaaactgttttttaaaacaaagaaaagcttcaaattaaccagaattgttatattcaaattagagaatatgaattactgacaaaataaatttgttgaatcaaaaagccaaagctaagcaataataataagacaaaaatgaatataaacatttaagagtaatgatatcatagtctattatcaattttcagtaaatataacaaaaatgattatacgaatatatatgtataaataagaatagctagtaattttgagagcctacttaatgccagtcatagcactttatgaaaccacataagttctgcttgggttaactggactttccagaacatgaaacccctgagttggccagtgtgtccagacttcttgaggcctgaaagaagctctccaactgagtgagcttccattaggttggcaagtgtattagtccgttctcacactgctaatgaagacatacctgagactgtaatcaatgaaggaaagaggtttcattgactcacagttctgcagggctgaggaggcctcaggaaacttacagtcatggtgaaaggggaagcaaacacgtccttcttcacatggtggcagcaagaactgccaagcaaagggggaaaagccccttacaaaaaccatcagaccttgtgagaactcactcactatcatgagaacagcatgagggtaactgcccgcatgattaattacttcccactgggtccctcccacaacacatggggattttaggaactacaattcagggtgagatctggatggggacacaaaacctaaccatatcattctgcacctggaccctcccaaatctcatgtcctcatatttcaaaacacaatcatgcctttccaacagttccccaaagtcttaactctttccaacattaacccaaaagtccaaggccaaagtcttatctgagacaaggcaagtcccttccgcctatgagcctgcaaaattaaaagcaagttagttacttcctagatacagtgggggtacaggcattgggtaaatacacccatttcaagtgggagaaactggccaaaatggaggggctacaggccccatgttaagtccaaaatccaacaggacagtcaaatcttaaagctccgaaatgacctcctttgactccacgtctcacatccaggtcacattgatgcaagaggtgggctcccacggtcttgggcagctctgcccttgtggctttgcatggttcagccctgctcccagctgctttcatgggctggcagtgtctacaacttttcaggcagacagtgcaaggtgttagtagatctacagttctggggtctggaagacggtggccgtcttctcacggctccactaggcagtgtcctagtgtggactttttgtgggtgctccaaccccacatttcccttccgcactgccctagcagaggttctccatgagggctctgcccctgcagcaaacttctgcctgaacatccaggagttttcatacatcctctgaaatctagtcagtggtttccaaacctcagttcttaacttctgtacccctacctgcatgcccaacaccacgtggaagctgccaaagcttgagacttgcaccatctgaagcaatggcctgagctgtacattggcccgagctgtacattggccccttctagtcatggctggagctgaagcagctgggatgcagggcaccatgtcccgaagctgcatagagcaggggggccctgggcctggccccaggaaaccatttttctctcctagggctccaggcctgtgattggaggggctgctgtgaaggtctctgacataccctggagacattttcaccattgtcttggcaattaacattttgctccttgttacataggcaaatttctgcaagaggctcaaatttctccccagaaaatgaggttttcttttctatcatattgtcaggctgcaaattttccaaattttatgctctacttcctcttgaatgctttgcctcttagaaatttttcccccggagtgtaaattagttcaaccattgtggaagatagtgtggcgattcctcaaggatctagaaccagaaataccatttgacccagcaatcccatcattgggtatatacccaaaggattataaatcattctaatataaaaacacgtgtacgcatatatttattgcagcactattcacaatagcaaagacttggaaccaacccaaatgctcatcaatgataggctggataaagaaaatgaggcacatacaccatggaatactatgtagccataaaaaagttcatgtcctttgcaggaacatggatgaagctggaaaccatcattctcagcaaactaacacaggaacagaaaaccaaacaccacgtgttctcactcataagtgggagttaaacaatgagaacacatggacacagggaggggaacatcacacaccagggcctgtctcggggtggggagctaggggaggtatagcattaggagaagtacctagtgtagacgagttgatgggtgcagcaaaccaccatggcacatgtatacctgtgtaacaaacctgcacgttctgcacatgtatcccaaaactgaaagtataatttaaaaaaaagaaaaagaaatttcttcccccagataccctaaatcatctctctcaagttcaaagttccacagatctctaaggcagcagcaaaatgccaccagtgtctttgcatagcaagagtgacctttactccagttcccaagaagttcctcatctccatctgaaactacctcagtcagcctggacctttttgtccatatgaccattggcattttggtcaaagctctaggaagttcaaccagtctctaggaggctccaaattttcacacattttcctgtcttcttctgagccctccaaattgttctaatctctgcctgttactcggttccaaagtcacttacacattttcaagtatcttcacatcagtgccccactacccagtactgatttactgtattaagccattctcatgctgctaataaagacatacctgagactgctatctataaaagaaagaggtttaattgattcacagatccacagagctggggaggcctcaggaaacttacaatcatggtggaagggtaagcaaacaacatgtctttcttcacatggcggcagcaaggagaagtgcagaacaaaggggggaaagccccttataaaaccatcagattttgtgagaactcactgtcacgagaacagcatgagcgtaaccacgcccatgattaatacctcccaccaggttcttctgatgacatgtggggattatgggaactacagttgaggatgaactttggatgggaacacaaagcctaaccatatcaacaagtatatcaaagaagaatcaaagaattcacaaaaatgattcaaatacaatcagtctactcttaggttcctgatggatgtgttattagctatatttaacatattgaagaagaaaaacagagaacatactgaatactgtaatatatgatatgaccattcttgaaatcacattttcactaagtgattaagcttttggaaaactggccacaaagttgacctgagactgatttggaagattggggctgatttgtatgtaaatataatcctttataattaaaaatgtaactactacctagacaaatagctgtctttttttttttttttttttttttttttttttttgagacagagtctcgctctgtcagccaggctagagtgcactggcacaatctcggctcactgcaacctctgcctcctgggctcaagcaattctcctgcctcatcctccccagtagctgggattacaggtgtgtgccaccacacccagctaattttttgtatttttagtagagacagggtttcaccctgttggccaggctggtcttgaactcctgacctcaggtgatctgcccgcctcggcctcccaaagtgctgggattacaggcgtgagccacggcacccagccaacgaatagctttcatacttttttgaccatgacctgtagtatgaagtgtaccttacatagcaacccagtgcccaaatatatgttgtgtatttgtgtgtgtgtgtatctgaaacaatatccttactatgtacagtacattctattagttgctattctgttctgtttctttttttattattatttttttaacactgtttgcaacctatgtgtgaaaacactcatttggataaatgtgtaatattttcatcttatggaagccttcatgaaaaatcagttttagaattgaaaaagaaaggtgaaaaagtaagaatgattataaaggatactagagaaatatggagtcatcgggtgtgactgttgtataaatatccagaatgcttcctagacgtgtttgtctactatgtgtaggagcaagctaatccaacctctatatcattttgaattaatactgcgtactgctgaaataattgttatgtatccccatatttttgtcctgtcccttttctgcccctttgagcaatcttgaacaaattggctgtggttttcttagttggttggaattagtatcatttacaaatttgaataattctagtctgtactctattcctccgaattatttataatacagctatatggctaagactcagagaaccccaatactttcattctttatctagagaggtgtttagaccacgtcttcaaaaaaaggtacccctccaattcaatagtgatttcctttgaaaaatcttattttgaactttgttgacttttttgaaggcctcctatttatgtgttaacattttaatcactcagttacatagttcttgaggaactgcaataaatagcaagaattcccactgcagaaaccgtgttactttttctcaaataaatttgtttatttatggctttttatacacagagcacttgccttagaataacttataaaagtagtgttaccgtaaactgttctagcccgtcatgccatttagctcatcataagaaataaagtatgtttagtaataatgtttgttaagtgttaagcagtactaatatcaaattcattctttcaacaaatatttattgagtacctattatgggccaggcatttgttctaggttctggggatgattagtgaataagacacagaaattcctgccctttggtgctcatactggagttggggagaaacagagattttttgtcaagtgaaatatatactcatttagaacctaacgggttatatgaagaaaaacaagcaatgaagaagattgcggacagttcatcctgcctgtagttcccagcccactgggcatgtaggaggctcaaagtgagtgccgtggtttttaagtttcttctgaaagtggccaatcagcaaggaaaaaggcatcagacctatagatgctgcatgaatgtaggtattcaggcaaaaagcaatcagatatctctagtatggaagaatggttgtgaagcatatttctttgtggataattagtcacatttatttatcatttgtgtgtgtgcctgtgtacacacacatcagtgcacacatgcgtgtgcctttaatacaccttatttatctttgggtcgtaggggagagggattcttttgtgttcacattctgggttatttttaataattgccttattttttgttattgggaagcagtaacaagtattgcctgaacatgattctggaaccagactcactggattcaaatctcagctttggcaattactagctatgtaaatttggaaaagttttttaacttctttggtttcagtgtcctcatttgtaaaatgttaagttccaaataaagcaactttcattgaaatatttcctcagaaaatgcaggggtttatttttttaaaaacagattgtgtcttataatatctaaggggtggaaaaacaggacagaagagaaaaggtaacgtttaaaaataggcaaagacaatctgaaagggctacgtacggtatgattccaactatgtaacatgctggaaaagacaaaactatggagtcagtaaaacagcagttgccaaaagttaggaagactccaccatgcctggctggtgtcgtgcattctatggggtttagacagatgcataatgacatgtgtctgtcattatattatcacacagagtagtttcactgccctaaaaatcccgtgttctgcctcccaggctcaagcaattctcatgcatcagccttccaagtagctgggactacaggcgtgcaccaccaaacctggctaattttagtatttttagtagagacggggtttcaccatattggccaggctggtcttgttggccatgttggccaggcctcaagtgagccgcttgcctcggcctccccaggtgcatgagccactgcatccagctttaatttcttttaatttctttctttcttttcttttctctttttttttttttttgagatggagtcttgctctgttgcctcgtctggagtgcggtgacacaatcgcggctcactgcaacctctgtctcctcagttcaagctgttctgccaggttcaagcgattatcccacctcagtctcccaaatggctgggattacagacacacaccaccatgcccagctaatttttgtatttttagtagagacagggttttgccatgttggccaacctggtctcaagctcctgacctcaggtgatccacctgccttggcctcccaaagtgctgagattacaggcgtgaaccaccatgcccggcccagctttaatttctttatgttggttttcacctttctctcatatctccttgagtaacttattagtcagccttttaaattatttgtctagtatttcaaattatttatctagtattatcttggtttggatccactgctggagagctgttgtgatcttttgggggtgttatataatcccgtttttttcatattgccagaattatttttctggtttcttcttattggggtagactattttgtctaccccagtgagaaggaacttatttatttctaattcaactgagtttttttttttttagtttttttttactcgttggggatgtgactttatggtttcttagctagctttgactcagcattttcagtgtgaagactcgtatgagttccttagttgtagagaatctttgtgtgatggctttctcagatgctgatgatagtagtgatgtgctggatttgtgagcaggttcactgtctcctgtggggctggaatggcagaggtctcatgaagcttctctcattccctagtgatgtgcccttaagaaaaaaaaaaaaaaatccccagtattttattcacatggttgaacagtgcaagcttgaggccagtaggaggtgcccataggtaaaaaccagcttctactaaagcaggtggataaatgccatacttaatagtgagcagagctcccagccttgacagaagcagctggggaaggtctatgaaatgcactgaggtcttttcagggagaagggagggagccaccacagctctccttccaggccaacaggaaagtaatacacctcccaggcacactcctgacctgctgttccagctgttcaaatcagaaaggcatctcttttcatctgcaggaatactgatgttccatgtagactttccccctatgagcccagcactgcacctgtgcctctgatgaaaaacaacttcccacaagtggaaagttcagggactcaaggcctgcagactggtttcttttgtcccacacggtgcctccgtaatgtgcggcactccccctttacctggagggccagactactgtgaatcctgctactcctctgggtctagctgctcagtgggactcccacactccaggatggtactggagaatatccgccaaggatccagtgatgtgacctgtcctctactctcccagcagcgggtaccagcaccagttctgatgggggtaggagaggagtgacgtagactctgagatttccttagttacaaataaccttagtgttggctttctcagatgccagcagtagcagtaatgtactgggcacatggacagactcaagacctcctggttagccgaggcaatgcaggcaatggcaacagctgagggcatgcagaagttttctccttcctgagtgctgtgttattctgccttcaggtgtcataatgggctgtgcctggctaccagccaggaggtggtgcttgcaaaagagtaccaggtgcggtggtagtagtggaatttgtgcttgccttatgttacccagggcaggcactctggggtctcaggcaatgggcggggctatggagcctccaaatatccctgtccattgtgttatgctaccagggctcataaagtggcaaagcctggtgaggactggaccaggcaagtcctcactcaggctctccaggtacaagcacaagcagtgtccccagtggggatcagagaacagctttctggccactggggtaatgttccagaggggagcagagctgcctctggtgcacagaagaatccacacagggagtgggagcaggagggagtagtagaaggcagtaaggcccactcagctcccatgcacttggcacagcaagtcccataccctcagtattctgctaacagcaactagctgtgttccaggcagtctacacttagaacacaaaactgccccaagcagtaagccttcctgccagcgatagaaaccaggctttcaggccatgcccctccctatccacctgcgaagcaggggcgcccaacttctgcactatagcacacttcatgccagccccctggttctggccgacagggttagtctccacttaaaatcatattgcgaatctcaggagctcttttcaacctgttactacagcctgagttactgagcagacttctgtgaggtaggatcaggaatggctttcctccatccccgctggaatctggtagtgcgtgcaaagcacatcctgatgccactccttctcatgtattctccacgctcactaaattggctcccatactgagtagggttaaggccttcccctgtggcctgggctgcccagctttgctgtgggagtgtgtgttctggtggctgagtctccccatcttatgctctggagattcagagttttccatctggttcacagtgtaggctgctgccaccacttcttttaaaggatctgtggtttttttcagttcttctgttaaattcttgtgttgcttcttgtgaaaaaaagttcacagtgtgaatctctacacatactttgtttttccaagtaggagaggtatgctaacactgtctccagtccaccatcatgtcttggtatcctccctacagtactcccagtatctgcaggtcacagagccacagaggctgtggcagagccacctggatcctctaggattggaggaaacagagcaatggagataggacctggagttgggagggcagatgctcagaaattattattaactgttatcactctgttacttatttttgaggttgttctgatatggaattacatataaagtaatattttaattatgttggacataacatttatcttccatatgaatggctgattcattacatggacaaaacatttcactttcattgtagtagtagctctgtgtctaaccttgccaagtgcttaatccaggaagtcttggttatggttcattctgggaaaaaattcagttaatatggatccagacagtatgctagtatttgttatttaaatcatgcttgtataggtgcaaacaccaggtcatataaatgtgtgtgtttgtgtgtgtgtgtgtgtgtgtgtgtgtatgtgcacattaccaaatgccaaccaccactgaagtgggaaaaacaatgacttatttataaattatattctgtttatacgtcaaacaaataaggtaattgtttaaattttttacctgccggttgttcctcgaaaactcatgagtgactataatttttttcgtttcagagctatttgaaaatcacaatgcaaattctttatacacacacatacatacacacacacacacatcccaatcagcaatgttatacagttgaaccacattaaaattaatttctcaaaggtagctttgaaggagaaagaagttgcaaacacttgaactcaaattctgttctctaaccctaatctcctttccttccagctctcctagttctttcattcccactaaatttgtactttatttggactcattacaagtccctgtctcataaagcccttccatatttttccaatctgtcaagcccctcctcgttttacttttcttcctgcctatccttggactttgtcagccatctgagtactagaattcaccatctctctagattgctttgtggccaaatttatacagcaggcttttcttgacaatttctacctttagcatattatcttacaatctgataattagcctataaatatttaatggaagaaaggcaagagagagaaaattcttaggttttgcagtaacaatactgaaaaattcttgtggaaatctgtgtgactcgtcctgcttggaagcattatgaattcatgttattgaatatcaactaggcccttaactactgttgcccagtgtttttatttttctgtctccatcctatttcccattatctccattgcagatcacttctaatcccaaagctatcaattctattatctgtctccttttttcagtatctctccttaccctttttctcctctttagtacccccttcaaagtatgtgtgtgtatgtgtgtgtgtgaccaaatgccaaccaccactgacacacatacatacatgggggaagtggtattggcataggcaactttcaaaagttaataccctatctttgtgcttaatttattcttctctcctcccatgtcagctacactctcctcagtggtcattaatgacctctgaatggccagcattttcttctcagagcctatacaatttgatctatctgtggcatggcattatggatattctagaaattctgtcctgttttggcattacaacacaattctccctggctctcgtcctgtaactctgatggctctttagtctatttagctgatgtcttcatcttctagcccttaaatgtaggtgtccctcgggtgcctgcccttttctctgttcttacacctcaggagagattctaaaacattagacgaagtctagaatcaagcccagtgagtataagaatcatcaaaaattctagctggaagaaaaaaaccccatcaaacagtgggctaaggacatgaatagacagttctcaaaagaagatatacaaatggcaaacaaacatgtaaaaaatgctcaacatcactaattatcagggagatgcaaatcaaaactgcaaagtgataccacctcactcctgcaagaatggcgtaatgaaaaaaatttttaaaaaatagatattggcatggatgtggtgaaaagggaaaactttttcactgctggtgagaatgtaaactagtacaaccaatatggaaaactgtgtagcttccttaaagaactaaaagtagatctaccatttgatccagcaatcccactactgggtatctgcccagagaaaaagaagatattatacgaaaaagatacttgcacactcatattcatagcagcacaattcacaattgcaaaaatatggaaccagctcaaatgcccatcagtcaatgagtggataaagaaaatgtggtatgtatatataccatggaatattactcagccataaaaaggaatgaaataacggcattcacacaacctggatggagttggagaccattattctaagtgaagtaactcaggaatggaaaaccaaacatcatacgctctcacttacaagtcacagctaagctatgagaatgcaaaggcataagaatgatacagtggactttggggactcatggggaagggtgggagcagggtggaggatacaagggtacacattgggtacagtgtacactgctcaggtgatgggtgcaccgaaatctcagaaatcaccactaaagatcttaatcatgtaaccaaataccacctgttctccaaaaactcttgaaataaaaaaataataataaaattctaagcccagctacttgggaggccaggatggatcactggaggccagtagttcaagagcagcctgggcaatatagcaagaccctatctctaaaaaaagaaaaaaaaactacaaaacttagctgaatgcagtggcgcacacctatagtcccaactacttgggaggctgaagtggaaggaggattgcttgaacctgggaggcagaggttgcagtgagccgtgattgcgccactgcactccagcctgagcaacagagtgagatcctatctcgggcaggggggaaagaaagaaagaaaaaaacaattagccagttgttgtggcatgcactatagttttagccacctgagagactgaagtgggaaaatctcttgagccgaggagtttgaggctgaaatgccaccacacttcagcctgggcaacagagtaagaccttgcctcttaaaaaaaaaaagaatcacgtaagattcttgtttaaaatgtaaaacaggcttctagatcctgccctcagaggttgtgattaagtaagtctagaatgaagtccagaaatctggatttttaacaagctctgcagtgaactatgattccgccactgcactccaacctggatgacaaagcaagaccctatctcaaaaaaaaaaaaaaaaaaaaaaaggaatgcagggccacaatttgaagtagtaatgttctatagttctatctacttcaatgacttcagtcatcacttccatgctggttactctcaagtattttaacatcccattcatgaattttccttacttggaccatactttgtggatcttaagaccaaaagcggagctgataatcaactaccatgtccttgctttaattattgacataataaaatactagcagaaacactggtaaatagctctacactaagatcccactgtccgttccaccacagtctcatctgtcctgtggcccctctcctgagacctgcctgtaatccagcgacaaagaggtcatacctgagacacagagtttcaccaatattttaattggttgaaatgtatcagttaaatattaccgctgttaaagatgataatgttaatcacgtgggaacatgagagaaggaactggtattagtagggaggattacaagttcaagacgtaaaatgatttacgtactaatttggatggagtggcctacatcaagtccaagatcactaggactgtattcttcaaatctggctgattatcagaatctgagacccaaccctgagaaattttgattcagtaggactggggcccaccagaatcactagtaggacccaaaaatcacttattttttggtttgtttttctgggttttttgagacagagtcttcctctgtcacccgggctggagtgcagtggtgtgatctcggctcactgcaaccacctcctggattcaagcagctcttgtgcctcagcctcccaagaagctgggattacaggcatgcgccaccacaccaggctaatttttgtatttttagtagagacggggttttgccatgttggccaggctggtctcaaattcctgacctcaagcaatccacccaccttggcttcccaaagtgctgggattacaggcatgagccaccacgcccagccagaaatcactatttttttttacattttccccagcaattgagaacatagagaagttgtaccaaagtgttgcccccctatcggacctcaagcaggcctttttcattcctagcacgattaaaaagattaagcaaggatatgtgactgattctgtacaaactaccaccactgctagaaagtatcacttgcatatattttatagacagaaagcaactcaatgttaaattccactcagcagtattcattttattcctggcaataaagaacttcatttctagtttctgtgaaagtaaactccccaaggaaaaaaactccacatgtaggaaaaacatgcagcaaaatgtagtcacctttatattagtttatttgaattttaagagaaaaattgtaattttagattctcatctaagttaaattagtacttgaatcaaaagatataatgatgttttaatcaggggttacttttctctgaatcatatgtacaggttattgaaacaaaggaagaataacacttctgtaaaatgttgtgtcatgggttttatctagagtcacttattacgtatatgattcctgagtcactaattactaaggctttcctataaggaaaagattactaacaataggcaatgtgagcaattgcaaaactttttgaatagtaattattataggtacagaaagatttttgaaaactctattgaaggaattaaattctaataaattatgtttatttcaaacatggaattagcatcactttttattcagagatatgtacttttttcctgacaaatgaaaatcaactttggggatttagaagcctacaaacaggtttataaagaaatgtatctgtaacactaacagcattattatagtatttattatccagagtaaggcggttataggttttatgttaaagataccttttgaaagtaaggcttctggcccttaactttgtttataatactaaaacctttagccgggcatggtggtgcatgcctgtggtcctggcgactcaagaggctgaagtaggaggatcacttgagtctgggaggtcgaggctgcagtgagctgtggctctgcactctagcctaggcaacagagtgagatcctgtctcaaaaaaatatatgtatatattaaaacctaatatatgtaactactttcatgaaaaaattgaactaaaataattgagactgctgctgtatattttgtgcaactaaaataattgagactgctgctgttatgttttgtgcaattgaaattagatttggtatgttttaaacagctcattctagacagaagttaactgaaattcataaatgttcttagttattccctgccaccctttccccacacacacacttgaactgttctgcactttgaaacacaaagcaacttgtcagttcagtttattcagtcagggtcagttctgtgaaaacaaagccaaggcaattgtttgatttaattgactagacaaactggttatacaggttagtagaacttagttttatttttgtccagctgcatatttgaatgttcataaagtaacttagtaaaataataagattccagtgacattgtaatatattttaaagaataattaccaaagcaaagaaaaaaaacattctaaaacccaaactatagaagctattcatggtatttttttctttatggctccactttcactataatgaaatgtgttcccccaaaaaagtagccttcttttctttcactattcatttccttctttttttttttttaatttttttttgaagattttttttcctgggctgtagttaatataactatcagaaaatttcctgtacaatttagatgaataaatgcttttacagaatagttctctatgtgcaagcagacatcctctaacagttggtcagcccccttttggcttcagtgtcctccttacccagccaacctcatggctgatcattttaacaatgttctcattactatccttgattctttctgcctcccaccatgctttccactatatccatcccactgttccctgcttcttcagctcctgggcttctaatcactcattattttattaaaatgagtggaaaaccaaaaaattgatatgctaaagtatactcttaaaggtcttaatactttaaaagtatatagatctcatgaacataattcatttgaggaaaaaaatacaaatcatttcttgtcccaggaaaacagtaaatctttaatggaactttttagcaattatgacaaaaagaatggaaaaatgtttaaacatatataaaaggctagacgtttatcgccaaatagtatctaaaggtcatagaatagttaggaattctgtcattttgttttgtgtaataaatacccccttccttaccctttcaccctaataatagatatccaccattttgttgtgattatccaactatagagtacctttttcaagaactcattatataccaaagtaggagcttgctgacactgataatgctttatttagttttgtagtgacatacaattaccatttgcttaggaaaaaaaataaagaacaaaaacaagtaaattttttaaaactatggttgtgtatatataagttgataaaaatcctttgggagaaaacttttgtcttgtgtgttaagagcattaaatagtcataccccttagcctagtgtgtcttctatcctgaaaaaaaattaacaaagcaaatactaacttaagaaaaaaaactacagcactgaaaagatttgttgtaatattgtttatgctaacataaattatgtaaatttttatatattgtttatactgacttataatttattactatacatagtgtaaattatgatacattggctttggtaggcagttttgtaaccgctaataatataaataccatactattaacaatctagaaaaatgattctggtataggttatgtgaaaaggcacaaaataaaattgtatatagtacactagcaatgaacagtctgacaaaggaaattaagaaaacaattccatgtacaatagcatcaaaaagaaaaaaatacagccaggcatgatggctctggactttgaaaggccaaggccagaagaattgcttgagctcaggagttcaagcccatcctgggcagcatagggagactctgtctctataaaaaataaaataaaattagccgggcatggtggctcatgcttgtagtcccagctactcaggaggctgaggtgggaggattacttgagcccaggaggtaggctgcagtgagccatgatgttgccactgcactccagactaggtgacagagtgagtccctgtctcaaaaaaaaaaaaaggaagaaaacatttaggaataaattaaccaaatggacacaagacatcccatattcatggattagaagatttaatgttgttaggatgataatactacccaaaacattctacaaattagattcagtccctgtcaaaatcccaatggcattttttacagaaatggaaaaactgatcctaaaattcatatggaatttcaaggaaccctaaatggccaaaacaatctttaaaaggaaaaacaaagttgtagggctcagatttccagatttctgaacttactgtaaagttacagtcagcaaaacagtgtgcaactagaataaggatggacataaaaacccacggaatattaatagaatagagcccagaagtaaacacttgcctatatggccagtcgttttcaacaagagtgctaggaccatttcatggagaaaagccagtcttttcaacaaatggggctggtaaaactgagtatctacatgcaaaagaatgaagttggacccttaccttacaccatattcaaaagctaactcagactggatcagagacctaaatttaagcattaaaggtataaaatgcatagaagaaaacataggagaaaatcataaccttggatttggcaatttctgcaaaaggacaagcacaaaaacataaaatagataaattgaatttcctaattataaaaaattgtgagttaaaggagattatcagccggacccaatggctcatgcctgtaatcccagcactttgggaggccaaggcaggcagatcacttgaagtcaggaatccgagaccagcctggccaacatggtgaaaccccgtatctactaaaaatatgaaaattagccaggcatggtggcgcacgcctctaatcccagctactcagaaggctgaggcaagagaatttcttgaatccaggaggcggaggttgcagtgagctgagatcgcaccactgcactccagcctgggtgacagagcaagactccatctcaaaataagtaagtaagtaaataaataagattatcaagaaagtgaaaagacaacccacaaaatggaagaaaatatttgcaaattacatatctaataagactatattattaagaatatatagagaactcctacaactcagcaacaacaacaagaaaaatcacaattaaaatacaagcaaaagacttgggaagacttctctccaaagaagatatacaaatgcccagtatgcacatgaaataatgtgctttggccaggatgtggagaaattgtaatcaaatttcttgctggtaggaatgtaaaatggtatcaccactgtggaaccgttgcagttcctcaaaaagttaaatatagaattaccatatgacctaacagttctactccacttctaggtagctacccaacagaagtgaaacaagaactcaagatatacagtatttgtccaccaatgttcatagcagcattattcacaatagccaaacagtggaaacccaagtattcatcaagagatcaatggataaacaaaatgtactataaacatacagtggactattatttaccattaaaaggaatgaagttctgatacatgatacaacatagatgaactttgaaaacgtcacactaagtgaaataagcagacagcaaaggacaaatattgtgttattccacttatgtgaggtatctggaataggcaaattcacagagacagaaagtaagatacaggtttctagggccaggagggaggagaaaatggggagtttttgtttaatgggtacagagtttccatatgggctgatggaagtgttctggaaatagaagtggtagctattcaacattatgaatgtacttaatgccactgaattgtacacttttcacatgattaaaatggtaaattttacattatattttaaaacacatttgtcaaaaatttatacataatgatttggatatataaattatgtatttttaaaacaagggaatatgaagaaatgaaaaaattattgaattatggtgtgaatatttttagtagaagtaaagctgaaataaaagagtttaacttttagctaagtgtttccattttaaaaagatatattttatgtcatatagcttttcagaccaagacaaatactaagaaaatttaagtttatgcattctcaaaattgctattaatattttatttaaaattttttcagccaggcgaggtggctcacacccgtagtccccgcactttgggaggctgaggtgggcgatcacctgaggtcaggagttcaagaccagcctggccaacatggtgaaaccccatctctactaaaattacaaaaattagtggggcatggtagcaggcacctgtaatcccagctactcggaaagctgaggcaggagaatcacttgaacctggaaggcggaggttgcagtgagccgagatcgcgccactgcactctagcctgggcgacagagcgagactgtctcaaaaaaaagaaaacaaaaaaaattattgtttatagttgctattaagaatagctatattgattcactcttaaaaccttcaaatttacacaggaaaagcttttcagaataattcatgtcaaaggaatttctgtactatatttgtgctagagcattttgaatgattttattttgttgtcacattttctagattttaatgaaacctgtgtttctttagcttgacagagccaattcgctattaaaccagactcaacagccttacaggtatctcattgaatcagtgcgtcagagagattctaagattgattcactgacggaatctattgcacaacttgagaaagatgtcaggtaaaccatctacaaatcttttatttgaataataaagacattgttaccatattgctgctgtaggtgaatttgggttgtaaatcatgaacagaaaatttaaataatgaaggtgtcttaaatgtaatgaatattaaacttttcttagaaaaactaaggtcacatcacatcaggtgttcacattccacctgtgatcagatgtcttagcatggaaataacaatgttacacttatgagcataacattccatctatcctagaggacacaaccgctattggtccttgtttccctagaactctttagtgtggtgtagactgaccagagggagaggaggaataaaaccagatgccatttgtgtcgttaaaatggctttttaaacaacaacaacaaaaaatttacatttacttagatttatgttgatttttccaaggaatttttaggcttttcttctgaccttttacatgaaagtaacttttaagtgtaaataaataaatttctttcacttccttaatttgtaattgtttctgtatgagatcttatccaaaaaaaatttgctatgaccagtttggttttttaaactgaaattaaagaatgaagatatgtgtaaatgaaacagttttacttgtggatagatggttagtttgcttagttactagatttccaagattataagaataatttagatttttatgggtaaattattaactgattatcaatgtaaaagcagagaattaagtgggaatagaaatggttaaatcaaggaattggaaaacaataaggagaagatggttgttaaatccaggtttcttaaagtatgcaaacaaaaatataaacctattggtaactaattccaaagtataaatgttatttttaatgaatcacagtaattaccttctttcatttctaccccaccaaaataattggtctagaactttattcctgttcttaattttttatgatttgtttaaataatttaggagcacatttataccttaaatgtgtcaaaataaataagtttgtttctagattaattttaaagttaaaaattctgtatacaacctacaataataaattaattgttctataaatagttcttggggacaatagaaattatgtctttcacaattcactgggcacctgattatcttagggaaattgaagaaagaaccccaaatagaattttttcctcctatgttacatatttctgttaaatttgaatattttttggccaggcgcagtggctcacacctgtaatcccagcactttgggaggctgaggcaggcagatcacctgaggtcaggaattctagaccagcctggccaacatagtgaaaccctgtctcgactacaaatacaaaagttagctgagcatggtgatgcatgcctgtagtcccagccactctggaggctgagacaggagaatcgcttgaaccggggagacggaggttgcagtgagctgagatcatttcactgcactccagcttgggcaacagagtgagactctgtctcaaaaaaattaaaattaaaattaaattttgaatcttttttttttttttgaaacggagtctcactgtcacccaggctggagtgcaatgatgtgatctctgctcactataacctctgcctcccgggttcaagtgattctcctgcctcagcctcctgagtagctaggattacaggcacacgctgccacgcccagctaatttttgtatttttagtggagacagggtttcaccatgttggtcaggctggtcttgaactcctgacctcatgatctgccctcctcggcctcctgaagtgctaggattaaaggcatgagacaccatgcccggccttaaaatttgaatcttttatatgtcttattttaccattatttcttgtgatgaggaggtatataaaaatcctgaggaaaaaaattactcctttcacagttatctccaaacaaatttatttgattatttattttactaagaattaaggtagcttaaaatgtttaatatagagaaaataatagctagctgtaggagaaaattataaagatgaacaaattcagccacagagaaattaagcaacttgtcctctaagaacatgcaacattgtgatagagtaagaattcaattttatatctgtctgcttgctaattctattctcctaaccattaggttatactgcccctctatgttctattctgaataagggataatatttctttagctaaaataattaaggaagagaacaaaaaagtagtgtatcatagtgattaaaagtagcactttaatgagttgatcgttgttgaagcggggtgatagatatatcagggtttgctattacatattttctcttctgaaatattctataataaaattttttaaaaaacagattttaaaaggaagttttcaaattcaactcagtacttagttttgagttagggcaagtaatttaaactctctaatacctctgttgtccaatagaactttctataatgataaaaatattccatatctggctgggcacggtagctcaagtctgtaatcccagcactttgggaggccgaggcgggcggatcacgaggtcaggagatcgagaccatcctggctaacacggtgaaaccctgtctctactaaaaatacaaaaattagccgggcgtagtggcgggcgcctgtagtcccagctactcgggaggctgaggcaggagaatggcgtgaacctgggaggcagagcttgcagtgagccgagattgcgccactgcactccaacctgggcgacagagccagactccgtctccaaaaaaagaaaaattctacatcagtgctgtccagtatggtagccactagctagccacatatagatgttgagcatttgttttggggttttgttgttgttgttgttgttgttcttttttttcttttcttttctttgagacggagtttcactcttgtcacccagactggagtgcaatggcgcgatctcggctcactgcaacctccacctcccaggttcaagcgattctcctgtctcagcctcccgagtagctgggataacaagcacccaccaccacagccggctaatttttgtgtttttagtaaagatgaggtttcaccctgttagccagggtgttcttgaactcctgacctcaaatgatccgctggccttggcctcccaaagtgctgggattacaggcatgagccaccacacccaacctgagcatttgaaatgtggctactgttactgaggaactaaatttttaattctattaaaattaaattgtttaaattatctttaattttatttttaattttattaaaattaaagataattttaattgccctagtggccaatggctgtggtattgcacagtacagccagtttcctcatatgtgaaatgagagtggtgccgaggcagacagattgcctgagcccaggagttcgagaccagcctggacaacatggcaaaaccatgtttggttttgtctctacaaaaaatacagaaaaatttgccagtgtgatggcacgcttctgtagtcctggctactcaggaggctgaggtgggaggatgagttgagcctgggaggtggaggttgcaatgagcaactgcactccagcctgggtgacaaagcaaaactctgtctcaaaaaaaaaataaaaataaaaataatgagagtggtcctaacagcacccgattgatagggttgttctgaggaataaatgatataatcttcataatatacacagatataatagtgcctaaacattatattcaacagtgttcaataaatgtttgccattcttagtacttaccatacatgtaacaaatttttggttgaaaattatattaaaaatgagaaataacatttctcaaaatatgttgaatttcaacaaaaattaagactcccttaataacagcaacggttttcataaaggccatgtcatttatggaattaattaccaagaaaaattttgtactaaacatgagtcctttaatgttgtcttgtgtttcataaattaattgtgtgatattttagtacattctgaactgataattcacaggatatgaaatcttattcttaattgaagcaactaccttctaaagtgaaaagttattaatactttcagtagtttaattacaacacttgagatgttgctataggtgtaccctggtgacatgaatgaaatgctgtgatgtaacaatgccattaaaaagtcagctcagccagtaattcagatatggtaggatagatcacagttctgtatacccacattccttcatccctactcgaagcaaatggcatttcaaatcctagagtggaattatcctgggctttaaatacacatcaggctggtttctctccttatggtaaatgtgtctgtaaaattagatattaatatgaacccgaaggggtagttgtgaaaattaaatttaggggcatatataaagctttggcatgtaggagaatctcagtaaatgttacttccctccccttgtcttttatttgaaatttaaacattaatgatggcccatccaaaagcgttatcaagttattatgttccttagaaaacataaacaggaaaattcctattcctcattgctaggtgttgatgttagttgtaaaaatatttacatcaattgatgatttttaaatgtttttctaattcaataaaaactctttgaagaactgaataattgtatgcttttcttagaaaattaaacaataccactataccatacttaccccttgaaaatcaactatttatacaatatattcaatttctagaaaggctagagtaaatattcactaaaatgaaatcatcataaacacattaaaagctaacatttgagatgtcactattaactgctttaaattctcctatcattaaagtaatactttattataaaaatagtactgttaactttcttccaccaagccacaagagacactctgcgtaatacagtttgatctctacttcagaaaggaaggaagcttggaaagagaataattagcataattttctttgcctgttgtcagttctcagtttattcttaactggtagttaaagataagactacattgccaacttcccttacaaagctatcccagagtgtattgatccaggaagttaaggaacaatatatcaggaatgttttcgtattgcaggtgaaacagagccataaacatgaatttctaagtaataattaacagtgaatttaacaattatgggtgtaatataccattcaagatagatgtgcttacaaggagatttgttttgtagttgttttatgagtcactcatagaagctttgtattttcaaaggtaagtttccactgttatgaaatatgttttatgaagactaaaattctattgagtaaatacatactagaagaagagtgaatataataatcatcatattcagttttagagacccacatgttaaaggttgtctccctgtggttcgagtatattataaagaagacaaaatatatgcccagatattgtaatcacagcaatattgtctgggaagtccacattgtttgtaataaactcatgtcttacaggtgcaacataattgttctgtaagccagtttatccccccaccatttattccatgtatatacggttgttttgctatttaattatagaatactttatttttgaaaagttaaaacacgacaatataaaagcatttgtaaagaattatccagtcaaaatcctttaattacctcgacattccattccgattacactacatattctttagaagagccagttggtatttgaaacagagagtgagtgtgtgtgtgtgtgtgtgtgtgtgtgtgtgtgtgtgtgtatgcactgaatgtgagtatatgcttatataccgtggttataagtgtatacatgtatatgaacatagacacatacatgttccttaaaagttcctagtcctatttactggatatttaaatttgaaaaatattttgccttcaaagtgattccagctaaagaggtggttagaattctagagttagagaaacatgtgatccttaccatgctttggagactctagcagaacatggcactcagtttcctttatactgttttgttcttttcaactcctcagctcttgtgggatctctggcgcctaactctaaaagtcagtttgtttttcagctgagctgcttacctttattggcatttaattactgttttactctgatgcctatttttttatctaaattagtaacactgtataacatttatatagttttatgagttcaacactttatataatcattcacatagtcctttgacatacatgagtattatgttctacttttacagatataaaaactgaggttcagtggggtggtatgtgttatgctttacagcacacatttgagtctgagtcagtggcacagttgggaacagaagtcaaaattgcatctagtccgtctcctcagaggacaaactatgatgcttccttctcgattacttggaaggagaagaatgtgggctttccctcttaagtcctttgaattagcagttgctgcagattgcctactactgtttcttgaattaaaaaaaaaaaaagtctgccaaatattattctaaagattagtggctttcatttatttatttatttatttatttatttatttatttatttattttttgagagagcctcactctgtctcccaggctggaatacagtggagcatcatagctcactgcagcctcaaactcctgggctcgagcgatcctcctacctcatgctttgatgtagctgggactaaaggtgcatgtctccacacctggctaacattttttttttaagagatgggggtctctctgtgttgcccagactaggctcgaactcctgggctcatgcagttctccaacctcgatctcccaaagtgctaggattacaggcatgagccagtgtgccctgcctccattttcttaaagtagaacttaagtagaactttaaaaatgtttttaccggccaggtgcggtggctcacgcctataatcccagcacttcgggaggccgaggtgggcagatcacgtgaggtcaggaattcgagaccagcctggccagcatggtgaaaccccatctctactaaaaatacaaaaattagccgggcatggtggcacacacctgtagtcccagccactcagacagctgaggcagaaaaatgagttgaacccaggaggcagaggttgcagtgagccgagatcgcgccactgcactccagcctgggtgacagagcgagactccgtctcaaaaaaaaaaaaaaatgtttttacctatttaaaacaattcttgttagttttaccctcacaaattttgtcttttttattgtaatcattcattagataattgccaccatgccaggccagaaattgaaaatcaaactaataatttggagacaaacgttcttttttcaagtttatcacagactaaatacctgattcacttacttaactcaattatatacctgataatttagtttgtaaaatattactttcagttttaaggatgttttaatttgtcttctagtatcttgtgttgtaatagtttgctgacatagtacttcttaccttttatgtgagtttctttatctttttacattttagtagtaaatagtcatctttaaaacattaattttatgcctatactaggcaggaaattattctcagacagcatctcagttacgttgtcaaatggattcttaagagaagaaaagctgggtgcagtgatgtatgcctgtagtcccagatacttaggagactgaagcaggaagattgcttgagcccaggagtttgaggctgtagttcattgttaccatgtctgtgagtagccactgcactccagcctgggcaacacagcaagactccatctctttaaaaaaaagagaaagagaaagaaaagaggagagggaagaaagaaaagaaaaaagaaaggaaaagaaaagaggagagggaagaaagaaaagaaaaaagaaaggaaaagaaaagaaaaagatcttctgacaaaataggccattcattgggccaaacattttagtggctggtctggaatatttatggactataaatttatctttagttcaaaccatcagattcatgtttattcttttaatatttaccatttattaactatatttatactaacataatgactttttaaaactggggttttttttttcagcaacttaaataaagaaaagtcagctttactacagacgaagaatcaaatggcattagatttagaacaacttctaaatcatcgtgaggtatttttcctattttgtcataattgtaatcattttaggcttttttaaaaactgctatcaggttaaaattattggatcccagttgtgcatgttcattaatgacttctcttatttatgtctcactgtaattttgtccttttttattcaacttttgatatacttcttagagttaattcttattcctagaataaccccttcttgttgtgttgatatctgtcactgaatttccccatattatttaataataatctgttttatcttattctgcaactagacagttaatttccttagtgtgcctctcgtcttctttatcaatgtatgcccagtgcctgtagtgtagataatttgtgttgagctttaaagttcataaaattattttcttttcttcatttgttccctaccaaaattcttttagagtaaatataattcctattttatagatggagaaatgagttttaagtggcttgcccatggcagttagtaactaagagataagttctgttttgttttgtttttttcctttaaggtttattgagttataatctacaaagaataaaattaaccttttttagcagacatgtctgtgatttttgacaaatgcacacagttgtgtcagcaccaccacaatcaatatatagaatagttctattactccacaaaattccctcattacccctttttagctgacccttttcctcaacccccagccctatcaaccacgggtgtattttctgtaactattgtttaccttttacaaaatgctataaaagtgaaattatcagtatatagccttttgagtctggcttttctcagttacaataatacatttgcaattcatatatattgttgcaatacagatgtataatatattgacctcaagtgatccgcctgcatcagcctcccaaagtgctgggattacaggtgtgagcctgtacatacatctacattagtcatatgtttcctttttattgctgagtaataagccattatatggatgtaacccagtttgttaattcattcacagtttatggacatttgagttgtttccatttgaggacatctccgaataaaatatctgtaaacaattaatgtacacattttaatataaacaaaagtttccatttctcttgggtaaatacccaggaacatgattactgcattgtatggcaggtgtatgtttaagtttataagcaactgtcaaaattttccaaagttactatacttttgcattccccctctacgatgaatgagagttccagtttctctgcatcgtcaccaaccattggtatttttaacacaaagccttttttctactgaactatcactgcctcatcttagccatctttttaccattttgttattctaatagaaaaagaaacttttttttttttttttttggagacaggatcttgctctgtcacccaggctggagtgcagtggcatgatctcggctcacggcaacctctgccttccgagttcaagcgaatctcttggcttaacctcctgagtacccgggattacaggtgcatgccaccatgccatctaacttttgtgtttttaatagagactgggtttcggcatggttggccaggctgatcttaaactcctgacctcaagtgatctgcccgcctcaatcctcaaagtgctgggattacaggtgtgagccaccgcgcccgaccagaaaacaaaacatttaaaacatatcattggtttatgagtatcctgatactagtctgggagaggtataccagatgttgggaagaaattattgggagaatattgttgagagaggggaactggaaactattactggaagcagttcaaaggtacgtatcctagagatggtgtcagaagaattggaggattgtctgtatctgagaaatggcattggagtgagttctcttaaaggtgtcttctatgtgatgggtgaaaaggatgagaaagtgtcccaggactagattgtaatgataacatttaggaaggtaagtcaatctaacaacaggttacagagctaggaaaagcttctctgaagatatttattctttcttctgagttcggacattctagaccttatccatcaccgctgctgtcacttatgtcctaggattctgctttcaagtaattgtttcttcactgtggaaacctgattcattcactatgtggaattttcgcaagtgtttttgaaattaaatatttaagagtagtaactacagatgaccattcagccatatcaactacatttttttaaagctagatattaatttttttttcagaatggcaattctcatttgattttaaggggatgtgctacactgaaaaatatatgagcagttccaacacttggaatcacattactcatgagtccaaataaaaaccaaaaaactttgcgtggtggattgagaagaaaatacatttaagcatgcaaattaaattctagcagagctgggcacagtgtcacacacctgtagtcccaggtactctggaggctaaggcaggaggatcacttgagcacaggagtttgagactatagtgcactctgatctcacctgtgaatagccactgcactccagcctgagcaatgtagtgcaaccctatcttttaaaaaagaaagaaagagaaagagggagggagggttagagggaaggagaggaagaagaagaaggaagaaaggaagcgaaggaggggagggaaggagggagaaatttaaacactagcaagatgaaactactcattaattgcctactactacatgttattactggtatttgtatggatgcatatttagataattgtcagtttttatgtatttgacagtatatctttattttggcaagtatgttttaataatttaacattgtatagcttttgatgataccaaacatctaaagaaaagcaactttttttgttttaaagcaaagtaaaaattaaagcttagtaaaacaaatctaatgttattaatcattttctaagaaaccatttactaccaacttacatcatatatacacatgcaaaggcctccgcaaattgcatatatggaaagaaaacagctggtgtgaccccctagaaatgcttggccattcacttgaacatttacctgatgaaacaggattgatttattcacttgattgttcagaggatcatgtcctcataatagtcaatagataacattggttaagaataattctgatttttttttgaaaatgaaaatcagggctgggactagggtgaggcaagcaaggcatctaggacacatgatgtaaggaggtgcctactctcagagtgggcaaagaacatggacggcccctgggagccactgcttctttacctaaggccgctagcttgtctcaccctggtcaataccctgggaaaattatctgataccagtctggttttaatcagttaaatttggacagtgtaaatgagtgattcaaaaagagaccaaatgaactttttaaagtttcttattttcttttttgcattggacagctcttgctttaatgttgtgttgttttgttttgttttgttttgtcttgttttgttttgagatggagtcttgctctgtcacccaggctggagtgcagtggcgctatttcggctcagcgcaacctccacctccctggttcaagcaattcccctgcctcagccccccaagtagctgggattaacaggcgcacgccaccacacctggctaatttttttgtatttttagtagagatggggtttcaccacgttggctagactggtctcaaactcctgacctcaggcaatccacctgcctcagcctcccaaagtgctgggattacaggcatgagccactgcacccagcctagctctaactttttttagcagtgtcacttagttctgattaggctgtatgtgttcatgtaatgtgaagtaagatcaccagttcatttacataattccaaaatatgtgttaaacagaaaaagcaagtaggacaattctaggttgacaattcagaaacatttggggcatgaccacagagagtttttattttctatattagtgttagctcaaaaatattagcttaaaagtatcttctctcatgttaagagttagggtgtggtgtgacaatttccaggaatgtgtattgatctcttacaattgagtatttcttgaactatgagtggaatattaggtgatgtttagtcctaactttttttgcgagaaaatatattcaacaactaatttcagaatgatataacgtgaagagcaggtggccgtagagagaaataggatattttaggttgacttttcagactacaaagctcaactgggttgggtaaatatattaggttaaaggatttacacaacaaatactaacttaaaaatgtgcataaattgaattgagagcttatacctgcccacacttctccattctaaattctccaggttttgtccctatattcagtaaaatgttcataaagcagagggggaaagggcaaaatatctctcctcacagaatttattttattaaagaacagtttaatgtcatgccttctgcttttgtagaagatcaaaacaaagtgtgatctctcttggttttgtaaaactaaggcagtctactaagtacatccacataaatgacataatctaatctttactacagtccactgataaatatcattgtcctcattgttagagatgaaactgatgctgataagagttaaataactcaactgtgattacgtagtcaaaactaaaagtaattcattttttccctgaaacaaaactaaggttctttttccttagtctcatttagacagaaaaaaactcatgatgaattattgcgtatattccaggaaaatttttgcctctgggcatgaagttatattcctctttctttttttcataaaatgaaaactttgtaatttaatgtgtttcctttttgtcttcattgccagaaaactcagagctgaatatcttatccaggtgttataatcttttttttcctctttcacttttgatacctcagaataactttatctgtttccttcaggtgggttgtaatctatcttactctaaaatgtcttcacttgtactcggattaagacctcttaggtgtaaataaaatataaacctaaataattagatattgaaaagaggtaaaaggaaaagataaactgataggaactcacttttagataacagtagcaggacttcaaataaaacattcattttgaaaagatttgagtataagaaatgtgatttcaggcccgatgcagtggttcacacttgtaatcccagcactcaaaaaggccaaggtgggaggaacgcttgaggctaggtgttcagcaccagcctggacaacctaggaagacctcatcttcacaaaaaaatcaaaatttagctgggcatggtggtgcacatctgtgttcccagctactggggaagtcgaagcagaaagatagcttgagcccaggaggttaaggctgcagtgaatcataatcacaccactgccctccagcttgggtgacagcaacactgtcttttagaaaaagagaaatgtgactccttaaaatggcttctttcttgagcttatcactcagtaatcgtcattaattgcatttagttttcatctgtttttatccactcatctttgccttaacgaaacaagatttactgatcacctttggaaattctaattctgcttttctttgtatatattttatccacgtgtccttagaatataagcttttgagagtaggaaaagtatctttcatcagccaaatgcctaatagaatactgagctcagtcgttagaagctgatgtagaagcccttttctcatggctcttggagctgtagaagggcagtgggaagaacacctcttaggaagctattccagtatttcagtgagtgaaggtggtgtcttgaactagattggtgatgatgaggtgaaacaaaaatggaccgatttgaaagctatttaagaagcataattggccgggcgtggtggctcaagcctgtaatcccagcactttcggaggccgaggcgggcagatcacaagatcaggagatcgagaccatcctggctaacacagtgaaacctgtccctactaaaaatagaaaaatttagccaggcatggtggtgggcgcctgtagttccagctactcgggaggctgaggcaggagaatggcatgaacccgggaggcgaaggttgcagtgagctgagattgtgccactgcactgcagccttggcaacgacagagcaagactctgtctcaaaaaaagaaaaaagaaaattaagaagcataatcacggtccttggtgatttgagtacattagggactgatgaagagaggagggatgagaattgatgcctaggtttttggcttgtgtctttagtggtgctacaaagaacctagaagaaagaggtttggggaagaaaagttcaagaaaatatctaagtggatatatacactagagagttggaaatgtaggttcttgtgcccaagaaagagaattcatctgttaatagaaatttgaaagtcacaacataaagatgttactttacatggaaatagagtaaatgaactagtgagactatatagagtaagaacagaaaaaggcctgtgacagaatcttaatgagtaccagcatttaagggaagggcataggaaaaagtgcttacacaaagaagagtgaagagtgaccagcatcagtgatgagcatcaggaagagagtagagtccctaaagcccagggagaaccattcataacagagccagttgtacgcagtgacgtgctctcaagaggtcaggccaaagaaagatttttaaaaaagagtcatttggatttaataagatgctaaagggccggcacggtggctcatgcctgtaatcccagcacttgaggaggctgaggcagacagatcacttgagctcaggagttcaagaccagcctggccaacatggcgaaaccccatctctacaaaagatacataaattagccaggcctgggggcatgcacctgtagtcccagctacttgggaggctgaggtgggaggatctgggagaattgcttgagcccaggaggtggaggttgcagtgagccaagatagtaccactgcactccaccctgggtgacagagtcagagccctatctccaaaaaaaaaaaagaaaaagaaaaagatgctaaagcagtttcaatggagctggagctaaaaagcagataccagtgaaaaataggcaatccttagaatatttgaagaagaaaagataggacaattgaggaaggggcatgagatcaagagcttttgctgagccaggcacggtggctcacgcttgtaattccaacactttgggaggcggaagtgggtggatcccttgaggccaggagttcgagaccagcctggccaacatggtgaaaccccgtctctactaaaaacacaaaaattcgccgggcgtggtggcagacacccgtagtcccagctactcgggagcctgcggcaggagaatcacttgaacccaggaggtggaggttggaggttgcagtgaactgagatcatgccactgcactccagcctgggtgacagagcaagactctgtctcaaaaaaaataaaataaaataaaataaataaataaataaaataaaaataaaaaaaagcttttgcctctcaaagctagagattacacaatttaaatggtgacaggaagaagcaaaatagacattaaaagtacacaaaagaaagagataatcaattgagcaaaagtgataggaaaggagatccatagcagagtcatgggaatcagctttagaccaccagtgttaccttttccattttgaagaataaaaaaaagaattatgtgaaaatagaagtaagtttataggtttagtggtaagtatttagagagttcccatctaatggatgttttctaatagaaagagatgtggtacagtcagtgttttgagaaaaatgaattttgaagtagctgtgtaataaatgaatgatgtacataaaagaattgccaagttgaaatgttatgtacttatagtagtaccattctgtgtaatttttctttagcagcacttagcaccccaggtgtaaacatagaagatggaaactagactgatccagaattacattctactttctactatatgtacatataaatatgttcaactctctcattaaattgtaagactggcattacctttatattccttacatcttctacattttgaaatactatggaaaaagccagcagtcagacagacaagacttgtattcatatcccagctctgctacttaatagcagtgcatttttgagacaataatttcacccctctaaactcagttatctcatctgtaaataaaggtaatatctactttgcaaggttctgtgagaattaatatagcagtgttcctggaatataacagaactcaatgaatgtagttccctttcctcatttccttctgtgtcaagggtctttttaaatattatctatcatttgagactgggcacggtggctcctacctgtacccagcacttaggaaggccaaggcaggcagatcgcttgagctcaagagttcaagatcagcctgggcaacatggtgaaactgtctctacaaaaaatatgaaaattatccagggatggtggcacatgtctgtagtcccagcttctcaggaagctgaggtgagaggattgcttgggcctgagaggttgaggctgcagtgagcagtgatcgtgccactacagtccagcctgggtaacagagctagaccctatctaaaaaaacacaaaaaataaaaataaaaaaatattatctatcctttgaagccctccctacctcaacaaagaaaaacatacccttttctacctcattcctataactttttaaatatttctgttaatgttcatattactatgtaattaagcatctgtcttacccattagattgacaaattcctttttgtactttagcctttagcacaatatttagcagataataagtactcattcagatgtttcttaaactaatggttcttttcaatcttcaataatataaagctgtcaaatagaaagctttagaaactgtcatcaaaaaataagtgtcactctgatactgaaatattttagctgaagaaagcacagaagctctcctgtatccaaggacaattttagatactactactgaaattttacttacatactacttttacatacaattttagatacatactactgaaagtaggccataggaagtcatatcccaaaggtttgtctacaggagagctacttcctaaaaccttggagatggtagttgtaggcacagcaacctctatggttatcacacttatacagaatcatatatatttgtggaatataaaacatctgttttggctgggcagggtagctcaggcctctgatcccatcactttgggaggccaaggtgggaggattacttgagtctaggaatttgagaccagcctgggcaacacagcaagacccctagcatggtggcacaaacctgtagtaccagctactcggttggctgttgtgggaggatcctttaagcccaggaggtcaaggctgcagtgagtcatgattgcaccactgcactccagcctgggcaacagagcgagactgtatcaaagaaaaaagaaaaatttgtttctgagacctgggatatcttctatcctctcattgcagtgtttttgccaataacacttctcagggcccacagtcatttcagttagtatttaaccagaattaatcaaccactccttactaagtacttagaatgtacaaggccccacacttacctgaacattggactaattcttattatcctggataactttcttcttacagcagtgtatgtcagataatgaaaagaaaacaaaccctgcagttagccaggtttcttgaaagtgaaatcacagtataattatcattcttttatggtatgtttgtgttcccagattctaactcatatgttctttgcgatttctcggaagatttcagggacatttcagcatcccaagtgccccttaggcaatccacttcataagaagttccaacaaattgcatttttctttatgtgtgtcactctttcggttcatacttaactgttttgaaattttcttaggagtatctttttacatgtttttcttatgcacctatgtagttaaattttacagtcagcatgctaaaaaaaaactactgagcgggtaaattaatttttctttaaatgaaaatatacttgtttctcagattcacacatacatttctcatcatagtggtgctcttcaagttaaactgttttcgatttgttggatataaatgagtgtttttaaagagaaagataattattatagtgaaaaccaaaaacacatgtatgatacaagtcatattttccctataaagttttagaaagattttttttttccatgtaagggtgtgtgacttcaggtctgaagaaatttagggactaaaatgttgcaaaaaatactgcaaatgttgaatttacacacatactttatgagaaagctaaagctattgtattaacagtgagaatatatcttgaatttttataatctttttctatcaaactctaaaatgctttcagatgaattatgttatactaccctacttaggaaccagttacaaattactttcaagtaagtgtatctgggaatgaggaatcagagaaaggaaaagttttaaattagtcttctctgctgagaattggccttttgcttatgttttctaggattcaagagggaattaggctttttacccaaaatacatacttttcagtaaataataagtgtgtttaatattgatatattatcttgtagttttttatattcatttattttatttaagcctcacaacagctcattcttacacccatttcacagaggcaacaactgaatcacagttgttcattctgtaaaatgttaattctcctcagttttgagttgtgtaaaagacatttgaatttcctttagattgtactctctggaccactgtgtttatataggcttgtatagaacctaatagaactatgtcaaaattgttttggtttttgtaagtattttgatttcttctttaatcttttcattatcttcttttaaattataaatatctttgttgtatcctacaagtcagttcagtcttgtgtgacccaatatattaatatctcatcataaaaatattttatctgtgcatatatacccttttaattttttatatcacattttcacatctattatgtaacatatagacctagcaatttttaggtttctttttttaagaatgaaatgtgtattttcccactgcattttagaagcttgtgatatgttttcggttaaattaaaagtacatttctctgacctttttttgtcagtaaggagcaagtaaatgacttctcttgctatcatttctaaccctgtgcttatatgactatcttagaatagtagcagcttataacaaaccaaacaattctgagacataaggagacacacacacaaaaaaaaactacaaaactgtaaaatctctgaaactgtataatctctgaaaatatttggtggccaggccgggcgcagtggctcacgcctgtaatcccaacacttcgggaggccgaagcagggggatcacgaggtcaggagatcaagaccatcctggctaacacggtgaaaccctgtctctactaaaaatacaaaaaaaaaaaaaaaaaaaaaagccagggcggtggcgggtgccttgtagtcccagctacttgggaggctgaggcaggagaatggctgaacccgggaggcagagcttgcagtgcagtgagccaagatcacactactgcactccagcgtgggcaacagggtgagactccgtctcaaaaaacagaaaaagaaaaagaaaatatttggtggccaggagacaatattaacaattatatgagataattatagtcataattctgttagacaccatattggcaatatcttgttgtaaacttaagtcactgatcccgtatcaaggagctgacactaagagaaggctggaatacaacatggagaaggtacaggcactggagtgagtcatactctgaaaaccagtgctctaagtggaggatagggtttaaagtctgaagttgatgctgaaaatcaacaagaatatgcaacaaaacccatcaaacactactgaaatagtaaaggccagggtccagcacagtgggtcacacctataatcccaggactttgggaggctgaggcagaaggattgcttggagcccaggagttgtgtactagcctggtcaacataatgagactccatctctagaaaaaaaaattttttaaaataaataattagctagatgtggtggctcgtgcctatagtcccagcttcatgggaggctgaggtgggaggaccacttgaccccgggacttcaaggctgtagtgagctgtgcttgcaccactgcactccagcctgggcaagagtgagaccctatctcaaaaacaaaacaaaaaagaaggaaaaaaaaattttgatgaaaaagttaagaccagaaactagacagcagccagatgactactgttaatagaagggaaagcaattgcacttggtcacaaagccaggcatcaagaaaacatgaatgtcagaaagcagagtggggaaagtagtgagaagtccagggtaatcagtaatgagatgcacaaaagggtctgagcaaaccaatcagaatagaattaaggttcccacactcctgttttaagtcaacaatagcagtagattttaattcaggaacctacttcagtgtgttaataatagcttcttatctggatcactgttgagaattaccctaagatcatatccatgattgtgaaagaatgtttcaggtgattagttatgtcccggaggctgtaacagcccaattgtctctcatttgctatcattcgtataaaagcatgagctctcactaagccttcagtcatagatagggtatagctccaaaaatgtttctgtcatctttttttttttttttttttttttttgagacagagtctcgctctgtcgcccaggccggactgcggactgcagtggcgcaatctcggctcactgcaagctccgcttcccgggttcacgccattctcctgcctcagcctcccgagtagctgggactacaggcgcccgccaccgcgcccggctaatttttttgtatttttagtagagacagggtttcaccttgttagccaggatggtctcgatctcctgacctcctgatccacctgcctcggcctcccaaagtgctgggattacaggcgtgagccaccgcgcccggcctctgtcatcttaaatgtattagaataagaagtagataaacctgctctgctctagtcagtacttctttctttattctgttctaggcccaaaaattttcaatgtaaggaaaacaggatgatgaaagaattcttttcagtcataagagagatgaatgaaactggggatgtttagagaagataagacttagtgaaagataagaaattcaaagtaggcacgtaaaacaggcagtaagagatttgttacacatgtctccaaagtccagaattaaaccaaaggctagatgctatgaggagacacatcctgttttgttgttctacttttttttttttttctttttgaaacgggagtgttttggttttatagttgagtaaggaaaacctagattaatacctaatgtgtcttcatttttaaagcctgggctaggtggccatatagtcagaggggatttcttaattgtatagagagactgggctaaataacttgaagatctcttccaaacctgaaattgtgtgtatcacagacattgatggaaggcatctgcattattgtataatgatagctttgaccccagaaaggccttacttaatttgaatgctgtttcacttcttagtagctaaatgaacatggttaattttcttgagccttctttttatttatttatttttatttagaatttttttattttcctttgttgtttttttttttgagaaggggtcttgctatgttgcccaggctggtctcaaactcctggactcaagcaatccacctgccttggcctcccaaagtgctgggattataagcatgagccaccatgcctggccttcttgagttttttttattttttgtaatttatttatttatttatttatttttttttttttttttttttgaggcagagtctcgctctgtcgccagactggagtgcagtggtgtgatctcggctcactgcaacctccgccccccgggtttatgtgattctcctgcctcagcctcccaagtaactgggactacaggcgcatgccaccaggcccggctaatttttgtatttttagtagagacggggtttcaccatgctggccaggatggtctcaatctcttgacctcgtgatccacccgcctctgcctcctaaaatgctgagattacaggcatgagccaccgcacctggcccttcttgagtctttgaagcctcagtttcttctcttcaaaattaaagtaatatctacttcttggtatttgagtgtgaattaaattattatgtaagatactcagcacaaagcctggtacattgtagatactcagtgaacattcacttctgtcccctctcttcctccctccagacctaaaatttgtatatacttcttttgaggcaaagagacaatcccagggtgatgttaccctacaagtggaagcaagtatctagatagggagatcgaggggctgtagataacagcagtttgcagttgcagatattaatactattctacaatttgcagtacaaaatctgttttgtcctttatgtagtgtatagtggtattgcattcaaagtaactttttaaaaataatacattatatttgctttaatagtagtttaaaattcttgttgagcatttagagtgtagaatggatgactttgaattaaagttatattttcttttaaactatttttaatcatgttaaataggataatgatattttgctattttaaaaaatttttatctgttaaaaattcccactgaagtatttacaagtgaaattatctgaggctgggcacagtggttcacacccataatcccagcactttgggaggctgaggcgggcagattgcttgaggtcaggagttcaagaccaacctggccaacatggtgaaaccctgtctctactaaaaatacaaaaaattagccagaagtggtggcacacccttgtaatcccaggtactcaggaggctgaggcaggagaatcacttgaacccaggaggggaaggttgcactgagcggaaatcatgccactgcactccagcctgggtgacagagtgagtctccatctcaaaaaaaagaaaaagaaattatctgagatctggaatatgtgttaatatatatcagggggaaaatctggtaaggaaatagataaaacagtgttgacaaaacaatcctggtagttcctcaaacagttaaacatagagttacatacaacccagcagctctatgcccaggtatataaacaaaagaaattgaaacatatccacacaaaaatttacacacaaaacttttcactgtttcaaaatgtgtcagtgtttatgagtgcaacattattcatagtaaccaaaaagtggaaataacccagatgtccttcagctgatgagtaaacaaaatttggtatatccatgcagtggaatatgattttgccatgaaaggaagtactgatagatggtacaacatggatgaactttaaaaacattatactaagtgaaagaagccagtcacaaaaaaagcagacggtatatgattccactgatgtgaactgtctagaactgggaattctacaaggacaaaaagtagattgattagtgacagcttagaattagagtgatgggggcatggcaggataggagggtatagttaaagcaatcagagtttcttaggttttggtttgtttttgttttttgtttcttttgagatgatggaaatattttaaaattgactggtaattgttgcatgtgtctgtgaatatactaaaaaccattgaattatacacttcaaatggatgaactgtgtggtatgtgaattatatctcaggaacgctatttgagaaagaaaatattgacaaaatgttgataattgaagttgcgcagtggaaagtggggactcagtattctatcccctccatttttgtgtcattgaaaatttccgtcataaaatgctttattaaaaaatgcccgaccaggcactgaggctcatgcctgtaatctcagcactttgggaggctgacacaggtggatcacttgaggtcaggagttcgagatcagactggccaatatggtgaaactccgtgtacactaaaaatataaaaattagctgggcgtggtggtgcacacctgtagtctcagctactctggaggctgaggcaggagaatcatttgaacccaggagacagaggttgcagtgagctgagattgcaccactgcattccagcctgggcaacaaagcaagactctgtctcaaaaaaaaaaaaaaaaaaaaaaaatgccaggtacagtggctcacgcctgtaatcccagcactttgggaggccgaggcaggtggatcacctgagaccaggagttcgagaccagcctggccaacatggtgaaaaccccgtctctactaaaaatacaaaaattagccaggtatggtggtgtgcacctgtagtcccagctactcaggaggctgaggcaggagaatcgcttgaacttgggaggcagaggttgcagtgagccaagatcgtgccactacactccagcctgtgtgacagagcaagactccatctctccatctcaaaaaaaaaaaaaaaaaaccttttaaatgaagtttaaagctgggcatggtggctcacacctgtaataccagcactttggaaggccaaggtgggtggatcacccaaggtcaggagtttgagaccagcctggccaacttggtgaaaccccatctctactgaaaacacaaaaattagccaggtgtggtggcacatgcctgtaatcccagctactcaggagactgaggtaggagaatcgtttgaacccgggaggtggaggttgcagtgagccaagatcatgccactgcactccagcctgagtgacagagcgagactccatctcaaataaattaattaattaattttaaatatccaaaatatatatgtatttggtttaaaacaagactggtttttaccttgtgttacttcaagagagatgcacagagttatatgacttactagtcacgatgcgttgttactcccatatgaaagcacttccatttaccagtggagcacatagtttgcattatgcttgtcaaagctattttcatcaagaaatgctatctatgtgtctccttgccaacatctttgcagagtttacaactttcagcaatttattggcatcaactatgcaatactgttaagcagctgctgtacagctgagctgttttaatatgccaccacttatgcaaatagttaatattaaatggccaagatgcatgcttttggattcaaaagaacagtttatctctctcatagagattgtttatgcagtcgtcatcatcatcatcatcatctggaaatttcacaagaacatccttgcccttaactcttcaattttgaaaagtaattattatactgcaacatagtttttgttatttagtttttagttttagtccaagtttcagttgtataatcagatgcaattcttcatttgttaatgttaatgaatggttcgttcattcatatagtaatggtaattttattatgtatttgatatactagaattacaacatgtactgttaactttctgcaagttagtataaaagcatatcagattttatcagactacgttatagaatagtattgaaacgtttcagctggccagatttggtggctcacacctgtaatcccagcactttgggagcctgaggcaggtggatcacttgagcctaggaattcaagaccagcctgggcaacacacccccatctcaattttttttttttttttttagatggagtctcgctctgtcgcccaggctggagtgcagtggcacgatctcggctcactgcaacctccacctcccggattcatgccattctcctgcctcagcctcccgagtagttgggactacaggcgcccgccacctcgcctggctaattttttgtgtttttagtagagatggggtttcaccatgttagccaggatggtcttgatctcctgacctcgtgatccacccaccttggcctcccaaagtgctgggattacaggcgtcagccaccgtgcccagcccccgtctcaatttttttaaaactgtctcagctgggcacagtggctcacactttaaatcccagagctttggtaagccaagatgggaagatagcttaagctggggagtttgaggctgcagtgagctacagtcgcatcactgcagtccagcctggacataagagtgagaccctgtctcagtcaatcgatcaatcaatgtcttaaacaagtggtaaaaggaaaagaggattgagggaaggcacttttacagtttttgaattttacaatgaacaaataatatttctataaatttaaaacagaatttaaaaaatattttgaaaataactttctaaattaatgaagcatctgccaggcctaggctagaactgccagaatgaaacgaagctctagattagaatactctacattttgtcattttgagaagggagcttcctttctgcctgagaaccttagggtaaatcctgctacacaaattatcgcatccacgtacacagagattgtactcaatggtgtcattaagatgaatagccccactttgggatgccgaggcaggcagatcacttgaactcacaagtttgagaccagcctgcgcaacatggtgaaaccccatctccacaaaaatgaaagataaaaaaataaaaaaataattagccaggcatggtggtacatgcctggagttccagctgccaaggaggctgaggtgggaccattgcttgagcctgggaggcagaggtgagccaaaatcgcaccattgcactccagcctgggtgatagagccagaccttgtctcagaaaaaataaaaaaggccataaggcagaaagaaaacatgtgagctggtcctttattcataaatgggatcacacaaccaaaaactatcagaaactggaagaaaaagcatagaaggaaaaaaatagcaataaacagataaactgggggaaaaacaaattctggagcagaaaagaacttccacattgttataattaatttcttcagaaagatttggaaaagtaatatttccctaatataaaaatcagtaggccagatgcagtggctcacgcctgtaatccccacattttgagaggccaaggcaagtggattgcttgagtccagcctgggcaacatggcgaaaccccatttatacaaaaaaatacaaaaataattagccgggcatggttggtgcatgcctgtagacccagctactcaggaggctaaggtgggaggatcgcttgagcccaggaggcggaggttgtagtaagccaagattgtgccactgcactccagcctgggcgacagagcaagacctgtctccagaaaataaaaataaaaataaaaataaattgtgatattttgaagaattgcgaaagtcaaaatcatgaagtaaataaagtataagtaaaactgccaatagagggatataggaaaagttaaaccctccaaaaacttagaaaaaggtaaaaagatggaaagccaaaggacatagaagattctcgcaagaaagaaaatacctacaaggaaataaagaatcaggatggcatcctggctaacacagtgaaaccctgactctactaaaaatacaaaaaattaggtgggcatggtgacgggcgcctgtagtcccagctactcgggaggctgaggcaggggaatggcgtgaacccaggaggcagagcttgcagtgagccaagatcacggcattgcactctagcctgggcgacagagcgagactccatttcaaaaaaaaaaaaaaaaagaatcaggatggcatcagagttttcagaaatttgattttagaagacagagcagtaataccatgaaagcatgtttcttttacagcaccagcaccctctcagaacattaataaattgtatgccatcaaataacaaacagaatgagggaggaaggagttcaagactagcctgggtaacacagtctctacaaaaagttaaaaagttaactggggacagtggtaggtgcatgtggtgccagcggctcaggaggctaaagcagtaggatcccttgagccccagagtgaaggcactgtggtgagccatatttgcaccaccgcactacagcctgagcaacagagcaagaacctgtctcaaaaaaaaaagaaaaaaaagggagaaagggaggtagaggccggaggcggggaagggagagaaagagagggaagtggaagaaatagtggaacttgccaaagtgtacaataaaaagaaatttcagtcttaaaagcagtcagtacagaattaatctcagcaaacaacacgattaagaagctagataatattaggtaataaggaaaaaggcgtacattgtttctatcaatgagaaaacaaaagggcagaaactctgaaaagaggggaaaaaaatatttgttggaaagttgaagtacaaataggaacctaaatcaatggcatgatttttgagcagtagatacagtataagaaaaagaatccagtcaaacttagtacttaaaacattcttctttgagcatcacagtttccttttctgtagtcacattctctgcaataaacaatatttacaaataatgaggcaatgctgcaaataaacccactgaccaatcagaaaaatgatagttatagaagaggaaagtagaatcaaaaggcagggagatgagatgccaaactcaaatgcaaacaatgagagcggaatctgaaatacgagatgaagccaatacccagaagccagacacaggataagaaccgaaccaggttagaagcaaagcagagggcttcaaaatgatttcatcttaccaaaggatttctcttcgtagtgacaaaaatgttttctaattattgcctgttatgttggattgtttcctgtttgctttgtcagtttgtgaattgggatctcatgaatcatgatcatttcattgtaatagtagcatcaactaggataggacaatttatgtcaaaaaggtcggtgtaagacatattcaaatactttcatggctgtgaacacttaatataataaagaggttcttgcggacaggtgcggtggctcacacctgtaatcccagcattttgggaggctgaggtgggtgaatcatgaggtcaggagttcaagaccagcctggccaagatggtgaaaccccgtctctactaaaaataacaaaaaattagccgggcatggtagtgggcacctgtaatcccagctacttgggagactgaagcagagaattgcttgaacctgggaggcagaggttgcagtgagccgagatcacaccactgcactccaacctgggcgacagaatgagactccgtctcaaaaaaaaaaaaaaaaagttctttctaattttgttttcccttcagcatgatcccacgcctatctccaagaatacagccagaaaaatacatcattcattaaagagtaaaacattaaaacagtgcgacatgggtgcataaatagacagactgtagaaacagagttttaaagtccataaataaataatatacttacagcagtttagtacattataaagatggcatcagtgggggaaaaaatggtctcttcagtacatgatgttgttataggagagccatcttgaggggacagatgttgtattcatatgttttaccataagccaggataaactttaaaccaatcaaagatctatatgtttgaaaaagaaaagaggctgggcacagtgactcacgcctgtaatcccagcactttgggaggccgaggcgagtggatcacgaggtcaggacttcaagaccagcctggccaagatggtgaaaccccgtctctattaaaaatacaaaaattagctgagcgtggttgtgggtgcttgtaatcctagctactctggaggctgaggcagagaattgcttgaacctgggaggcggagattgcagtgagccgagatcttgccactgcactccagcctggatgacagagcgagactccatctcaaaaaaaaaaaagaaaagaaaaaccacaaaagtaacttaagaaaatataggaaaaaaacatggagaagaccacagaagaaaagattgacatattctgctacatcacaatcaaatgttcttcataacaaaaaaaaaaaagcgggggggggggggtcataaacaaagtcaagtaagaggtaaactggaaaaattgccactcatattaaagacaaagggctaatttccctaacatataaagagctccttgaaatgtataagaaaatgaccactcagtagaaaaatgggccaaggcaatcaactgaaaaaaaaccttcaatatattaaaaaaaaaaaaaaactgctcaacttcactgtaaaaggaatgcaaaataaacatacacaaacccttatcagactggcaaaaatcctaaaaggtaacagaagcttacattttatcaattataaaactaaagctcattgaactagattaggcagcctaagtttaaacaataataatgtcaagaatagatgtgtcgtttgctaatagctttatactaaaatagtaccactacatgtgcttagccaggtgcagtggctcatgcctataatcccagcactttgggaggccaaggctggagaatcacttaaggccaggagtgagagaccagcctgagcaacatagtaagacctcatctctaccaaaaatttaaaaattagctgggtgtgggggaatgcccctgtagtcctagctactcaggaggctgaggcggtaggatggtttgaatgaactgtgatcacaccatagcactctagcatggacaacagagcaagaccctgtctctaaaaaaaaaaaaattgaagtggaattttcttggttcaaatttaccatcgatataagttggatcattatataagccaaacataataaaattgaaaatgtgttctaaatgttatttgggtacccactgtagctgtattatcctaataagaattttacagaattttgctgatcttaaagtgttctttgcctggatttcagaaactgctaatattttttgtacagtcacattaacgaaagtggtactgtgacaacaccccaaactggggtgatcttaggataaagcaaagatgtgaatttcccttctaatctcctgaccactaaacccccctttaccttatttatctgtagaatagtgctagattgttttggaggggatttttgctcttattttatcttcatgccaaagatagaaaagttgtggctaataaagagatgttctttcagatagaaagtttttcttttcataggctttcccttctacttatcttggtaagtagaacaggagctgaaatctaccataacaccatacccatttgacatcaaatcaataattatatacttcaccatagtggagcatataaatgaaacaacataatcttgaaagcaaaaagagtccccaaatggcccagataatcatatatcagattggcaatgtctgcaagtatatgcattctcatgtacattggccaagccaggcccactactgcagaaaggagaaaggattctgacaccatttcttctgacacgtctcgcagccctaaaatctattaaggttatatggcttaaactcagcaacactgctttaaaatactcactcaagttagatggttctaaatagaactaatgacagccagaagagaaaggcctgtaggaacttgctgtgacacagagctggtgtctataaacagattagtagaagagagcagaacattgttctatcaccataactttcgtgttttggcatgaagatacaataagataataggaaaaaattacctgttacatagcctaccactgttctgttctgataaataaagattaagaagagtttagcctgtcatctctccatatacttgtatatgatgtatcaatttagtaattaatcataaatacccactaactagtgttatgtactaaagatttgtctatggatatgaaagacaaatacacttgggagcaagaacgggtgaaatttttgatctcttcaaaaagttcatcacaattaattcttagttcaaagggcaactgaagccaaccccacttatcatttgtaaaaggataagggataatacagctaaagaaatcctgaatctgtattaaacttactgtttaactgctgactagtagccaagattggattctttttctctaccatctttatataagaattcaaaggaaatgcgacagtttaaaagaagaagagaaaaagttaaatgcttaaatagtctactcagcgaatatatgtggagcatctacagtggaaggtagctatgccagtggttcccaaatttgtctgtctattagaatcacttgagatcttcaaaaattccaaaatacaaaaaaattagctgggcgtggtggcatgcgcctgtagtcccagctactcaggcactgaggcaggaggatggcttgagcccaggaggtagaggctgcagtgagccgagaccacaccactgcactccagcctgggtgacagtgagatcctatctaaaaaaaaaaaaaaattccaaagcccaggccacaccacatcaattatctcacagtctctggggttgggacacagtcatcactggcaatatttgaagctccacaggtgatttcagtgtgcagaaaaacgtggaaaccactagactatagaatgttgtaattgtcagttatattaaatgagtattaatgatcaaaagattcatgtgcatgattctaattactattttattttcacaacttatgtgtgtagtataattgtttcttctacttaaaaatattttaatattaatcattattagtctgcttgctaaaatcactcttgctactttcttctgttttcatatatcaacaggaattggcagcaatgaaacagattctcgttaagatgcatagtaaacattctgagaacagcttacttctcactaaaacagaaccaaaacatgtgacagaaaatcagaaatcaaagactttgaatgtgcctaaagagcatgaagacaatatatttacacctaaaccaacactctttgtaagtacaatttttaaaactcataattttaatattcctgattcttactaaatgtattttagttaattttttccttttacatttatgaaatgagtagattccacaaatatgtttcatgaaaagaccttgaaggatttgcattaatccattttctaaatgtgtatattacctatcttatagatgatagtatattttactgtaattcctcataaagtgtgaaatcaattaacataaactgaaatgcattgttagctaaaaatatatgtgcacagaaattaaagaaaaagaaataagaaaaatttggattaaaaggtaaaataccaaaaatatgtacagttattatgtgccaatttttaaaaatagagaaaataaattaggaaatattgaaaactatatattttaacaaataataagaatcaagattaaaaggcaagagaattaaaataggagtaacattattaaatattccattttacttcaaatggtttctcaatcatgctttcatttctcaggagaaacatgatttttatctgctaaacatagagactcaaaaccagaaagattttctctgatattctgattcagtgagtccccagaatcttaatttttttaactcccaagttgaatataatagtcaaatatgagaacttctgatctcagtcattttattatacatgcagataatgctactgaagattaataggatgaaagagattttttagtgattatataattcaacctccctttttaaaaaaatgaaagttgcagtttagatcaaataagagacaattgggcagacatggtggctcacacctctaatcccagcactttgggaggccaaagtgggaggatcacctgaggtcaggagttcaagaccaggctggccaacatggtgaaaccctatctctactaaaaatacaaaaattacccgggtgtggtggcacacgcctgtagtcccagctacttgggagacaggcaggagaattgtcggtgcgatggcaccactgcattcaccaccttggcgagagagtgaaactctgcctcaaaaaataaaataaaataaaataagggacaattattttaaggatacgtgtggcagtaatgtagactaagctgacaggcgggagaaaacaggatggctcagttgactagcctggacacaaggcggctgagtccatgcatcttttcctctgtagtacatcagcttctctttgtttctcctctagtttctgcttactcatgttttccacttcctcattaacttgctcacagccctttgtgttgaaacaggtttctgtacatcctttctgcatctactctcttataatgtagttctccctgtattttccaagactaacaatctaattggcatagctaattcttgttgggtgatacccctttttggcaagacttcctaagcttattacccagcctacagaatggctgcccttaatggtgagcaggagtcacacagttccaaatacagctgccgaggactgtttattaagggctatggctaggcaggttttgctcagagagtgggcagagattgtggcagacactatgctgtgtctattataatctataggaagaaagcagattgaatacatacacattaatgggaaatagggtcagatgaaaaccacaagatacagctgaatacttaaagcctgtcagcactctctgatctgcctttctgatcctactctgctccaggcagtggcactattccttctgaccctgaccttctgcatttctagctttagcttggtaacctgattgtgattttctggaataccggctataatcaatcagtacatgagtaacaataagatttccccagtacctccagataaggttatgcagtgatgataaaattaagaagattcaatattagttgggtagttcttccttccttatttttgcttatctggattttctattttattctacaataaaattctttttaaataataataagggaaatttttttcaaaagaggtacaagctcagctatgtcctaatgaaaactgagaggtaatactacaaacaagtcaaatcaaagactgtaagctaatgcagaattagtaaggtgaaccgactagataacctggggcaaatcattaaatgttctcaatgtgttcttatctataaaattaagtgggaggttataatgaaatgagttctggactccttttattctagcatgctatgattctcttcaggcatcataatttttagttattcttttgaatattttcaattttccataagaatacttttttatattttctctgaacttgttgataaggaatttaccatgctaatatttgaagtaagagctaatcattttataatctcatggttttatacctaaaatgaaaacatttctaaatccagatcctttggctgaaagtatttgctataggtattttcccctgatagtaaattcagtgatggatgggtggatggatgagcgtttccatatgcattgacaatatgaggcgagccacacaaaactactgttaactgggtaatggagtgggagcagtgctgtgacgcagaggaggagaaataagagcttgactttttttttttttttttttttttttttgacacttaggtcttcttctgaagactttttttttttttggagatggagtctctcactctgtcgcccaggctggagtgcagtggcgtgatctcagcttactgcaacctctgcctcccaggttcaagtgattctcctgcctcatcctcctgagtagctgggattacaggcatgtgccaccacgcccagctgatttttgtattttcagtagaggcaaggtttcaccatgttggtcaggctggtctcaaactcctgacctcgtgatctgcccacctcggcttcccaaagtgttgggattacaggcgtgagccacagcacctgacaagactttttttaatgtgcttttttatatgtatacaaatgttttacagtgtacaagtgatatttacatctgaaggcaacctcaaaattcccttttttagaaaagctctggcctttgaaatgacatatgtgacagagtcattgttcaggcacttagtgtaccaacaaaaactaattgaaccacagaatgtaagtgccttaaggacagaaactgtattccttttgttttgcatagcatctgaacaaagcagatactcaataaatatttgctgaagagaaaaaaaggagttatttgtctccccagtttagttatgttcttagctgttaaaactctaaactgggtggggaactttaatgttaaagtaaactacagggagaatgaaagcttcacctcccatgactctagttagtgctacttctgcaacaggcaacttaagtcttctttattcagaaacacccagttcattcccactaatcacctactttcactcttaaggtagctttttgctgtgctatcccttttttcccagcctcacttatctctttcttagaaaaacctagagctattctaatctgatttagaacaactttcctctttccttcctgagcagtatgggactcttttgctgcttttctgctgccatcctattcgaaaatagaatttatactcaggattcacatcattgtcattattttctcaataccttattaaaaatgcagatactagcaactctacttttagtcttttcaccaagtagattgtaagcattaaaacaaaaaagagcttgggcgcagtggctcacacctgtaatcccagcactttgagaggccgaggcagacggatcacctgaggtaaggagttcgagaccagcctggccaacatactgaaatcccgtctctactaaaaataccaaaattattcaggtgtggtggtgcatgcctgtagtcccagctacctgggaggctgaggcaggagaatcacttggacctgggaggtggaggttgcatgagccaagatcatgcctccacactccagcctggacgacacagcaagactctggtctcaaaaaaaaaaaaaaaaaaaaaaaaaagccttaggctctaagtatggtagcaaacaatacgattgtgcacctccagtgtatagtgtgtgaagtgtctgatttttggtgagtttacgacgtagttcaggccttgacttacatttgttatctcattggctagcatatgttgtatagatagattaagtttatataattgatacataagtggttatatgaacgacatgattccctagaagagctttggaaagctatatgtcatctggaaagaaaaaaaaattttttttttttttgagacagagtctcacgctgtcgcccaagctagagggcagtggcatagtcttggctcactgcaacctccgcctcctgggttcaagcagttctcttgcctcagcctcctgagcagttgggattacaggcacatgccaccatgccccgctaattttttgtatttttttgtagagacggggtttcaccatgttggccaggctggtctccaaactcctgacctcagatgattcacccaccttggcctcccaaagtgctgggattacaggtgtgagccaccgcacctggcctggaaggaaaattagtgtagtcaattcaagaagcatttactgactatatgcaagagcctgtgatgatcattaagacagcatcagcattaaaactgctgctcctataggatcaagcttagtaaacaataatataaggcaaaatcagttagcctactttttttgttttatttttgagacacggtcttgctctgtcacctaggctggagtgcagtagcatgaacacggctcactgcagcctcaatctcccaggctcaagtgatcctcccaactcagcctcccaaatagctgagaccacatgtgcacaccaccacacccagctatttttctttattttttgtagagacagggtctcactgcattgctcaggctggtcttgaactcctgggctcaagcaatcctcccaccatggctataatctcaaagtgctgggattatagtcatcagccactgcacctggcctgggtatcctactttaaaggaaatacaaattgctatgaaaattcagagaaagaatagacactgtggttttggaggactctaggttgccttgtcagaaaggaagtatttgagcttggctttaaagaatgcatggattttgacaagtgaagatgagcattatttagaaattccaagagcaaagaaaatatgatattggccaggcgcggtggctcacgcctgtactcccaacactttgggaggccgaggtgggcggctcacctgagatcaggagtttgagaccatcctggccaacatggtgaaacctcatctctactaaaaatacaaaaattagccaggtgtggtggcaggcacccgtaatcccagctactcaggaggctgagacaagtgaatcacttgaacccaggaggcggaggttgcattgagccgagattgtgccactgcactgcagcctgtgtgaagagcgagattctgtctcaaaaaaaaaaaaagaaagaaaagaaaagaaaagaaaatgtgatattcacaaaatattttctaacttgtgctcctttttaattgttgaagaataggatgtctaatatgtattttctatatctagactttattcctttcttactatattcttacgtctgactttggccaattcactatctgttaatcctttcccatagtacaaaagggaaataaaagtagataggttatacctagtcacattaatagagacagaaagtagagtggtggttgtcaggggctagggggtatggggatttattgtttaacaagtagagagtttcagtcaagcaagatgaaaagagttctatggatggacagtagtgatagttgcatcgtaatgtgaatgtaagtaataccactgatatgtacatttaaaaatggttggccgggcactgtggctcacacctgtaatcccagcactttgggaggccaaggtgtggggatcacctgagatcaggagttggagaccagcctgaccaacatggagaaatcccgtctctactaaaaatacaaaaattagccaagcgtggtggtgcatgcctgtaatcccgaggctgaggcaggagaatcgcttgaacctgggagggggaggttgtgatgagccgagatcacgtcgttgcactctagcctgggcaacaagagtgaaactccatctcaaataaaaataaaaatagttaatgggataaatcttatgttatatgtattttaccacaatcttctttttaaaaactttttaaagcctgggcaaaaacttttgtaagatcctacctttaccaaaaaaaaaaaaaaaattttttttttaaattagccaggcatggtggtatgtgcctatgatgctaagctacttgggagtctgaggtgggaggatcacatgagcccaggaggttggggctgcagtgagccatgttcacgccactgccctcaaccctggatgacagaacaagaccctgtctcaaaataatatatataaaatgatgaaatataaaataaaaaataaatttaaatttttaatttaatttaaaaattgtaagtaggttacaaaaataatttttctcatttattcatgagggaaagtttataattttatcaaaaatggaacgtagcagttatttataatatagtaatataatgagtacaattggttgtgtttagacaagtgacaaggatgccacactagggtagcgtcatcacagaatcatgtcctaacactgtgcctcccaacattttttataacacacatggaaaattataatatttctatggcacaacaggataactgaacttgctggtagattgaagggactccagccaccccaggcactggggactgaggagaacaaaagctccacatacctgtaacacttctgtgtcatatttgtgtttagaagttctggtttcacttttttttttttttttttttgaaatggagtcttgctctgtcgcccaggctggagtgcaatggtgcaaactcggctcactgcaacctccgtctcctgggttcaagcaattctcccacctcagcctcctgagtagctgggattacagggacgcaccaccatgcccagataatttttgtgtttttagtaaagacggggtttcaccatattggccatgctggtctcgaactcttgacctcaagtgatctgcccacctcggcctcccaaagtgctgggattacaggcataagccaccacgcctggcccggtctcacttttttatgttgaatgtagactcatctcaccaaagtatgaccggacctcaaaatatctagctgtttacatatacatttttaaatattcattttttaatttctagtgtcaggaacactaattgtaacctcttcctgatgttatttaatttagctggtgagctaaactagaaatcaggaattttttggtgagcatggaacgaagctgactgatctcagacagcttcacattttgttagtgataaagccagatcaactgtcttaaactcacttaagttgggccctgcctatgaggacttctcaatatttacttatttgatttccagtttatatcttatttggaaaacaaagtaatgatatctaccagacatagattttttttccttagagaagtggtactggttaaacactaatagattcttaatttctagctctttttttagattacaggagtaatctgccaggcttactatgtctgcatttatcagtcatcattctttctaattttaactaaccctctcaatgggttataatccccatgttatatattaacgttttagctggctaattctgggtgacacagaagtatctatcttatcaattatttgtttccaaaatcaccttgtaacatagtaaattacttctggtaagtttccagttagtcttgtcatttgtttctgcaatggctttgtgctctctttcctaaatctggaatatagtatactttagggcctgttaatactccactaacaatttaaggtttttattaatttgtatacatatatatatatataatgtgtatgtaaaatatatatgcatatatagtttatatatatctgtaaagcacttcatattatgaagcctataagccttatatttaaaataaggaccctactcagttaaatggttaatcccattaatacctgaagcagaatgtcaaattttgtcatataaagcaccatcttatggatataaagggaagtaactttaataaaatagaaaaaagaaacactgctgatcaaagagctaaaagaatggaattatcaaaataaaaagcagttaatttttgtttttgtttttttttttttttgagatggagtctcactctgtcacccaggctggagtgcagtggcgcaatcttggctgactgcagcctccacctcctgggttcaagcagttctccaaaaatcagttaattatacatctgaattattttgctgtgcccattttaacaatcagttaccaagagccagcaaactctattgtatattctttgttcgtttgttttttaccttttaaactaggccaggcgcagtggctcacgcctgtaatcccagcactttgggaggccaaggcgggcagatcacctcaggtcgagagttcaagaccagcctgaccaacatggagaaaccccatctctactaaaaatacaaaattagccgggcgtggtggcgcacgcctgtaatcctagctactcgggaggctgaggcaggagaatcgcttgaacccaagaggcagaggttgcagtgagacaagatcgcactgttgcactccagcctgggcaacaagagccaaactccatctcaaaaaaaaaaaaaaatgtcaaaaccattcttagcatgcaccccatacaagaacagaccatggaccatagtttactgatccatgatctatctcaggagttgataaaagcttagaaacttccagtgtttggaacagggctatcactaatggctagcacattactgactaaaatatctggaaatgaagaatatacattttatgaaaatcagaaataaacttttcagaagcagtattatctacttggaatctgttcaaattttggtagtgatgagacttacatactaatgtaggtgagaaatcactctgacatactctatgctaatgtaattaacagagaacctgaatttcagagaataatataaccgaaggaaaaagttcaccaatcgaaggattgaaaatatctttgaatgatataagtaaatttgagttcatacagcaaaatatgctgtttccatgccttactggttatttaccatttccactcaaaaatcaggctgttgcttagaatcacaagtactacccctgatgcttgtaaagggtgatgttgcctgattagttaaaagcatattattgcattactgtagtagaattctcttttgtcttgcatagtagaaaggcttgaatagactcacatgaaactttatgcccagacttaaatagaactgaaaggcttctgtcacagcagacccaaacattcattcattcattgaaaaatgtttattgagcacttactttgtgccaagtactattccaagcagtagagatataaataattcctgcctctgtggatcttacattcatggatagagatagactataaaccgacaaacaaaaaaataaattgaataagatgtgaaaacatgacaaatgctatggagaaaatgtatgaggtaactgagaagtcctcgatttgcccactttgcaaaattaataaatggctagaacctgtgctttaaccactgtactatacggtgctcaaaccacaaaaatcaaagaaggcatgacatcgaacacctactgctggcgagacacttccctgcatgctgaagatacaacatgagataagataaatggtataaactaagagtataagagtcagcatctttaggaattgtgtcccactgctagttcagcagctttagcaaattgttcagtctctcacatacaggcctggagataactatttcaggacaagtatgtggccctatgaagtcatcaggaacctagattccctcttcctttctcttcaaccatccttagagtgtggcatctgttcttagaatcacaatatggttgctctggcctcagccatcatgtctgcattttaagcgggaagcgagaaaaagggaggaaaatagtctccctttccaaaggagtttttccctaagtcctacccaacatcttcagcttatatcccattggccagaacttagtcgtgtggccacacctagcagcaaggaaggctgataaatgttttatacagggtgaatctattgctttactgataaaatcagagttctgttattaagaagggtgaaatagatataggctagacagccagcaacctctgcacttgatctcagccaaaaggtcgaggcgtgatcccagcagcctctgtaacagggtttgattcatttttatatacccagaacctaacacaaggactggcacagagtagttagtcaaataaatgctattaaactaatcccaagtacaaataattgagttcatgttggagagtgtcaagaaataggattagatatgtaagtatgggccagatcctaaaggggccagtcttctaagtgaaatgtggttagaacatgacagtgatggtgaagttcacccaaaataacctgggaataaggaacatatcttagtcctatgggaacagactttgaaattaaaatggttgtgataagacatctgaaaagtcaccctatgaagtagcaaggcagttaatccccaagacaaggtacacttgactgtggcaaatctgtctcattaacaggaggagaaaacatattaggggtgggagtaatggtctgcagtgtagcagacacagataaaaggagagtcagaaagaactgtctgccattgaaattcttataccgtcctttttgagtattaagattcctttttaatgccaaagtttttatttaccttctccctgtaaacacatagtagtagtaaaaagtttagtatcagttcattgaggaaatgcaaatgtacaaaccaattctgcatcctttggtataatcccgaggatctgtagcttagtttatagcagttgctttcacctttttggccaggagtcacagttgagaaaacaatttacgttatgacctagtaatgatcacacagtttctcaaaacagaacttacccccactatggccaatactctaatattttctatgctagttttttttttttttttttttctaaattctgttcttttacctactagagttcattacccgtgggttgggacctgcaatttaaagaacaatggtggccgggtgctgtggctcacacctgtaatcctagcactttgggaggccgaggcaggcgaatcacctgaggtcaggagttccagaccagcctggctaacatggtgaaaccccatctctattaaaaatacaaaaattagccaggggtggtggtgcatgcctgtagtcccagctactcgggaggctgaggcaggagaattgcttgaacctgggaggcggaggttgcagtgggccgagattgcgtgactgcactccagcctgggcaacggaatgagacttcatctgaaaataaataaataaataaagaacaatggcatacatgttcttctatgaccaagaatagtgacagccctagacttttagctggctcacctttcccagtcacccaaatctatctgattgtataagaatcatgcaattccctagttttactctgacttttccttatcttaacaacaaataaaagctgagctggaaaatcattaacttttcttttttttttttttttttttttttttttgagacagagtttttcactctttgttgtccagggtggagtgcaatggtgtgatctcagctcactgcaacctccacctcccaggttcaagcgattctcctgcctcagcctcccaagtagatgggattacaggtgcctgccaccacacccggctaatttttgtatttttagtagagaagggtttcaccatgttggccaggctggtctcgaactcctgacctcaggtgatcccccccaccttggcctcccaaagtgctgggattacaggcgtgagccaccacacccagccaacttttcttaaatacataagagaagtgaggtcacaaagcaaactgctgcccccaaaattggacagataggccaatacagagaatgatgatgtatcagagcaaaaaatcccatggatgggaaccagtgctggggtaggaaaacctgaatgtaactgctagaagttaggtatggacaagtctgaaagttaaaaactccagtcatagaaggaacccccacactcttgtgaattttaactttagaagcttgacctagttcttacagtaaatattgggagaaaaatccccttccgtttccagcagtgggagggaaaaaagaacattttgaaatatgttagagaactcagttctcaacaaggtctcccttcaggagaagctattttaactagaagctaccctgctggggctttatcaaagcctaactgacctgggaaaaactcaatacccaatccagcccacctagccatcatggcccacctaagaagggaaaaaaaactgagaaacgtgtgtaaagttcatattccagaggcacactctaactgaaagactgagacctaatcataggaccataggatgacttccctacccccacaccttaccaccacattaccaaaggcccatttacggcagtttctttttcccagtacagtatgtccagttatcaggaaaaacttaaccaggtagactaaaaaccaaaaaacacagtttgaagagacagtgcaagcatcagaaccagagtcaattgtgccataaatgttggaattaacagacagagaacctaaaacaactatgattagtatgccaagggctgcaacagataaagtagacagcttgcaagaacagatgggcactgtgagcagaaagatgaaaatcctaagaaagaacccccccaaaaaggagaaatactagagatcaaaactgcttataacagaaacgacaaatgctggccgggtgcagtggctcacacctgtaatcccaatgctttgggaggccgaggcgagcagatcacctgagatcaggaggtcgagaccagcctgaccaacatggtgaaaccccatctctactaaaagtacaaaaactagctgggtgtagtggcaggcacctgtaatcccagctacttgggaggctgaggcaggagagttgcttgaacctgggaggccaaggttgcagtgagccgagattgtgccactgcactgcagcctggacaacaaagtgagactctgtctcagaaaaaaaaataaatgacaaatgcatttgataacctgattagtacagtggacattgctgaagaaagaatctctaaccttgagaatatttcaggccaggcacagtggttcatgcctataatcccagcactttgggagtgtgagaggatcacttgaacccaggagttcgagttccagaccaaccttggcaacataagagaccctgtctacacacacacacacaccaaaaaaaacaaaaaaaaacaaaaaaaacacttagccaggcactgtggtgcacacctgtggtcccagcaactcgaagagctgaagtgggaggatcgcttgagcccagaaggtcaaggctgcagtgagccatgatcatgccactgcactgtagtctaggcaacagagcaagaccctgtctccaccaataataataataataataataataagggtattgtaacagaaacctctaaaaaagagaatatccaaggactaaaggatgactacaaaagctatagcatatatttaatgagaatattagaaagagaagtaagaaaggaagagaagaaatatttgaaacaataatgacagaatttcccccaaactaatgtcagacaccaaatatccaaggactaaaggatgactacaaaagctatagcatatatttaatgaaaatattagaagggccgggcgcggtggctcacgcctgtaatcccagcactttgggaggccgaggcgggcggatcacgaggtcaggagatcgagaccatcctggctaacacggtgaaaccccgtctctactaaaaatacaaaaaattagccgggcgtggtggcgggcacctgtagtcccagctactcgggaggctgaggcaggagaatggcgtgaacccgggaggcggagcttgcagtgagccgagatcgcgccactgcactccagcctgggcgacagagcgagactctgtctcaaaaaaaaaaaaaaaaaagaaaaaaagaaaatattagaaggagatggaagaaagaaaggaagagaagaaatatttgaaacggtgacagaatttcccccaaactaatgttagacaccaaaccacagacccagagaaagataaatgcaaaaagaaaaaaacaaaaaacgaaaaactatacttaggcatatcatttgcatatcattttcaaactacagaaaattgagataaagacaaaatcctagcctgggcaacatggcaaaaccccatctctataaaaaatataaaaattagctgagagtgatggcatgcacccatattcccaggtactcggaaggctgaggcaggactatcacttgagcccgagaggttgaggctacagttagccatgatcataccactccagcctgggtaacagagcaagagcctatctcaaaaaaaaaaaaaaaaaaaaaagaaaaagaaaaaatcctgaaagaagcccgaggaaaataacaccttacctatagagaagcaaaggtaaggattacatctgacttctcagaaacaatgcaagcaaggaaagagtggagtgaaacatttaacgttatgaaagaacaaaaccaccaacctaaaattctgtaccctgcaaaattattcttttcagaagtgaaaaaacaaaaattgaaggaatttattccataacttttcaaaacagaaagcactaggcccagatgggttcactgttgaatcccttcccttcccttcccttccctcccctcccctccactcccctctcctcccctccccctttttcctccctagtagctgggactacaggcgcatgccaccatgcccagctaatttgtgtattgtttgtagagatggagttttgccatgttgcacagactggtcttgaactcctgaactcaagtgatctgcctgccttggcctcccggtgtgagccacagcacccagctaaaattgtacctattctctacaatctctttcattagatagaagcagagagaatacttcccagctcattttgcaaggccagcattgccctaattccaaaatcaaagatattagaggaaaacaaaactacagaccaatatctctcatgaatgtagatgcaaaaatctatgaggatttctagggcagtgaaaatattatgtgatactatatattattatgatactataatggtggatgcctgtctatagacatttgtccaaacccataaaatgcatagtaccaagagtgaacccaaatgtaaactgtggacctagggtgataatatgtcagtgtaggttcatcagtggtaacaaatgtaccattgtgctaagggatattaataatggaagagtctgtgcatgtgtggagccggagagtatatgggatatctctgtaccttcctctcaattgttttttaagacagtcttgctctgttgtccaggcttgagtgtagtggcatgatcacagctcacttcagccttgacctcctgggcccaagtgatttttttttacatgatgtcttgctctgtcactcagactggagtgcaataccacaatctcagctcactgcaacctccacctcccaggttcaattctcctgtctcagcctcccgagtagcttggattacaggtgtgcactaccatgcctggctaattttttgtatttttagtagaaacagggtttcaccatgttggccaggctgatctcaaactcctgacctcaagtgatccactgtccttggcctcccaaagtactggtattacaggcatgggccaccgcgcccatcgtcaagtgatcttctcacctccatctcccgtgttaactgagactacaggtgcatgccaccatgcctggctaacttgttttttcttttcgtggagatggggtctcactatgttgcccaggctagtctcgaactcctgggctcaagcagtcctcccacctcaacctcccaaagtcctgggattacaggcatgagccaccgcgcccagccaaaataggaactttgactggaatcagtgaagttctgaatgttttattctgtaattcacctcccctgcctttttctttctattctgtacagcctgtcgccttttaggctgaaatgattgagtaataaacccaagaagtactctggtaaatacttagaaattcataagatctaaaacacaataatttggatacagtaattatttaataaatatctattgagtgaatgaatatctattatctatatagatgagacaactgaaaagaagtcatgtccttgatttttttataattctctttgaaaataaaatcaattcgtaaaataattgcatccccagaaaatcttaagtataggctttgagcaagaaaacacagttttttccatcatatacctaccaggtgggagattatttatggcaaaagacaaagtcttcgcccttaagtatcctttctgaattaagaaaagcaattttttagtatagcttacataaaaaaacctcaatgtatatagttctctgagttgcctctcttgtcctccttgtaagcattttattggattttctttttctttttttaaacagactaaaaaagaagcacctgagtggtctaagaaacaaaagatgaagacctagtgttttggatgggaagcacctgtagaccattatatactcctgaagttctttttctgatggaaaacaaaattcagcttaatcgtgtactcagcattttttaaataacaatgtttatttgaactaatattaaattaacaaattcagtgtaatcaaaatgtgtaaagaacaatcaatatactttatttttttttctattttataaaataaatatatatgctatgctttaaattttggagctttcataaatgttcaatgcattttaagtgtgtggcttataaatattttggtgagtatttttctatactacgtaaattctgagtttaaatgtcatacacaaatactaagacactttgcatttttaaaaattaagaatcatttgtgaagtccactacgaggtacttcaaaagcccagtaatggtggtcagataccatgtagatggatacagattgttgactcttttgaagttgtttttttcttatattttatattaccattaaccaataaaatctggcagaaagtctgctattccattggtaaagtgaaaatttggtggaaagtctgttgctacatcagtcataacattgttggaccagatgcaatatggatcagatttctagtcagaaaaaaaatcaataggattttcttttgtcataaaatatgctccatttctcattgaagttgtatactttaaaagaacggaaggaggcaagagagaggaaaaaaggaaagaaatatatatatacacacacacatatatatgtatgtccaggtttttcaaccactattgacattttgtttgtttgtttttttgagacggagtcttgctttgttgcccaggctggagtgcagtggcgtaatctctgctcactgcagcctccgccttccaggttcagacagttcttctgtctcagcctcccgagtagctgggattacaggcacccgccaccacgcccagctgatttttgtatttttagtagagacagggtttcaccatgttggccaggctggtctcgaactcctgacctcaggtgatccacctgcctcggcctcccaaagtgctggaattacaggcatgagccaccacaccctgcccactattgacattttgggctggataattctttcttaagggtggacatagggtaaatcctatgcatgtcataatatataccagcatccctggccttcagcactagctaccagttacacccccaccgcaaccctagttttttggtttttgggttttttttcttttagagacagagtctctctatgttgctcaagctggtcttgaactctgggctcaagcagtcctccctcctcagcttctcaaaagtgctgggatgacaggcgtgagccacctcacctggtcccacccccagttttaacaagccaaaaatgtcctggatgaagactagggttccttctacctcttggccattgtgaattgtcttactttttaacccttacctcatcttctcctggtcatggattttctatttatctatctgtttatctatctatctatctatctatctatctatctatctatctatctagaaacagggtcttgcactgtcacccaggctggagtgcagtggcatgatcatagctcaatgcagcctcaaactcctgggcaaaagggatcctcccaccttagcctcccaaatagctggaactacaggtgcataccactacacctggctagtttcttttaaacttttttagagacaggggtctcagtatgttggtcaggctgggctcaagtgattttcccacctcagcctccccagtagctgagattacaggtgtgagtcaccacacctggctcttacttaaaaataataaaaacaaaaattaatcataacattattttttcttgataaatgttttatgaaatgttgcccaaatgcaagtgtaatagccaccattatcaagctcattctgtcagccagttgctgtgttacatgctttctactctttatttaatcttcacagtaactctgtcaagtaagcattatcttcatttttaaaatgaaaaaaaccgagactcagtaagggtaactaaatggcccaagatcacacacacgataaatagaagtggatttgaaccaagttgctacgctctttccagtacacgacactgcttctcattgcttgcttcctatccctggctcccaagctcacttcaatagcaagaaatgcaggggaaatttttaattttttttagatatggtctcactttgttgcccagtctagtatcaaactactggccttgagcaatcctcccacttcagcctccagagtgagtagctgggattggaggcgcaagccaccctcccagcgaaaattttgttctatcaccttttctttgtgggtaggggggctatgggacttagcatagttgcattgtttttgctcaagataagttcatggttctgaaactttgtttttttttttgtttgtttttttgtttttttttttttgcagaagcttagcattcccatactcgtagttgaacccaggccacctgggtgaaaaaccaggaatcctaagaccatgtgggagatgactctaactcctaaagaattccatgactcttataatagttcttaccaggttaacaggatatactcagctttcagaaccaactaaatggcttgtattcactttattgattcatacattctttcattgaacaaacaagaaaaatctaaaatgtgtaaggcattcaaactatgtattgtttgtcttcttctcaaagggccctgaaaaagaattctatgatacctcaagcaccaaaggaagtttactttcatcatcctcagtatagaaatttccaaaaagaagtatcagctagtgacccaagtactccaaatgcactatatatataaagaagatgccacttttgctgatttcagtaagtcatacttggataatcatacatcaggaatgttaaggaagattcccacactttagggaggttgaagttgttaatgaaccagattcgcttttatgctaagatcctgagacagaaaggctactctatctcagtctctctctctctctctttctctttctctctctctctctctctatatatatatatgtatttttttttctttgagttggagtctcgctctgtcacccaggctggagtgcagtggcgcgatctcggctcactgcaacctctgcctcctgggttcaagcaattctcctgcctcagcctcctgagttgctgggactacaggcacgtgccaccatgtctcactaatttttttgtatttttagtagagatggagtttcacattggccaggccggtctcgaactcctgacctcaagtgatccacccacctcggcctcccaaagtgcttggattacagatgtgagccaccgtgcccagccagaaaggctactatattatatagctttgtggtagactcctgtgggcctcttagatttaacaaaggtaagaattcccacttaattatttgaaaaaacatttcacttttattaaaaatactgctgtttgaaaaaggtgcttctccagtggcattcagtattggtggcctggcatggtgggtactacccaatgaagactgtactatatatttataggccatacttatgaacacgtgtatatatatttatataagatctacctatctaggatggaaactcgggtgaaaataaaatagggtgaaggtaaaaagtacgtagcacttccagttgtgagccaagattgtaactagagagcagccaggagcttcctgtcagtaaccatgttttcaataaatactctttcatgtacaacaaataaataaaaagctgctgctcatatctgaaatgttctcaagtgaaactgatgtcaggaatttattttcccttgcctaatcttacaggattaaaatttgggttattggctgggcgtggtggctcacgcctgtaatcccagcactttgggaggctgaggcgggtggatcacgaggtcaggagagccagaccatcctggctaacacagtgaaaccccgtctctactaaaaatacaaaaaattagccaggcatggtggcgggtgcctgaagtcccagctacttgggaggctgaggcaagagaatggagtgaacccaggaggcggatcttgcagtgaaccgagatcgtaccactgcactccagcctgggcaacagagtgagactctgtctcaaaaaaaaaaaaaaaattggggttattgcaactttcccgctgatactggataggctagcagtggatattagcctatccaatatcagtgagaaatatattttattttcatataactcattttaaaaattaataaatactataaatgctctaaagaaagacttcctaaggcttagaggtcaccaacaaagctagccaactagtaccaagagtatcccgtggtatcatttactttggttgatttacagagctcacagtccagtcctcagctttacaggctcagaaatttaattttgttagtgcactaaagatgacacgtctttcaggagtgtgcccatatttactggtgcatagatcataatgtttatgtattacttctgagagaaaagtaaaactgatatacagaatatgacttattggaatcagcacacctggcatcttctctccctatttcctcctagcttctgccatactatacactcatatttttctccttcatcctcctctattacctgatcataaaacactgaatttttcagagcttttttccctctaagcctattcattccattctgtacttactctcagataatttctacaccctggcttcagctactaaatgccaatatttgcaaacgtacgtctccagttcagacggttccttttaaccacctgcctacttgacatttctacttggatgtcccattgtgacctcaaacttaacatgtattaaactgaactcaccaactttctcctccagtgttttcaatttcaataaatggtactaccatttatttactcagtgacttataccacaaaaccaggagtcatccaagacccttctcttgttaactaccagcattcaattaccaagccctgttgatctgcctcatatttttttttacttttgattgtgaaaatttccggccgggcatggtggctcacgcctgtaatcccagcactttgggaggcctaggcaggaggatcacctgaggtcaggaattcgagaccagcctggccaacatggcaaaaccccgtctctactgaaaatacaaaaattagctgggtgtggtggtgcatgcctgtaatcccagctactcgggaggttgaggcaggagaattgcttgaaaccgggaggcggaggctgctgtgagcccaggtcgtgccactgcactccagcctgggcgacagagtgagactctgtctcaaaaaaaaaaaaaaaaaaaacagaaaagaaaaaaaattttcaaatacacaaaacggcaaaggaaatgtcaagacaggatatattcattgtcttgattgcggcaatggtttaacagatatatacctttgtcaatatttatcaaattgtacattttaaaatgtacagttttgttttgtttttttgaggtggagtctcactctgtcacccaggctggagtgcaatggcgtgatctcggctcactgcaagctctgcctcctgggttcaagcaattctcctgcctcagcctcctgagtagctgggattacaggcacccgccaccacgcctggctaatttttgtattttggtagagacggggtttcaccatgttggccaggctggtctcgaactcatggccttaagtgatctatccacttcagcctcccaaagtgctaggattacaggtgtgagccacctcacctggccaaaatgtgaagtttattatatgtcagttgcacctcagtaaagatgttttttgaaaggaggaaagagggagagaaggaggacggtaggcgggtgggcaggcagtcaggcaggcaccatctagaaagccctgatgaagccaatgacttaacaaacatcaatgaatgctaaaacaattagataaaggataatagggaatattatatcaggccataaccacctataatcactagtcaaccttagtatcattaaaatgagacaaccagacattatgtgcttcctgatgtgatgtgatgtgatgtgaagtataaagcaatacatgtatagtatttttgtcaaaaattttaagattttagctgaatcaaattgagtcttcagatccaacttccaatctacaggcaaaacaagaaagagaaaatcaagctaaaagacgccaggaggaagcaattgactaaatccagaacacggaacattctgggcactgggaaggacaattgcttttaggccttccttattttgaggcatttttaataaagctgtaaaataatacgtttttaaagagagggaaaaactcatgagttcccactgatatatccaattctaatttgaaatttaaagatttcaattctctgattttacatgtgtgtttcatttcctgtgtgtgaattgttaacacaaccttagctcaagccatcgtgtcctcctccctaggattcttcggtagtctcctaactggccttcctaaatttactcatgccattctccgcagcaaagaatggattttttttacactgtgattttgtattttgaatttaacctacagtttatacaagagatttataagacatgaacttggaaaacagaacaaaatgtaattgaggtataagagcacagtatgtcatgtttcaataaatataattcaaaatttttaaatgatcaaatagatgagccttgcgttttactaaacccatgtgaaatatttgtttcttgcatgggaggtagagaaaaactgtattccttaatgcaatcaccacaatgtttatcataacattgtacatcaccaacaaatttttaaagtattaactattttgatcataatgagtgtttgcaatagttgcagaaagatatttcacttactgccttcacagactattaagttcagaaataacttaaaagctaccgtattggcataacatcatcaagataaacaaatatttcctaaatagatgcataaaaacatatattttattgtcctcagcccgtagctcctaaaggtatcttaaatttagccaatccttttagctcttgcattttaaatatgctatgcttcctttatttttatttatttatttatttattttttgagatggagtctcactctgtcacccaggcaggagttcagtggcacaatctccactcactgcaacctccacctcccaggttcaagtgattctcctgcctcagcctcctgagtagctgggattacaggcgcccaccagcacgcccagctaatttttagtagagacagggtttcaccatgttggccaggctgctctcgaactcctgacctcaggtgatccaccccacccgcctcagcctcccgaagtgctgggattataggcataagtcaccatgtccggcacttcctttatatttaaggagggcatctatagttgagaaaaagtttcccagatttttttttgtcacaaatagaatgaaatgcaatgaatagaacagaataaaaatgactgtcttcttaacccagaagcaatacaaaatatccatgcacttttcttctaataatggaaatgcatacatatcccttgataagaaaagaaaaaaagtcttaagctctaaacatttaaattattcagttccacagcttataatacagcagttacgttccttgttgatagcttcataaaaactactaagtagtttcaaatgcatagtaaaagcacaattttatcttaattttctaaaatgtccagtcatgtaaaataaagagatcaaaaacagaggaaaaaaatttcattacaattttttccttcaaaaaaatcaaaacttaattccaataaatgagaaggaatgttagctgacaaaaatgaaaaaaaaaaaaaatggctgggagcagtggctcatgcctgtaatcccagcactttgggagtccgagtgggaagattgcttgagatcaggagtttgagaccagcctggccaacatggcaaaaccccatctctactgaaaatataaatagttccagctacttgggaggctgaggcaggagaatcacttgaacccagaaggcggaggctgcagtaagccaagatggtgccactgcactctagcctaggtgatatagggagaaaaaaagaaaagaaaagaaaagaaaaagggacataatattaactttggggctggtgtttagtttgtggggatagtttctgtctcctgaaccctggagggaaatgcaacaaatctaaaaagtagtagaataaccccaaaggtgtgttcatgaatgtttaaccatcagctcccaggaaaaaagaccctgattttcatagtggggcctagattttcatggcaggatggaatgaatgaatactcccactatggccagcgtagagctaccaaaatggggctaggaagaggtgctcacactcagctcactgggctacaccattccagcaaacactgcccaggccacagggtacaggccctgcctgatccaaacccaaacttcttttgagctcctccatggtattcagtggccttttttgaattccttaaactcttccagctgtttcttttctcaggctcttcaccacattctgccttctctacttagaatactgcctacctagaatactaacctcccctaagtcctcctcatcctctagatctcaggtttctgatatacacacacacaaagcgagaaagcagatcgcaatataagatgttaggggtttttgggggtgttttgtttttgagacagggtctcactctgttgcccaggctgcagtgcagtggtacaattatggcgcactgcaaccttaacctctgggtctcaagcaatcctcccacttcagcctttcaagtagctgggatcacaggtgcatgccaccatgcccagctaagtttttgtttgtttttgtagaaacacggcctcattatgatacccaggctggtctcgaattcctagactcaagtgatcctcccacctcagcctcccaaagtgttgagctaacaggtgtgagccaccaagccccatctaaaatgtatttcttaaccagatgcagtggcacacttgtagtcccagctacttgggaggctgaggcaggagaattccttgagcccaggagttccagcctgcacaacatagcaagacctcatctctataaaaataattaaataaaataaaagcatttattatagttcatggccaaaaacaagcttttaaagaccactgccctagacactgccaagatatgcattctcctccagactttgattttatggatttcagattggcaatccccatccacctctgtcattaccacattgtctcacatgtgctaatttattctagacctggaagccagtgaacctgctttcctgatgactacatacctctgctctaaaccaggaaatgatgacttcatagtttcactcacagagggttgtttttccccagttcttacatgttatacgcaataccttcaagcctcataccagcaacacaaattatatttcatttatttccagtgttgctattgtaacgtgatctggagtaatcattcagtaatcattcagacttcgaatactttaacatccctctgaaaaaagaatgtacttaggacatgaatccattggtcagaaaaaaaaaaaaaagaaaaaaatgaaagaaatttttaaaaagaatgtacctcatatctcaaccaagtcattgaaatacaattgaaattccattttaaagcgtcattaaagtcattctaatcaccttacaaacattgtctttaaataacagggtttatttatatcgttggtatttatttccattgacatcattttcaagaaagcactatgaaattctccaaggccatgtacttttcagatacctatttctctttctctcttgctcttatctctcctctctccctctctctttctatttttgaaaaagctttttaaaatttctttaattaacaaattggtacctgaatcagaataatggatctgtttttgtttcctctttaactttgttactttatgtcatgtaattattgaatactgaatatcttttctatatctaatcatgctttatcttctctttaacaactatagaacaattagaggatctaaaattaaatttttatcccctaaactttcaaagttcacagcatatgtaattttctgaatgccatctgttagggctttattaagcaagttgttaatgttatgtagcaaacatgtagcagaaatgtcactaacattttaaattgtgctctaaaatatgtgtaggcattataaactagtgatgtcttctttctcattactgtcctcacttatttctaatactgcaatcagagtcgtaatgtgtctcttttactttcagttcctgccatttatttctggtatgatcatcttgatttactattattagtatgattgggtcattat

SEQ ID NO: 535 - DNA, 3123 bp, Homo sapiens
cacaacgtgtgttgctttccgctcctcggaacatccgggagagttgacttccggcggcttgtgggagtgctggttctgtcctccttgcgggtgcggagatggttgtcttggttacgggtcctaacggtcccctgccttgaaatcccttgttgagggcctgcaaccttgtgcttccgaccggagacgcctttggtccctcggtgtctgcactggctgctggtcaaggcttcagtgtggagtaattgacactttcgagaatattaaaatcaaattagagaagaaaactgatccataataataaaaatgtctcgaaaaatttcaaaggagtcaaaaaaagtgaacatctctagttctctggaatctgaagatattagtttagaaacaacagttcctacggatgatatttcctcatcagaagagcgagagggcaaagtcagaatcaccaggcagctaattgaacgaaaagaactacttcataatattcagttactaaaaattgagctatcccagaaaactatgatgatcgacaatttgaaagtggattatcttacaaagattgaagaattggaggagaaacttaatgatgcacttcaccagaagcagctactaacattgagattagacaaccaattggcttttcaacagaaagatgccagcaaatatcaagaattaatgaaacaagaaatggaaaccattttgttgagacagaaacaactagaagagacaaatcttcagctaagagaaaaagctggagatgttcgtcgaaacctgcgtgactttgagttgacagaagagcaatatattaaattaaaagcttttcctgaagatcagctttctattcctgaatatgtatctgttcgcttctatgagctagtgaatccattaagaaaggaaatctgtgaactacaagtgaaaaagaatatcctagcagaagaattaagtacaaacaaaaaccaactgaagcagctgacagagacatatgaggaagatcgaaaaaactactctgaagttcaaattagatgtcaacgtttggccttagaattagcagacacaaaacagttaattcagcaaggtgactaccgtcaagagaactatgataaagtcaagagtgaacgtgatgcacttgaacaggaagtaattgagcttaggagaaaacatgaaatacttgaagcctctcacatgattcaaacaaaagaacgaagtgaattatcaaaagaggtagtcaccttagagcaaactgttactttactgcaaaaggataaagaatatcttaatcgccaaaacatggagcttagtgttcgctgtgctcatgaagaggatcgccttgaaagacttcaagctcaactggaagaaagcaaaaaggctagagaagagatgtatgaaaaatatgtagcatccagagaccattataaaacagaatatgaaaataaactacatgatgaactagaacaaatcagattgaaaaccaaccaagaaattgatcaacttcgaaatgcctctagggaaatgtatgaacgagaaaacagaaatctccgagaagcaagggataatgctgtggctgaaaaggaacgagcagtgatggctgaaaaggatgctttagaaaaacacgatcagctcttagacaggtacagagaactacaacttagtacagaaagcaaagtaacagaatttctccatcaaagtaaattaaaatcttttgaaagtgagcgtgttcaacttctgcaagaggaaacagcaagaaatctcacacagtgtcaattggaatgtgaaaaatatcagaaaaaattggaggttttaaccaaagaattttatagtctccaagcctcttctgaaaaacgcattactgaacttcaagcacagaactcagagcatcaagcaaggctagacatttatgagaaactggaaaaagagcttgatgaaataataatgcaaactgcagaaattgaaaatgaagatgaggctgaaagggttcttttttcctacggctatggtgctaatgttcccacaacagccaaaagacgactaaagcaaagtgttcacttggcaagaagagtgcttcaattagaaaaacaaaactcgctgattttaaaagatctggaacatcgaaaggaccaagtaacacagctttcacaagagcttgacagagccaattcgctattaaaccagactcaacagccttacaggtatctcattgaatcagtgcgtcagagagattctaagattgattcactgacggaatctattgcacaacttgagaaagatgtcagcaacttaaataaagaaaagtcagctttactacagacgaagaatcaaatggcattagatttagaacaacttctaaatcatcgtgaggaattggcagcaatgaaacagattctcgttaagatgcatagtaaacattctgagaacagcttacttctcactaaaacagaaccaaaacatgtgacagaaaatcagaaatcaaagactttgaatgtgcctaaagagcatgaagacaatatatttacacctaaaccaacactctttactaaaaaagaagcacctgagtggtctaagaaacaaaagatgaagacctagtgttttggatgggaagcacctgtagaccattatatactcctgaagttctttttctgatggaaaacaaaattcagcttaatcgtgtactcagcattttttaaataacaatgtttatttgaactaatattaaattaacaaattcagtgtaatcaaaatgtgtaaagaacaatcaatatactttatttttttttctattttataaaataaatatatatgctatgctttaaattttggagctttcataaatgttcaatgcattttaagtgtgtggcttataaatattttggtgagtatttttctatactacgtaaattctgagtttaaatgtcatacacaaatactaagacactttgcatttttaaaaattaagaatcatttgtgaagtccactacgaggtacttcaaaagcccagtaatggtggtcagataccatgtagatggatacagattgttgactcttttgaagttgtttttttcttatattttatattaccattaaccaataaaatctggcagaaagtctgctattccattggtaaagtgaaaa

SEQ ID NO: 536 - protein, 749 aa, Homo sapiens
MSRKISKESKKVNISSSLESEDISLETTVPTDDISSSEEREGKVRITRQLIERKELLHNIQLLKIELSQKTMMIDNLKVDYLTKIEELEEKLNDALHQKQLLTLRLDNQLAFQQKDASKYQELMKQEMILLRQKQLEETNLQLREKAGDVRRNLRDFELTEEQYIKLKAFPEDQLSIPEYVSVRFYELVNPLRKEICELQVKKNILAEELSTNKNQLKQLTETYEEDRKNYSEVQIRCQRLALELADTKQLIQQGDYRQENYDKVKSDALEQEVIELRRKHEIASHMIQTKERSELSKEVVTLEQTVTLLQKDKEYLNRQNMELSVRCAHEEDRLERLQAQLEESKKAREEMYEKYVASRDHYKTEYENKLHDELEQIRLKTNQEIDQLRNASREMYERENRNLREARDNAVAEKERAVMAEKDALEKHDQLLDRYRELQLSTESKVTEFLHQSKLKSFESVQLLQEETARNLTQCQLECEKYQKKLEVLTKEFYSLQASSEKRITELQAQNSEHQARLDIYEKLEKELDEIIMQTAEIENEDEAERVLFSYGYGANVPTTAKRRLKQSVHLARRVLQLEKQNSLILKDLEHRKDQVTQLSQELDRANSLLNQTQQPYRYLIESVRQRDSKIDSLTESIAQLEKDVSNLNKEKSALLQTKNQMALDLEQLLNHREELAAMKQILVKMHSKHSENSLLLTKTEPKHVTENQKSKTLNVPKEHEDNIFTPKPTLFTKKEAPEWSKKQKMKT

SEQ ID NO: 537 - DNA, 205388 bp, Mus musculus
  misc_feature (1)...(205388): n = A,T,C or G
taattcttctgcctgtatgcccccaacattactgttcatgttgttaagacctaacagaagatcatggatgcacatggatgcatgtgtacatgaacgtgtgtgtgtgtatctgtgtgctgtgtgactctgagtcatatcagagttttagacagtgattcctctcctactggattgcttcactaacagaaataaagacgtagatagacaggtgtcttctctgtctacagaaagctcttgttctgtggatttttttttaacttcaattacaatggactgaactagtttggtttgactagtatttttttgaccaacaggaaccaatgaggtctataatagagccatttctatatccagtccaagaactcacaaaacactaaacagagcccatgtgatttgggtcctgacccctttgaacactaactgatccctgatctctgaaaagcacctcaccttctttcttggagagtcttctgacttagctggttatctggcaagcacgttctaacttttaggttgggaggacctgtttccctaaagacaaatttcctggtcatactgggacaatgaatgaagtcaggaaagccagctcatagtgcgtttaaagcttctcattgtgcagagttgatagactgcttgatatcactgtgatcaaatggtaaagacaggtacaacccgagccccttgttttgaggacaagtcagttctatagtctaatcttttttttttttaataaatcatttttatttatttcatatatgtgaatgtgctgtcttcagacactccaggagagggaattggatcccattagagatggttgtgagcccccatgtggttgctgggaattgaactcaggacctctggaagaacagtcagtgttcctaacctctgagccatctctccagccctgtagtttaatcttttagttacatctttttcattatttttttttaatttttgatcttttggactagggtttcaatatagcccagattgacttcaagcctacaactcccctgctccagacccttgagtacccgaaattataggtcacaccccaatacttggcagttatcacagttctagagtatgaataatatttaagtctttccccatatttttaggagaacgaactgagaccataggaaggttatttctcctgttgaatatagttagtgggagattaggtagaaattctctgcccaagcagaaagacataaagaaaaccataaatatgttgtaggggaaaggagagttggttatttttggctttgactatccttactaaaaatatctttctaggaaaaatgtcctctttattttgttcatttcactgagcttcagggagagaacttctgtaaacacaggctcattccttctttcccaggagccccaatagattattttaaagctaattctagggtaagtccctttgatgtcattgctctcacttggagaattacaatatggctgcccaattccggctgtaatgagagaccctgagagaaagaaatgccttaagtttatgtgaataatttgagtgggatggtgtaaaattcttctttaggttcaaaaagaaaaggaaaaaaagaagaaaagagagattcagaaacgtcttaagatctttactgttggcagaaaataacccactgctctttaaattgctggtttggccccatgttttgaaagttgccatctcagttgatctcttaatgacatgtctgcccatccagggggaaggttgataagaaacaggagcttcttgtcttgtctctcgcttcttggctggctaaccattcaatagaattcgaagatacatttaggaaccctgccctagtgctctagggcaaagcacccctcctccacaagctgccctgagaactccaatctgcctgctgatgggggaacgcacctttcgaagttcttcatgggcttcctggtgcttgcatttcccctatttccttcatttctttttttttttttttttttttttgagaaacaattttttttattaggtatttatttcatatacatttccagtgctagagaaacaatttttttttattattaggtattttcctcgtttacattttcaatgctatcccaaaggtcccccatacccaccccctcaatcccctacccacccactccccctttttggctctgacgttcccctgtactggggcatataaagtttgcaagtccaatgggcctctctttccagtgatggccgactaggccatcttttgatacatatgcagctaaagactgcttctctcccttcccaggctttcatgtccaaatacagaattgtaccttcctgtctgaatacctttatgtaagggctgtcaacaccataatcctctcatcgttaaccctgaaggatgcttttttaatgggttgacatggagtaattagagatgggatcattataattattgttatatatattataatctttatctactttctagcagtgattcttgttagttaggctgctagaaagcacaagaaatgcacatgtgatccggatgttagctgtctgtgaattcacaagggcaagcactgtcatgagcaatgatcaggttctataaaaatttgaatgattttattaggctaattcccactgtcgtctgctgttttcaactctgcccagtaccagatccctcatccctttgccctgacatcattcagtttccttccaagaagtttcccatcctattcatcccaagtcctttcaatcatactcaacgcatatgtggcgagaatcatggatctaagatacactcctgatgtaccaaaatgttttctaacagagtcaatctgtctttgagaacccagaataatgggataaccaatatgggcaatttgccctgagggacactcagcagtgagtgtctgaagacttttgatgggtacatctacagggactgtactgacatttggtaggaataagaaagggaggctcctaaatagcctacagtatccagtgtaggattgaccctccgaacaaagagttatctagttcccattgtttttaatgcttctatcaagaacccctgcagtaatttttgcattggctgcaataataatcagaagttttcttttctccttttcttgtttcttgtttttgattttgttttgagacaggtcttctgtggtagctcaggctcgtcttgatcttactacatactcaagtataatattgaattcctgcctttacctcctacatgctagaattacaggtgtgtaccactattcctggctaatcagtgattttttttgttcttacactagacacactttgttctgtatattgagttataaatcaagaaccaaccagggccgggcgtggtggcgcacgcctttaatcccagcacttgggaggcagaggcgggcagatttctgagttcgaggccagcctggtctacagagtgagttgcagaacagccaaggtacacagagaaaccctgtctcaaaacaaacaaacaaacacccccccccaaaaaaaacccaaccaaacaaacaaaaaccaaccagatacctggctcagtcaggaaatcaacaacatcaagtggggaagaagttatgcttgcataaagaagatatatccaacttagccagaatttgccaagataggtttaaggtttctgcaaggaaagaaagagcagccttcaggagaaatgcaggcagataaagaggagatgcacattttatgtttcaagggagaagcctggggtggtggtttgaatgagaagaattccatgggctcgaatctcaatacttggtcctcagttggcagaattgctcgggaaggattgagaggtgtgttcaagctgaaagaggtaggtcactccgaggcagctttgaggttttaaaggactggagcaacttccattgtgctcttgacctgctgcttaccgtttgacacttgatctctccactgttcctcctgccacgtctttgttccaccttcatggacgtagccctctgaaactgtaggcccaattaaatgctttgttttgtaagttacattatattggtcatggtgctttattaccataatagaaaagtaatctaatgtagaagtctgaaccaggagtggggtattgatcagacagacttttaccatgtattatttatttttcatggcagactttggacctttagactagaaaagcagttgaatgctagaaactgggattgatgagccatcctaccttagaagacagtgctgagagctatgcagcctgtggaggtcctgcttagcaggaaaaggaagcaaggatttcaacagtccaattgcactagaggtcaactttgtgataatttggcaagaaatttggttgctttctgcccttgatctaagaatctgactgagactaaagtaaaaagtgatagattcatttttcttttgacagagtagatttcaagtcagcctaacgttgactatgttgcatgcttattggtaataactcttaatgcagatctacaatggaaaggagacgatgaagcaaaaggaaatataaaatgtacagttaaagaagaaaagaagctccgagaaaacaaaaaaatacatggttatttaattgatggggatagtggggtagaactatgtgagacctatattttagcaatgttagactatttctgaaatctagcagaatgctgaggaactgaatgaaagaagtagcaacggtgggaaggacagagtccactggaaaaacaaggaaaagaagattgatggaactcggaatggggcagacttgcagaggagagatgcagtgcagcatcatgccacaaattgtgagctctgtaccgtccaccatcacagagaaggaggaggaaattgaagtttgtggcatgagatgcaaagtcaagtttgaaaacatttgtgtcatacaagttttctcacttacaaaactaatgtacaggggtggggtggggtggggatggggacctaggtatggtggtgcacatctttaatcccagcacttgtgaggcagagacaggtggatctctgagtctgaggccagcctgttcttcaaaatgagtttcaggatagccagggctactagtaatagacattgttaagccccccccttgtttactatgtagtaacattcattaatttcaaaaatattaacagttagctggtcttgatggcacacaattgtaaccctgcaatgtgaaaaactaagacaaaaatcaggagttcaagtccagcctttgctacagagaaagtttaaggatagtctgggctacaagatattctgcctcaaaaatatattcctgatttaagatgctgcattaagggaaaatatatatatatatatatatatagtatttttcctcctagaaatatatttaatgaatttatatatttgtaataggggcttactaagttgtccagtctggtctgctatttctggctcaaataatcctcctgctctattctctcaagtaggtgaaacccaggggcactcacctatatcttgctctttgtagtatattttaagcctctttctgtgtcattgactatcttatgtttttttttaatgatggcatggtatctaactccagggaggaacttctatctattctacctcctcaattaggggaggtcttgatttctttgggattctgactttgaaaccagtcacacaaaggttctcacagttgattttgatttctctagagagtggagcaaattgtgattattttatggtgcaagacaggagcaggaatcagagctggtgaaaggagtgtgattccatgggtaggggaagctacatagaagcttacacaagatgagtaaatcaatcaaccccaggatccactggagaagaccaactagccttgtccgtcacaaggctgaaaacggacagccgaggttttctgtctgaattcagtcagtagaggagacagctgctctgagaaagcatggccccaggtgaggctgcttctgcggtagaggccaacctaggatgtgtgacagctggaagcgtcacacatcctgatgtgtgaccatacttcccagtgttgggctgcaagttttcctaaaaaagaaggtttgggtgggacatgtctgcatccgttgcagatgttcagtctgtatttgtctttaggatgcagtcccttaaatagaccatggggatttttagccatgtgtgtaaaatgagtttctagaaagattgtggccctcatttcaccaattaaatgaacattgcatcccattgctaatgcatagaaaacagtgcaactatattgcttgtttacttaattttttctgtagcccaggttggcctggggcttcctgccctccgtcatcagcctcctgagtgctgtgactaaaggtatgagccacaagctctcctctatgttttctaaatattgaaaagtaccctaacttttcttggacaacacattttctgatgcttaactttttaaactatttaaacatctcatcttgttttgtgtgcctgacctgagtgtatggctgtgcaccatatgtatgcaggatgcttaacttttttattatgtttgtatttgtgtgtgtgtgtgtgtgtgcatgcacacacatgtatttcagcacatgtataaaggtcagaggacaacttacaggaatctgtttttttcttctgccatatgagcttccagatcaaattcaggtagtcagccttggcatcaagcatcttttcctgctgagccatctcactggtcccagatatttaatttccatgaaataatgaagcaaagaattatgcttaggtgttctgagtcgtcaacctgctgccttaactccttaagatgagccgtggctggtggccaagttgactttaaaccattttcatggttctatacttcttgcaatatcttcatttgaacaagtaaaatggcatccccactcagtaggaaaattctgtatgtgaaagcagatacgtgtgctcgtgtgcgcgcatgtgcgctcacacacacacagtgtgcccaaaagaaaagaatacctcttttgtggtatgtatactcatgggcttttacaaataccatcatatttaattgttttataaaacaatcctttcactgggcagtggtggtgcacacctttaatctcagcacttgggaggcagaggtaggcagatttctgagtttgaggccagcctggtctacacagtgaattccaggacagccagtattacacagagaaaccctgactccaaaagccaaataaataaataaattaaattaaaaaaataaaatgatccttttgagatgttactgtctccacacttctcagacgatgaaactggagatctggtatctgataacctaagttgttctgggtcccaggcctgtgcacttctcatcctgggcagctgcctgcagagtgaaacattgggctctgcagcaatgtattagttgcttattttcctgtgagaaaacaccatgactaaagcaactcatgatagtttattttgcctcagggtccataacagctagggaggctttttaaccacacccagaagacagagagacagagagagagagagagagagagagagagagagagagcacaagctggaagcaaggtgaagctgtaaacacccaaacccagctcccagcgacatacttctccagcaagcctgcacttcctaaaggttctatagcccctccaaacagctggggaccaagtgttcacatacttgtgtctagggtgggcatttcttgttcaaaccacttgtgaccacaggaggcatttcagatagcatgtgcttatataggaatcctaagaacttcctgtcccgctgcactggcaatactgaagctctggtattctatgtatttcagtatgatattttgtgtctttatcagggtggtagctcacacttgtaatttcagcactggactggccaaccaaggtatggggattggcatgaattccaggccattatagcctacactaatgagggcttgcctcaaaacatcaacccttccctcgctcccttaaataaaaccatttcgcgttatattaagtttttacttcatgtttgccaaagacagcagttttgtgatagagaaaaggagagaaacatcttcctgttttctttaaccatcccactctcctctagggtttggcctaataagagtgtaggcagcaggcagagagggatggtccagtcagtggcctcctgccatagcaagaataatccctgaagtttgtcagccagctcttctaagcagacccagtgattacagcaggccaattaaaaaaaaaaaaaaataaggcttcgggataaacagaaaccatcaccccaatccagatggtcttcattcacaagagcaagtgggttccaacccagcctttagatctaacttccaggaggcaggaagtactgggagagaaatgtggtgaagacaccacaaagaagccataagacaaatccagaaggcaacttgtttctttcaacacacgatgccattccaaaaaaggaagaaggggcttgaggaggaggcccttctagggtaaaaaatccgcaatcaaacggaatgcagattctctgattgcctcgaggtctaggtaagtcagctgcaaaggacgctttggcatcctagggaaatccgagcccggttgattagcaattttattggctttatttagttacatgtgaaaatggtctatgatattgcaggatagtgttcgttaaagatgaactgtatcctgggatatttagagctgaaatgtatcctactttaaacctctctatagtgagataagcccaagtgctaatgatcattaaacagaagctaggctgtttccgtagacaagattctctgccatacgtttgaaaatttctttaatcacacacacacacacacacacacacaaagaaaaaaaagaaaaaaaaaagaaaagaaaaaaagaatgaaatgttgcgtctcctccagaaaagaagggctgatcttatcttcttccataggtcaagtaccctggttggagcccagagagtccccagagtttccttggagagatcgcggggcattggaccacctgtgcactttgctggccaggccccgagcacttactcaaactctctgctcactctgaataaccagtcacctttgccacaccacgaagggtacaggttttgattctccgggggagggcgggccaatgtccagaactgggccaagcaggcaggagaggtgggagaaaagccaagttccttcggttcaccgtacccttgaggcgagaggggaaatgaagccacaggtcttccccacggacccacctgcgatcgggggaggagcgacgccagcccagactaggggaccagccgccagtgcccaggccggtaccctcacctgcggccggaagccggggcagtagcggggaccgcgcagcatctgggaccggtcagcgagctccgtggagccggagggtagtggcgtggaggcctggtggctccgcgtccccgcgggggaagtttcttggcccggaaaggtgcaattgtgtgcagctattcctggtatgtcaggccgcaggcagaaggggcgccgcctcccgagagagcccgggactgggaaggcgggtagaggcgggaaggatgccggctggggcgcatctccccgcccagataattctgaccagagaggtggctgcaaggaccctggcgaggggcaaggacggaagctgggaccggcccgtagggggtgggccggggcggggctactgtcgagggcggtgacagcgcttgcgacttttgaagttcccaggagtcccggctccttctgcacaccgcttccagttgcctcttcacctcctcctgctccagtcaggctgaacttgagccgatttctagagtttggagaaagcaactcctgcaaattcttctaggttcctgaactcaaactgcacgtcgctacaaagggcgggggacgcgtggcgtgggagctctgggtcccggcgcgcacccactgagctgctcctctccctctcttgccctagacatggaagggatggaggacgccgaggccgattgctctgttgcattcgcagaggctcagagatgggtggaggtgagtgtcttttccagttctttacagatgaatttacactttccgtgcctgagtcttcttgggtttcccaccaatctgagcttacgtccgtccggtgacctaggctgagtaaagaggcagttttgggtacagtgcaaaatttccctctctagtcttctgatgcctagccctcctcagactttcttgcagatctcccagcgcttgtccaccaggtttgggtatcgcacttcccaaaaagcggggcacagagctaggctggggacctcgggcgcatttcttcgggatgcagttgcttatcacgcacctgggtagccagtgtattcagcacggggtgtgagcctagagagttggggggctgccatccttccctctcccgctctcttcctctccagttgagaaactaaaatatcctaagctcctttacagacggcttgttattcttccagctgtgcctcacagacaagatcttctgttccttttattgtcacgaaggagagatagtctctacatggtcgccttcggactagcctgttttattccgttgctgaccacctaggtgggttgtgcttgtgaatgaactcaaggcaccccacacctgggctctagtaccgagttacaactctagacttatgaggtgactttccggatgggtcaaaagaatccttcccaaagtgggactcagaataactgatggttataaaattgttgcccacaccaaccctgacgtcattttggagttagtggtgccacatgctgttttatccaacagctagggaatttaattcagggcctgggacatgctagataagagcggctactcctgaatcacgcctgcagcccctcaatctacctaaaaattcaaattaggctactaagaatataggggaagctagttctttaaaagtcattttattttatgttttaaagaaatacatgtagggtcccactagcttgaggacctgcttttgggtctctagcacccgtggaaaaaagccattgcaactccaggacaggcagggctgctgaggcagaagtattcagtgtgacttagccaaaatggtggcttccaagtatataccccaacccccatcggaatctacatccacatacatacctacaaacacacacacacacacatacacacacatacatacctacaaacacacacacatacatacctacaaatgctcacacacacacacacatacatacctacaaatgctcacacacacacacacacacatacatactcacacatacctacaaacactcacacacacacacatacatacctacaaacacacacacacacacatatacatacctacaaatacacacatacacactcacatacatacatacctacaaacacacacatactcacacacgctcatacacacacacacacacatatatatatacctacaaacacatacacatacatacacacatacacacctacaaacactcacacacacatacacattttaaaaatatcatgtacttatgaggaaaaaaaataaatgttaaatgttatacttctgtatagtaagagggcaggagatatgagtgacctcactttctagatggtagaagtgtctcagatggtagcttttggtgtctttaaaggctgaaactttgagctgtgccaaggtgacttggagagatgggaggaagggtatggaaggctgggagaagttacaaacactgcattcagaattgaaatgagagtggaaaaatcccagcaatggagttaagagaaaaaataactttgctccttcataaacctggaaaaatcaaggctttacctgtaattttccatcagtggtgtttgcgctgcatggtttcagaaagcaagctgaagtcaccattcacttttttcatatgagtgtatgggatggaagggggaaggggccatttccattcacaccccctgagtctgggtggtattggcaatttggggtcattcacagtttataggtggtgttgcaagacttatacttgtttctgaaactgtgcatagcgttcttttcttacccaggggttagtatctggatcttaagaaagtcaatactatttgtgtatcttagcacgcttacagttgtgtaaaagttctgcgaacaatttgcatactatgacctccttgcaagtgtgatggtctgaaagataatcattatgtgtgtgcatcttctccctcagtcccagcctgtggaaaggcttagcagcagtgctttgacaacttggtatgttccttatttacagagagtacagagtttctaaagctactgtcagattcctttaatatagttacagaaattaaaattaattttttttactcctcacactagttggactactgttaaatgttcttgaagatatttgaatgggttttgtattcatatttgtttatttattcacttatttatttccagacatgggaggcttggatatcctggaactcgttatgtagaccaggctggctttgaactcttggagattacctgttctggttctagagtgctggcactgaaggtgttcagtatcatgcctggcctcatgttcttatttaaaaattttatcatctattctttaggaggaccctgggcatttgaagtcatgctagttggttctcttgttagggtttttgtttgtgtttgttttgttttttcgactaaagcacacacatattaaagacattcctttgtccaaagagcagaatgtctgactttcattgccacacagcccattgctttcaagaggacccttagtttgaagataaagtgttaatttcaaggtattttctgaagcattttggaccatgaatgagatagtatcatacagttctcttgtttgttaatcttctcttctttgttctttctgtgagttttctctacatggcttctgattcatttatctcacgtgtttaggtatgtacatgtgccataacctgtagtattgcagagaagatagcctgctgtctaaatcgtcacctaaagttttatagggaactatatttttctactgtggtgtggcgggggactaaacatagccacctcacgtatgacataggtgctcatccactgagctacctgcctcaccccttcagctgcagttttgagtctcccaaggtccagaaactccaataaccttgtacaactttaaatgatgaccggacttcatgtcagtctgagcttcccatttctcaccagtgacggcaaatgcataacgtgctattcttcacacaaaaaattgatgtagttaaagtttattttgaggggatgtatggagcaagtgggatgtgatgactcttgtcactctactggtttctcttttgcttcatttgaaattatacttcgattcttaagaaaaaaaaatgaagacactaagcaggtttgtccactcgggaattaattctgcagtgaaaacaaatgtggaactggatcccttctagatattgcgacagaatgacatcagatgattatctaggtggaaatgtggtttggaatattaataatgtagcagggctagtttatgattaaacattggtttaaaacagcgtgagcagtggtttgcaggcaaagccctcctagcaaggtcatagagtagatgatggagtggttgaaaacacagcctagactcactaattttagttcgcttctgctgtgccttttaatttcctatacctaatagtttcctctgtctgcttagggacaaacccttaacttaaacagataaagtactgatgagattaaacaccaggggtgcagttcacagcttgatcactggtttccaggctgtgagttctttttgctctctaggtatgccacttaggcagagctgtgtttatggctcacttgattcgctgcttccttgccctgctcctcccccacccccttcctgctatctctgggtttgagtctttcagtatcactatgatcttgtaaaagcacagaagggtgccagcgtgagtacatcgccaagtttggcatcagaataagagccctggctctttgtttacttcccattggtctggtcttctacgtgtcctaagttttatccttcaaagacggtctgtccctagggctctttggcttgcctctgtgcagaaggagtttagaaaagtaaagaatcccttggttttaaacaatggtactttctgggtccaccactgatataagcacagttctacccttcatcctcactaaactgtatcctttctatccatggctgtggacctcaggtctgtaagataccgaatgatcactgaacaccagtgtagtctatagggcaagagaacactcttgtatgtgtgctgttgcttttgaaatatagtgacaaatattcatttggaaacgtttctaaattcagaggagcatatttagtaatacatgtaatttcctttctttcttttcttttttctttctttctttctttctttctttctttctttctttctttctttctttctctctctctctctctctctctttcttctttccttccttccttccttccttccttacttccttccttccttccttcctttcctccctccctccctcccttctttcttccttccttttatcctctctccctccctcttccttccttcttcccttttccccccctgctactcctcctgctggtagaagaggagagcggagtcggcgatgtggcgagggcctcgtggccagtttaggtgtcacaattttccccgtctcaatagtacttacagcccatccacgctgtacccgcccgtttccgaccctagtgttttattcctgaataacgatcggggggagagggtatgggggagcaggggaagagggggaggggagcggaggagagggccagggagaccgcgcttggagcactggggtatgtcagcacactgtaagcacaaatgcttgcttgtcgattctcttgtcgggaaccacccaactcgccctatatactcttgccccctactcaaccccattcaccgcttcgtgtctccgtcctccccgttcccccctctcctttacccatctctccaccccacttttcatcccgcttccacaccggatatcccccacgcgaacgacnnnnnnnnnnnnnnnnnnnnctcctcctcctcctcctcctcctcctcttcttcttcttcttcttcttcttcttcttcttcttcttcttctggatagggtttctctgtgcagccctcactgtcctggaactcacactgtagaccaggctggccctcaactcacagatccacttactgttctgccttccaagtgctaggattaaaggcatgcaccaccaccaccacctggcaatacatgccattcaactgccaagttgaactgtaacgttttttggtatagtgaacttaatgagatatgtaagtggagtatacttgtaacaaatagctgtgtctgagtcaatcactagcagcctactgttcaagtcatgttcaaataagatgagtgccaggtataaccagtggggctgtagctgttcttcacttctatttcctacgttgtttcctttcactgtctacacatgtaagtaagtactcatggttggtggaacagaccccacttctttaagtctatatgggttaccataaaagccacttaactcaccatttcgtttgtcactgctcagtcagagcacttaagtataagtcccaggtcacaaccacctatagctctagccccaggggatccaataaacttttctggccatctgtgtgacaatggacatgcctcccaccccatgcatacatatacacacaaagatatgtatatacatacacacctgcacacacacattacaaagaatgaatacatacatacatacatacacacacatgtacatacatacattacatacatacacattaaaaaatatatacatgcacacacatgcacacaatcatacacacatgcatgtacatatttaaaaaggcacacacttatacacacgtgcatacacatacatacatgcacatgcatacacctgcatgcatacattaaaaaggatacacacacacatgtacacgtacattttgaaaagaatgcacacatacacacatgcatacatatatacatatacacattaaaagaatgtatacacacatgtatacacatacacatatgcatatatacaactaaaaagaataaaaagtcacataggcagttcttatactggctgttttatagaaattttctccaagtatacacctgatcttaataattccttactttctgggaagtcatatgaaaattatttactttcatttttataaatgtgtttagtgaaacaattttagaggccacaatccttaccatgtcattctttgtcctctgccttacttatttatcttatttttctgtcattttcttcctaactacttgtgcagttttctcccatcaagcccctggtgtttgtgcagttaaaggagatattaagtgaaaagcattagtgctctctaagagtgcctgtatctccctatgcatacagcacagttccttccttccatgttggcatttagggaccagcccgttaccgagaaattcctagtttcttcacatttaggctaaaccacccttatgtgaagtctcttcagttagacttcacttctgccgtttcgtcccttttcccatggacatcaccttcttcttaccgtctggtaccgtaggatttgcttttccatcagagacaagtcgccgagggctcgaaggtattcttcccttgagtatttggaatgatgtctgccaatgcttgccgagcacaacatgacaacagtgacagatttaaaatgtcaagctttaacgatcagaactcacctctcccaccattggagttgggtagaatctgttacagtcattctgtgaggactcactgtaggcctggatgccatttgagtgtctgtgtgtgtaagttgtggattcattcaacacgtcctcttggccctgcccctgctccgcatcacagactcattggtctgcttcctgtcttctgctcagtttctttcagagagtcttacactaagtcattcagggaaccagtactagatgcttgcactatgccgggtaccggccattgtgattactttagttgacaagcctagtcctttccctgaacctttccagagaggcatgccgtgagagacatgtgaattgacagcatgtccaggtcactgctgtaaagccacttacacactgtgatggcaccaagggacagcccaggtaggcctactgagtctgacaggacatcctttgagacacagatacactggtctattgggctggggcggggcggattttaaacagatgaggtttgcatgtaatgtaacttcagggcgtggctcatagcagacagttctttccatgaaaatgttgtatatacagtgaaacacatagacgtttgagtgcacacttgtgaggctgtataatgcatccagagtacatcagtcaaggtacagagtgtgtaccttttccactcaagaaagctctagaagtgcccagtgggctccacctctctagtgaggtctagctgcatagatttctgtttttgaatagccaggaaatgttctaattatatttcctcctctccctctcctttgttgagtgacattccactctttcttgaacaaagtatctgtctggcaaataaaaaagccaggtggtggtggtagtggtggtgcatgcttttaatctcagcccttaggaggcagaggcaggcagatctctgtgagtctgaggtcaccctgacctacagggcaagttccaggacaaccaaggttacacagaaaccctgactctgggaaaacaaaaccaaaacaaacaaatagcacacaacaaacaaacaaacgacaaacaaacaacagctcctgggaaggagaggggtggtgccaggccaggaattcctaaaattcttgtggaggtagggggcagattctgaaataggaaccagggcagcaatgttaagagaataacccgactccaggaagcctaagcagcaaggtcaagttgtgaggaatggaagggtcccagcacattcggattcttctatgggtggacgaaaatctagaagtgggtgtgctcataaagtaatacaaaggtcaacctatatcttcagtgtgatggtatcacctagagagtggaccccttgggtcaaaaggtgatgagcaccagcctggagtgaatctggtacccacagcagaatgcggatactttggtcaaggttagaagtcagtgttggcttctttcgtctaaataagcagatgagtagatgccctttttctcagaacactggttatcttaaccattcatgtcatagttgactccttgggttttctccagcgaggaaggtgaagtcaagacaaggcgagttgcctcatttcagtgatgccacaaaaggctaatgtgaatcacacagttggtggcacttcttcagccattggtaaagcaagaatatcctcacgtctatctgctcttaagccaagtgaagcattgtcctttgcagtgtatgtggcagggagggcttagatcaactcagtgagctctgctactcctcccacatcctcctcccctggatgcccaaagcacgttcagacttgacatgtcagtgtttgttgtcttgccctacaagttctggacagacagatctcaagtgtttgatgagtgaatatttgtgtccagtcagaggctggcttatttaattgttgtttttagatcttaagcctgttacctatctagagtgtgtcggagcctgaagaaatgataaattagggctcgttgtgcttactctccagtttccgaaggtaattattgggtgtgcttctttaagaacatgtttgatgtactgaagcttaataaggataatagctgtcatatctgcaaaacagcgaaccagagttactcagccaatcagctcctttactaaagagatgaagctaataggaagcctagagatgaatcacagcagccaaactgacaactttttcaaagattatccaacaccacagacagcatcctggaagactagttctcactcctgggcacagcatgttcagcccagggcttaggtgtctcttgatcatggtgtatagtaccaggatactgtcttagtcttcaagctctgtagagaaggaagagcttagaaaagtcctgtctaggattagtgagtgggcagaggttgtaaaagtttgctggtcacgatgagagagtttgagggccatcacagcatgcagcactaattgtcactgatagggtcacctccactttcttgtgcatgcaagttgtgcacttgagtgtaggtgacagtggagaccagaagagagcaccaagtctggagttggagggagttgtgagcagatcacatgggtgctggcaactgaactagggtctttgcaggagcagtactcattcttaactgctgaactctctctccagccctatctatctatctatctatctatctatctatctatctatctatctatctatctatctattacagtttcctacatgtgtctaatacatcttggttgttaccctcttacccctctcaccattttcctgccagtgaaagtctccttcccaacaagtacccacctattttaatgtctttaaaaagcccaaatacttatttattgatttttatgtatatgtgcatgtgcatgcatgtgtacctgtgtgtgcatgtgtgcatatacacatgtgtgcttgtataaggcatgtgtggtttcctgtgtatgtgtgcacatgtgtgttagtgtataagtgtgtacacagtgtacatgcatgtgagtgtgtgtatgtgtgtacatgcatgcacatgtgtgtgtatgcatttgtgtttgtgtgcatgtgtgtgcctgtgtatgaatgcatgtatctttatgtgtgtgcatgtgtgttagcatgtgcttctgtgtgtttatgcaaatgtgttttgaagtgcatgtggaagtcagaggacagatttcaggagacaattctctttgacaggtgcgttctagggactgagctcaggctgtgaggcttattggcaggcagctctacctgttaaacaatctggttcatctctctctctctctctctctctctctctctttctctctctctctgtgtgtgtgtgtgtgtatgagaaagagagggaaagagagagagagagagagagagagagagagagagagagagagagagagaatagagaatagtcttgggaacatttttatatggtgacattgagttcttctttgagttaaggtatgatattaagtcatatctaaagaatatatctgataagaaatctcatgaaagtgttggtatataacctacatttatgtatcttacatgcttgtatttgatcatacttcaaattatacagctgtttccaacctcatagtaaactttggctttgtaatttttttttctcatgagagcttaaagttttatttcatatacaaaagaaggaagagaaaacaaaaagagtagaccttgtgtctttactttttgacttggtgtctgatcaatttcttgatggggagaaacttgttaatttatggaaagcatccattagacttcattcacgctgggcaggcacctaccctctgtgcttgctacatttcagttctaaatcccagctttgaaaacagaagctccaggaccccacatgatccattctcctcttcctgcctcattccttccaacctcctccataggctcttcgtactcttcctcaaatgtgaaaagagggtttttagcttagggtttgtttcttccagaggacatctgcctctctcggtgatgctacgttctcatacctttctttccctctatgcttgtatgttcatgaccctcaccaggacttggttttgcactttgtatgtgtttgttagtctctagagtattaatgtcttatgtgcaaggacttatttctctttcaagctccaaatagtgctaggtatttaatatgtattcaataagtattttctgggcaaacagaaaggtagattaaagaacacatgtcttttaatgtttaatacttgaaacctttttagcctgtgatgtaactgacttcttggctctgcttcactcaacaggagaagttaactttgtcatgttgggatttagtttttttttttttttcgttctcagctcaagattgagcaagttctaggcgtgattgttaaaaagcaagttcaagccatgaaaaattgactctgctcagtcgattctaaacatgtccccaaagaaacaagcagagtaaggaaaaccctgaaggaaatgtgcagggtgaaagcgagtcttcttagctgataccctatgctagggacagaccatcatcatgagaccgtgggaatctgtttatgcaaaagctctcagtgatttcagattgtatgatagcgacctgtcttagttacttttctgttgctgcaaacagacacatgaccaaatacaacttatagaagagtttttgggggcttacagttcagagggtgagtccatcgcgagaatcatggcagcaggcaggcaagcatggtgttggtggagcagtacctgagagcttacatccttatccacaagtaggagtcagagtagagaaagctaactgggaatagcatgggtttttgagacccccaaatatccccactattccagatacctctctaacaaggccacatacctcctaatccttatcaaacagtttcccaactatgaactaagtattcaaaatatattagcctatgggggaccattcttattcaaaccaccacacagaggagcagaagatgccttcactgtatctagagataaaagaaatgataccctgtttggtgatgcatgcctgcaaccccagtaattgagaagtacagacagaaaagattgcaagtttagtgctaccttaggccatatctcaagattccctttgaaaagggaagtaataaaatcatgggacatttgagagcagcaaacagtctccttcctgttctagcacacgcaccaggactccctgaattttgtagtgctacactttatatgcatttttagaggaattgttctgaaagactacatacaaccaagcatggaagatttcaaaggagctttgttcaggagcgaagggaagggagatctgaatacagatccttgtccgcgtctgggttggtacaccctgactttctctcattgtgcctttttattattcttccaaagtgtgacataaatgaaaggctccttgctatcacgataacttctttttaaactggcaagaagaggagagaggcccagagatattgagcttctttttaagacctcctacggcacactgctggcagaactgagctctaagcagcatttgactttagcctcaccgttggaaaggtcacggccggtgctcatctgctttgttagtttgcattttctcctctcttcttgcccacctgctttctggtgtctttggtagcagcacctgccgaggtgacatgcgtatctcctgccatcttattggctgctcctgtatgtgtcgctatcttgctttcttttcttatttctcaaatggagcttaatttaaagatagaaaaaaacaaaaaaacaaaaaacatcagttgtgggaatgaagatgtagaccagttggtagaatgcttacctagcacacatgtccccagagagacataaactgccctctgaaggtggaagcaggaagaacgcaagttcaaggtcatcctttgactctgttgcctctgggccaggagtgagttggaatatcatggtaagagtcatgtaacagccgggcgtggtggtgcacgcctttaatcccagcactcgggaggcagaggcaggtggatttctgagttcgaggccagcctggtctataaagtgagctgcaggacagccagggctatacagagaaaccctgtctcgaaaacccaaaaaaaaaaaaaaaaaaaaaaaaaaaagagtcatgtaacagagcagagcagctcacgtggtggacaggatggggcgccacctataataagacacacacctcaagggaatctcacaccctcaacctatctcttctagccaaggccctaaggtttccaaaacctccctgaatagtgtctccaggtgggcaccaaaccttgaacaataaatcaaaggggcatttcttttcttttctcttgaaaaaaaatttacttaattttacttttatatgcattggtgtgagtgtgtcagatcccctggaactggcattgtgaccgtatgggtgctaggaactgaacttagatactttgaaagagtagccagtgctcttaaccactgagccatctctccagcccccacaggacatttcttgatttggattgtaacagcccatagtgcataaggacagagacctgagctttgagaagtgctctgaccctctgctaggacaggtgaaggaagataggggatgcagtgggccaccagacctagagagaacacctgactgttagctgctgtgaggagctctaggtacatgagattgttgtaggaaaagagaattttcaacagtgttcaggggcgtggtcgtgaaaatttgcaagagcattatctcccatttgttaaaaataccatttgcgagtgttggtgggaccagcagaatcttcacaaaagcctttgtagtgggccacagtccaggcacagaaactttctgagagaaaagaccgaggagctaagataccaatattctctcaagaaagaatatttatttgtgttaacaaaatcatccttacctcagtttacctttctgggtatttggaggtccaaaaggattgtaatcaaaaccagcaaatctgtggtttcaagttgaaatgctaagttggagggttggagttgagatacagctgtagttaagcaatcccttcttctacactgaagtccccctgaagccactttcacctcccctgcccttccctccctagtcagggagtaacagttcttccttccagggattttagctcaaaataattttgtgaggagacttttagtttcaaattttggaattactgtatgtaaacgggtttggttttgagactctaagagcttcaagtcatattaatcaaatttaattgaggactagacaaggcttttctaacatagagattcagagttgctgtgcaaataaaggtgtattcttttggagtgagaaaagcagggtagcttataacttacaaagatctgcttgccagaggattagagacatgtgaggccaaagctgactatacaaatatgagttatggggctggcgagatggctcagtgggtaagagcactgactgctcttccaaaggtcctgagttcaaatcccagcaaccatatggtggctcacaaccacttgtaatgagatctgacaccctgttctgacacgtctgaagacagctacagtgtacttatttataataataaaaacatctttgggccggagcaagcagggactgagtgagcagagttgactggagtgagtggggccgatcagagcaagcagaggtccataaaaattcaattcccagcaaccacgtgaaggctcactaccatctgtacagctacagtgtacttataaacataaaataaatatataaatctttaaataaatatgagttatggtgaagaatcttctatacactcttgtgtgtgcatctatgcctgtttgtatgtgtgtgtgtgcacatgtgcataaatatatgcagagatgctaagctgatgccgagtgtttgcctctagctctctctgctttatgaggctgagctcagggctcaccctttcaggctactctaactagccagcttgccatggggatctgcttccaaatgctgggatttcaggttgctgccacgactgtctgagtttgatgagggttctagggctatgaactctggttttcatagctatcattttatttactgctaacaannnnnnnnnnnnnnnnnnnngggagaggggagtatagggtgtgagaggagggaaagggggggaggggggggaggggaagcaggggaagggggatagaggagagggggaagggggggaggagaggggggaggacctcctcctcttccccctcctcctcttcttcctcctccttctccttcttcttgattttatatatatatatatatatatatatatatatatatatatatatatatatatacatatatatataaataacattgtctctttagagataccagaattgggattcagacccaattacagatggttgtgagccatctctccagcccctcagtgcaacttcttaaatctgcaataaaataaccatttaccttaagggcttaaagttggaaaggaccaaaaggcaagagcagtcatcttgcagatagatgttgcttttcaatcttcctctgcttctcctccctggcttcattctgacgtggtccctaccagttctttcttgttctgctttcttactcctcttgctactgttacaatatagctgacaaaagccacttaaggaactgctcattttttggctactttgtgtcatggtggcatcagtgtgaggtaggtagctggttgtattttttctaccaccagggagcagggaaagatgaatgctagtgttcagctcaccttctaaagaatcttggatccgatgaatattaccgtccacattcagaatgggtctttttactcctcttcctcctccttctaattctttttcatttttaacaatttatttaattatgatgtatatggtgttctgcctacctgtatgcctgtacaccagaagaacgcaccagatttcattacagatggttataaggtgccatgtggttgctaggaattaaactcagaacagccagtgttcttagcctctgagtcatctttccagcttccttctcctcttcctcctccttctttggtttttcaagacatggttcctctgggcagtcctgaatgtcctggaactcatgtagaccaggctggccttgaactcaagagatctgcctgtgtgcgacacacacacacacacacacacacgcacacacacacacacacacacacacacacacacacacacacacacacacacctggcctcacttttaaaggtttaactcttgctggacacagctagacccatattctaatggtgatttaaatccagtcaagttgagagttaagatgattgactacaagcttggagagacttaggtttcatctcagcccaaatggtggctcataaccatagatgactcgagtcgcaataaatctcaggccttccagcctccttttgggccataggtgcatggtgcatggacagacgcgcagcccaaacactcataaacataaataaaaatcaatacatctgaaaaaagtttttaaaatgatccataacacccacgaactgccttataaaagatgagaggctagttagcttacgggggactgtttacagtggaggaaatcaattccacatttgtctcgctggaaacgcttttagatgttcttactttccgtgattcttccttcttaactggcatcaagtaagatgaactgggtgtgtacactcatgcattaagggttttttttttccaaataaattattttttaatgactttctacaggcatttatatgtccgtctcagctagtctttgttctttatgtgcctttttcatcctctaagttacctcttatgtgcatgtatgtttgagacacgcatcctgttaatttaccccgtctgctgtattcagtctggaaaagacaattgccagttcttctccaagaaggacgctttatgatgttcttctaaaaatgagcccttttagaaaagaagacaacttttatagttcatgaaaaagggggagtgcatttttaggtattttattcaaaggatgaagtttatacaactgtctattttgaagccaatctgcaaacattttttagacttggaaaatgcttgtcagacctgaaaggtacaacttgccaagtcgctgatgcttttgaaatttggacttaggtctggtagaagaatgtggttgacagccacactgccatttacagtaatgctttttatgtaaggaaatgactcctcttggcttaataatttccagatgtttttctggctccttgatgattgcccaagtcacttaaaattcaggtttccatatccagcttactgatggcaaccttcacttcttaggacgtccaatgcgatgttaaagtgctttgtaaaagtaagcacttttggggaacttgcaacttaggtgggctgtcgggggggggggcacaagcttaagatgtggccagtgtttcagcgcttggcctgtgactgaaagcttgcccagggtctcttgcttggggcatgtccaggccttaaaaggccccgacttgaagaaccatgcggaagtcttgccaacaccataaagaactttccccaaagcccatcgatttgtgagggaatcgggaatgctcccagctggaactgtaactgcttttttataaggtgcttccattgtttaggggcttgacgatatcaggtagacaatgtgtgtctctcatgctttttcccaatgtttcctacccttttcctttgttatgattgccattcaggtcgtagcgcccagtgatttctatatttcccccattcctgcattttctattgtacttagctgttttgttctcattttcctttcaaccttcatctaagttgcaagcctctttgaagcatctcgtggtttggtcccctgtcttttattccgtgtagccagtcgagctcttcatatgatgttgctgtagaaggaccagtggtgtcagtgtcttaagttccagtgctgttgtttttggtcttgaagagaaatgtgcagtgtgttgacagtgataatttgaaagcagaagctgatgtgtgtgtgtgtgtgtgtgtgtgcaagtgtgcgccccgccccccccccacgcctccatgaacacatatgctgatgatggaacttagcatatactgtcttgctgaggacaattctgtagctcaggaattggtcttgttaaacctgtgtgtgtgtgtgtgtgtgtgtgtgtgtgtgtgtgtgcgtgcgtgtgcctgtgcgtgtgcgtgtgtgtgtgtgtgtatgtgttgaagtgctccttcaaaaaagaagataatatttattacaaatattgaatgctaagttagggtacttcaaacactattctctggccaagaaaactggcagtcacgtgacagtcacgtggcaatcacgtggccatgcaatctgtctcaggaaaaaccctccactacagctggactcaggtatggttcggtttcctcagcagcatatgcgcttctggtggtaactctccttaaatgagattgacgtggccctccacttactacgatcaattacttctctttgcctcaagctccatccaaggaggtaccatagcagcctgtacagagccttcaggaaatcagactacaggagctcgggactttgcaggtcacatctttacgcttacatctttactcttttcactgagtgggatgagactcagtgccttagatgtgttacttctagaaggaagggaagagatgctgaataggcagggggaaaatgccacctggacgagcgatgcattctgtgatgggtttgacattttggggttaagcagaataaactctaggtctaagatcatagtcgactaattagttttctgttattctgataaagttagacgtcaattctgataccacactgcacggatgaggaagcactagctgttatgaagattagaagttcttgtatcaggatcaacttagtaaagattcctaatcacgtaatgtgtaactgatcttagagttagaaaataaaacacactggaccgtggtgacccacgtctttagtcagtccccgacttgagagacagaggtaggcagatctctgagttttaggccagcctggtctacagagagagagagagagagagagagagagagagagagttccaggacagcaaaggagtcaaggttaccctgtcttgaaaaacaaattaatagaaaagaaaagcagaaaataaatcgctaaatttcatttgtctttttctttgtagcagtagcgagtagtgtttgctcatggaaaacaaagttaaattgtaaactagcaacaaagtggtttatttttcgtataaaaaagtccttttttttttccttttttcttttttcttttctaatcaccactagactctatcctctaagctttcaccaaataagaaacttgggaaatatatcagaagtctagcaggaaatagatgacaattcacaagcttcccatgaagtcgctttagaggttgagtgtgcagtgcaatggtagagagtcctggtatgcatgaagttctgtgtgggatccctaactccagccagccagccagccagccaaacaaacaaacaataaacaaacaaacaaataagttacccagggagggaggaaggaagtagggggagggagaaattttaaagaaaggtagctctaataaatggacaggaagaaatagaggagcaacaagggacctagagggagtggctggggagggagtgagccatctgactgatcggctgagtatggggaaaacatgatgctgctgaaactggacaagcagatcttggttctgtgaagccagggtgctgactcttggtccctgtgttccacatgctgttgggaagtagctccagagtcctgcttccctagatacccaaagactgtgcatggaaccatgggatcaggcaggtgctcggcttggatttgatattgagagaggaagtatgtgtgtgtatgtatatgtgcgtgtatgtatgtatgtacgtatgtatctctttgtgtctgtctctgtttttctctgtctctttctttctctatctttgtctttctctgtctctgtctctctctgtctctctctctgtgtatgaatgttgatatgttgattttattgttggggatagaaccaagtgcctggtgtatgctaagcaaatgctttactcctgagctacatcttaacctggaactttataccaagtacactacaacatcccattgtgctgaaaaaccctttagaccttttgtaggtgggttgtattgtctgaggaccagagagatggttcagcaggtacagacacttggtgctaagcttgatgacttgaattcaatcttctggacccacttggtggagggcgaaaactcctctgaccagctgtcctctgactttcacacatatatcatggtacatgtgcatgcatgcacatgcgtgcccacacacacaaatgaggaaattaaatgtagtaaaaatgaaagattatattatcttttgcctgtttctatccaactatacaattggctatttacccttgaaatcgtttttaaaaatgagcaattttcagtatatacagagatttttctttgttgctgttttatgatttcaaaatgttgggctgtaacactttctcttgaatgatggttttggaatggatgcctgccttgtgttgctgaggagttgtcatggctgtggtttctgagatgccatgtttagcctgtggccagtggactaaaaaaggtttagagttagaactagtggcgagaagccaggttctgttttcctataaactatgtggctcttgcacgattccgtcaaccctgttgggtgtgcaaagatttgtttcggagacggggaccagtagcttctatcctgtagcagtgccagtctacgggagccttcatttcatcagccttgcacagtgagtcagtcagcccaatggcgatgacccagtatcattctgtgatgctgtcactgatctgcgttcctctaaatgatgttttgagcttttaacttccaccatttcagaatgtgaccggtttggaaattgtcttcttagcagtaatcaagtgaaagcgaggccagtcgtatggacattgactgactggcatcctcatgcagaggctaactttggctgtaacatcggtcacctgtggtcctgcagacatgcagagtttagacgtctaggctcgagcacagtgtgacaactttccatgagtccaagttgctcgcttgtgctgttgttaacagccctagccaactactgtcctctctgtcacccatattatctgacatgatgcttcttctgtttagtcctgtgggtctgaaatagtttgtgcatgtgtgtgcaatgtgcactctcatgtgttagggtgatgtcagccctcgagttagtggtctggcaaaggaacagttaaagtgttgtttgctctgacattcctacaggctttgaactacacaaactgggaatttatggtccatatccctgccaggcagaagagagaaagagtaccaacctacacagtgaatcagatgccctgtatggagtgacacagtctctctccaggcctgtctgatgctgttacaacaggcatttctctaattaaagatgaagctgagtatctctttatacaccaccttgtgtttctccgtctcatatccgtgtcccgctggctagtagatttcttacacagcatatacagttatttttcagttttattttaatgtgtatgagtattttgcctgtatgggtatatatgtatgtgtaacacatatatatgcctgttatcagagaaggaaaagatggggtagattccctgagattggtgttaaggatggacataggtagtcatgtggatgctgaaaccaaccctgagatctctgcaaaaggagacagtgctctcaactgctggcccgtctttctagtcccttctgtagcatacttttagctataatcttttgttatacttagatgttttaagtctctttggaacgtcttcatttatactttttaattctatttagtttcttcttttgatcagtgatcccttactctgatgtcatagtcgtctgatctttttctggttaccaatgtcatggttctttaaactataaaggcattgttccttttgatacctttatttttaatattcatgttaaagtaacgaagctacattttatgtttgcctgtgatatgaaagccagctttgttcgctggtgtctccggtgctcctggcatcgtacaccgaatctgtcctttcctgctgtgctatttccaaagactgtacttggtccatgtggacacaccctgtctttcttgcttacttagaggcaaaccaaatatcagatggtatggatatctttagtggttttgaaattgacttagttattttgtaattatgtttttctttaattgcttgtatttcaatctatatgggccttttatttcctaccatactgcattctgaaatataggagaatatatatatatatatgtaagtttatatgtatgagcatcttggctgcatgtgtgtaagtgcaccccatgtgtgtctggtgtacacagatgaaggggtggtcagatcctctgaaacgggggtggggatactgacagttatggattccatgtaggtgttgagaactgaatccagggtcctctgcaagaacatcaaatgctcttatctattgaggcatctctctagcctctagtagaaatgtttaagttaagtcttattcttttcggctggcattgaaaaaaaaaagtattgaatctcattctggcgtcttcctgcgtgtgtgtgtgctgttatgcatctttgttctaattcatccttttgttgtttgttttaatgatccttccttttttaaaacaaggttttactgtgtaggccacaggggcctcaaactcctgatcttccttcctccacatcctaaaattatagatgtatgcttggctttaaatttgtgatttttccattttctgttttatgatttgtctggaaagcttttcgaacaatcttgccagtatcttcttaaaaatcacttgactttctagactaacttggggagagttgacatctataccatgttttgtcacatctgtgaacaaggtctgtttccttagttttcaagttttgtaaaacatttcctttatgttaaaaaaaaatatggctaaagttgtaatttaccaggttaaatctagagagccgcagcttttgcttgcttgcttgcttgcttatttatttatgtcggtggtaggaactgaacccagggccttaccctactaggcagataattctgtcactgagttgtatcctcaactctataagtgtctctttcatttcagcatagaaaatgctattgtgaatttatgttgtattcaggaacccaattctccagttgggcaattagttctaattaagaatgattgttttctcttggtataaccattatttctccaaataatcacgtaattgcttttcttccagctcaccactttttcgtgtctcatccatttgctggcatccccagttttgcggcatctcttacttgtgtctgtataaatgcaaatgaaccacagatttctgcttccagttatgttgtgctgggctatggttttgttattagtgctttaaagggaatttatgggccctttcttctagtctcggttttgagagtatttaccacaattagatattaaactatataccacagtgacttttggcttattaaaattgcttgaattctttttctctaagcaataaatgtcgtgacatatactgacagacgctttaatgttaaggtggccttttctagaataaaccctttgacattataaattttagatacatgcttttagcctttattgatacttttctgacgtttttctcattcatattcactaaaatttccctgtccttttggggagagtgcaattgtttatttagaattaaggctttagaagcctcaaaagataaattgtgttgttctttcttgccctagcatatgcataaacctttaagttggctcctttttgtgtatgcatacgtgtgtgcatttcttacgattctggaaacatccgttttattaagattctcaaatgttagtttataatgttcttctaaaagcgactgtaaattactttaaaaatagttatgaaatgcttgctgtcttactattcagatcctggggctatagcaacacaaacaagtagcccaaaatacataaccctaccaggtgcagtggtgcagtgccagaggtagaggcaggtggagctctgtgagttccaggccaacctgctgcacataggaaattccaggacagccgggactacatagccctgcctcagaaaccaaaccaaaccaaaccaaaccaaaccaaaccaaaccaaaccaaaccaaaccaaaccaaaccaaaccaaagagacaaaaactaacaaaaaatataaaaaaaaatcaaacaaacagaaatagctgataatgtatatacaaggttttaggtttttttgcccatttcaccacttttctccgtgttgtgtagtatgggtccacgtctgttttctccgtgttgtgtagtatgcatacacgtgtgttttctccgtgttgtgtagtatgcgtccacgtgtgttttctccgtgttgtgtagtatgcgtccacgtgtgttttctccgtgttgtgtagtatgcgtccacgtgtgttttctccgtgttgtgtagtatgcgtacacgtgtgttttctccgtgttgtgtagtatgcgtccacgtgtgttttctccgtgttgtgtagtatgtgtccacgtgtgttttctccgtgttgtgtagtatgtgtacacgtgtgtttagatcctgacagatggctattgagaggtatgtttttgaattttccatttttgttttaattatatctgggtatgcatgtgtgtaaatgcctacaaaggccagaggtgttgggttcccctggacctggagttggtggtaggtccgagtttatcggtgacagtaagcccatggcagaagaacctgatccaccgggtgcgtcacagggcttgaactcaggtcgccctggacagcaggtgactttatgcatttaaccggccctatgccactttgagaatgacttgtaataatgcttaatgtttggaagatgattgtgtgagcaatggggtttatttggctgccttggattcagtgtcacactggtggtcaggagcttataaactactttcctgcctgtgtcatttaactcttctattcctgatggttaggtggagtttacagatgaaagaacaaaagctgatgaaggacctttttagcttctcaatgccagtgctaagatactttcatttttaagttttaaaggaaattattacttatttttgtgtgttatgtgtatgtgtttgcagatgcacacatgtccacctatgtatacctgtatgtgtgtgtgtatatatatatacacacacacacacacatatatatatatatacccatatatatgtatatgcatatgtatatatatatatatgtatatatatatatatatacacacacatatatatatatattcctcacctcaagaaaccctttcatttttaatcatgatgctttttatacatcaagtgtactttctcataggttattctagttgttaattacgattaatacattccaattgttaggtcaaaataatatacttaaataaataatatatttaagtatattttgtaaaatgcataaaataatatttttaaatatatttaaagttcggtttgagtatttgttgatcatttttctggtacatgtcaggggaaaggggagaaatcccccctctgtgaagaaaacaagcagctttggggaataaaatcaagtcatgacccatttacaaagcaggaactctccttatcagtagctccctgctgctcttttccctgtggaggttttctgagtttgattcacgctgagagtttaaggagagtggaagcatccttagcagcatcacatctggaaaggggccgacacaccacacttttcatttgcattcaatgcacatgttaatccagatggcagaagtcctgagggcgtcccagagcctcagaattgctctgtgatgtgtgcatcttccaggttacttgattatggtgagtgtttcatgtcggtttagatttctaggtgtgggacaggtgtcaaaactcttctctgagctttgcattaacttaaaatttagatttgtgaaacattcgcttactaaattaaaaagtcaggcgtaattcttattcctgttatattacattttctattgttcaaaagaaatttgatgtgacattgaaattttggatttttttccagtgtattttaaactatcagtttaagaaatgtggatttcctttaatcccagcacttgggaggcagaggcaggtggatttctgagttcgaggccagcctggtctacagagtgagttccaggacagtcagggctacacagagaaaccctgtgttgaaaaccaaaccaaaccaaaccaaaacaaaacaaaaaaagaaatgttgatttgaggggctcagcagtgaagagcatttgctgatcttcctgctgtcctgggtttgattcccagtaataacattagcagctcacagcaatctgtacctccagttccaggggttccagtgtcctcttctggcctctgtggtcacacaagtgctacacagatgtacatgtcaggaaaaacacccaaacacatgaaatgaaatagtaaacaataaagaaatgtgggtttcatgtagtgttcatattgaagactaccacttttactcctgagtttattaaaatgagggttgggattagttggtaatgactcttgccaccaagtcttaagacgtgaattgaatcccccaaactgacatagcaagaaaacggacttctgaaagttgtcttccaacttcccatatgtaccctgtggcacccacgtttacacacacagacacacacacacacacacagagacacacacagagataaacacacaaacccacccacacacacacacacacacacacacacacacacacactatgtaataaaattaaataaaaatagtgcttgagactggggagatggcctgggagtgaaagcatttgctttgcaagcaagaaggctaatgagatttaggatccccacaacctaagggaatgtcaggtggacatagctgcctgcttacaagtgcagccttagaagccagaggtgggggatccatggagcaagctggctaaccagagtagtcatatctctaagctctgggtttgattgagggaccttgccttaaaagaataagataggggctagcgaaatgtctcagcaggtacaggtaagttctttctgcacaaatctaatgacatgaattcaattcccagaaccactataaagatggagagagagagatagagagagatagagatagagatagagagagagagagagagagagagagagagagagagagaaccaagtccataaagttgtcttctggcctcactgtctctcccccatcagacacgcatgcactgataccaaaagcagacactagaggatgattccctccagcctccacaggaatgtgcacacagacacacccacttacattctaacatgcgtacatatacgcacatatgctacactcacataggttaaaaatattatcgtgccatcaagtagcctgacatcgagagacagaattatgaccgattttgttttacattcttaattggttttaatattttcaattctagaataagggtctaacttctccagttagataccaaagagttgaaatgcgtctgtttctgcttcgaagaccgcttatcttgtgtgtgttcttgacattgcttctgtctgtttcccccccaggatttcccttgtttgtatttcttccccttttcactattcttttccctttctttctttctttttcttctttggtttggagacagggccttatagtatggtccaggttggcccagaacttgctgtgtagtcctgatagaccctggacttgccagcctcccgtctcagccttagattaggatcatagctggctataagattcttttaccaaaggtgctttttgtcatctttcctctgtgcttttcggtagtatttcaaattttctttaaaaaaaaaagttttaaatatgtaaatgacatttttaggatagagaaaagtcaaactgagaagtagactaagaaattaatgagctggtgagatggctcagtgggtaagagccactgactgctcttccagaggtcctgagttcaaatctcagcaaccacatggtggctcacagccatctgtagtgagatatgacgccctcttctggtgtctaaagacagttgcaatgtacttacatataataaataaaatctttaaaaaaaaagaaaagaaattaagtagctttctatatctgaaaagatgccatgattttaattttcttattcagattagcttagagaatcttgttatgtggccttttctaaagttattaatctgttttccattggtaccacgaagttcctgaggctctgtagtacatttttagaaatgagatttattttcatctcaacatgggaggtcagaggactaagcatgatactggctcaggcaaggccccactagctgcatgttactatagtaatggtgtcctggctagagtctttcaagaagagggagccttaattgagaaaatgctggagatggtcccggctcctatagaaagcgggctgaataagccacggggagcaagccactaggcagcatccctccatggcctctgcatcagtgactgcctccaggttcctgctctatttgagtttctgtcctgacttcctttgctaatgaacagtgttatggaagtgtaagccaaataaactcttccctccccaagttgctttaagtcgtggtgttttcgtcacagaatcagaaacttaactaagacaaatgacatcatgacacatgtgttatgtgtgacttgaatagattatgtgtggtcatccaggaggccagagagtggggaggggtcagccttccttgtttattagaaaaccatctgcggaagagctaaccagggtcctaggaaaactatcttacttccctttaagaacagcagcccaagaaccagcgacttcctatgatgcttcatttcttaaaggtccatctacttctgtcccacagctgtaggggaaatcagatttcctaatacacgcaccattgggagcacacttaaatcataagcaaattatactagtaaggctttttactcacgataggacttcagttttaccttgaagtattttaatattttagaaagatgtagattatgtatgttttgacctcctacaaccttctacagagcctaattcttttcttaaaaaggacgatgctactttaatcaggggagtgagcagcagttctctagcctgggatgtgctaactgaagattaagttctgagaggtttctgactcctctgcggaatgcaagggcagtggtgggagctttcctgaagaagggctcatagcacccatcaggtattttagaagattcctggtgtacaaatggctaaatatagacattgtaccaataggaggtagaaagagaaccagaaggaaaaaaatattgagcctgcacataaggatttcagtagtagctagtcagagggtggaggagggaagacgaattggagtctactgaggagttaatcggagacgcagaggtgaggacaggcagggtagagttctctttctggaagtctggctgataaggagagagggagatggcttgatagaggggggtaagattaggaggatgcaggcagagccccacctggtctcatctgttgcagccactgccatcctatcccctaaggcttccgcacttagccttgtggcccatgaaaagccgctctgttggaaaacactagaggcttcctgtgtgggcgggcatgccttggtgcagggtctctgattgcagagtgggtatgagccccctaagaatggcgtttccttttgactgcctacttgctgttctttcttcaaggcactcttcatggccccgtgcttttgtaagggctcactctggctcattggcaccggccgcaggatacaggataggacaggatctggttggtggaaacagcggtcttggtgccaagggcgagagaccatcgctgagtcccaggtttctctttcagctcagtctgagcagttggatgtccctgagggccgggggtgggattgtagtctgcgtgcactgcacatttggctccttatcacagagatgatgggcattaaaaggctttgctcaagagcatcggggaagtacgaacttctacagctacagtcacataatctctttcctccttcccgtgtgagactgtttccctgctgggaaagtggtttgcttagctcatttatgggtccattttctattgccgtaactgaatattgttgactgagaagttaataaagaatgaaggttaactcattttctagatgcgagggggccagaagttttgaggttgtatctagggaagcgtacggatttggttaggatggctagccagttctgcttacccggccggggctgggattattgtaccaacagctaccttgccagttcatcccttgtgcttttcagcctatggcaagagcgaataagcaagcaagcaagcaagcaagcaagcaagcaaacaaacaaaacagacaacaccaacaagcagaaacaaacctaagtgagcaaacaaacaaaagtccagaacctacagttagttgaatgggtgataaagctactttggatgttagccttctcgggcttttccttgaagatttagttcagtactaagttccaggacagcctgttgtaaggtgtggctcacaatacctggctttggagtcatcttctgtgctttgaaattagtctgcttgacattccctcaagcagaaggcactatctaatgtattccacaccccccacccccaccatgtctccctaccttttcacatgacttacctatggcagacgtcatgaactacccatacaatgcctcttctctcctctgtaccatctataccctaacgtttatgagactgccagtcaattcagatgttaaaaccatcttcacaggcacttgctgctagcagtgaccaaatgtcacaaagtccagtggatacgatcatgacctcagaagagccactgctttgctgttgaagagggacagaatgctagcatctcctttggtcatacttggcctttttcatgagagcataagggggcaaatgtccagaggccaccttgtgattctgaggttcaacagtctggtgttcatactgtcaaaggctgatatgctaaggacaaaaggatctgaggcacccagggcagggcgtctggggttgtttcctattgtgaatgtctactaactgggccagtctcagtcttataagctacaatttacaatttctgtttttcttacttacctatgtatatacatgatgctatttatatactatgttcctgtatgagctgtaattgaaaaagataatattttatgattataaagggaacacgtgtccatagaccaaaacacagaaatagaaagtcatagttattcatacttttgtgtcttataacacatactgtattacatttttagttttaaaatttgagacagggtttcatatgtcccaggctggcctcaaactcactgtctatctgagaattacctttttttcatacgttgccctactgcctctaactcccaagtgctagcacgtatagcacgagctttggtctgcatagtgctgaggttgcaccttgagcctcatgcatgctaggcaagcgttctgtcaactgagcctcagccacaacttgtatgtacgtcttagttttaaattattattttattattattattaatcatcattgttgttgatgttgttgtgtgcatgtgtgtttgtgaatgatgtatgtatgcnnnnnnnnnnnnnnnnnnnnnnnnnnnnnntgcatacatacatgacttcagttggatgatgaggatccaactgaagtcattaggtatgcactgttggacagcaaggtcctttacccactcagctatcttgccagtgcatttgtgtctttgaatacttgaatatctatttgacattacctatttcttaaattcattggtaaatcaaaagaaggttggaggtcagtagtttcctctttgattcttagttgattttaaattttgcactttgaatttttatttcagagacaaaaagttccctgtaaaatggcccattcaatatcaaattacagttttctaaatgtgaatgcataacttccttgtggttttgctttcttgaaatgttattttgaaaactttaataagcaacaatagagggaagtgtccttaacaaaattcacattgttattcttaaacattaagtctgaaattaaggatttttttttgtgtttgtgtgtgtgtgtgtgtgtgtgtgtgtgtgtgtgtgtgtatttctgactctatgtactgactgacctcaatttaagaaatcttcattctgtaaaataccttccaatcaatcaacagcattaaagacttgcttcatcttgataatttgcaaaaactttagaaagatgatcatgaaaccaacatgcaacatttaaatcatagtctagcattttgggaccaggaagacactatgaattacagggtcataggcactaacatggatgccgtgcattttattgaaaggtataattgaaattgaagcatgagaaaagttccagtttctggcagcagaggtcagagtgcttctgtgtatgtttgctggtaaagtccaagcagaaggtaaaatacactagaagtgtgcaactgaaaggaagggctgaagttttagtttttacttgcaatgagttgtccttttccaaattgcctcaagggtttgggtagccacaaaatgaccttgaaatatgatggcactttaagccaaactgctctcatttggatactcgcctggtttttgaatgggagaagcaaaactctaaggaaatggaatatactcattcaaattaaacaatattctgattaaagttatacaatagtaacctttaataagccattgttgtatagaaaatacagctgatgatttattgaaatgactgcagtaaatctaccagcaaatgtaaatattttgcaatgaacatcttgttctagaattcattcaactccctgtcctggtggtgtctgtctgtctgtctgtcttttgttgtggttttgtttttgtttttgttttgagacagtgtttctctgtgtaacagagccctggctgtcctggaatcactttgtagaccaggttggcctccaactcacagagatccacctgcctctgcctcctgaatgctgggattaaagccatgtaccatcatgctggacttgtggcttatatttttaatctgcctgttaaattataataggaaaacattcaacagttgtattcttcatttccttgcagctataaaatcttttgtcatacaaattattatataagacaagtgttttcatgaataatatctaaataaacttgcttgggaatttttttttccaaataggcaccccgaccttcatttttatgatgtgtttttagttgcaagaggaaatcagatacattgttaggggaagtgctttgtctccaacagtactggtagaattctgaaccaaaaaaggtacccctatgtcatctttgttgctataggcaagctcacggtggtgagtgaacttctgagagaagacgctgtatttaaatgttaacaactttaaaggaagaataaccattacttattaagttagtcaaggaagtcgatcaatgacaccaaatgctggcagacatgaaattgaagaagagcttataaaattgacatactattcatatgtgtactccctccctcccccctcccccattaacttagaagaagccgagcaataattaagacttgtggggaaaatttagaaatgttcccacaaactacacacacttgaaaaggctctctacaaaatcaagtcacagaatagttgtatttgtgtaaatgtaagtcatactaaatattaccatattcctcctgaagatgctctcagcatcctgccctgaccacagtggacactgagtaaatttctcagttggcttctttgcataagtatgagtactttctaaccatctttgatggcaggcagcgggggaaggctcctctgtaaacagagtagcaggtaaggtaacaccccagagggagtgagggtttcttgggtgttgattctctcttgaattctgtgaatgtctctctctttgtatcagtccacacctgaagattagggttgctcagctttggataaaacattccttatttaatgcattccacagcagctaccagagaatgtgagtgtgaaatccaaacctcctttcaggagctaacaaagatgagaatgcgttgcattattaaaagagcttttagccacggagaggggtgctaggtaaataagttgagaatagcctcccacattccttttcaaaccccccttcccccttctaaaaaacaggagcaaagaaaaccttttgtaataagatggtgattctttgatggctgtaagctttcttatggggcttttaaccgatcaaatgctgggactgtagctcaggattacagttttaggtctgtaacggaagacgctctttctgtgagaggcatgaagcgctcctttgggatcagatactgatggtgcaatgtctgtgcctgagataagaacagcttacctttctccttttaggaaaggcttttggaaacattacatatggtatggcacgagcccatcattcattccttacaactttgcttaatttagaagggacagagatcactgggctgacatgaagcactaataaagaccagaagatctggagccatgacttagttgttggctggagacatggaccgtggaaagtcttctgtgaaaatctaacactttttggttaattattctcatctatttaatggtcttttaaggttgtaggtattttctggtaaaatgtggccattgccattcaatttggaccagtatttgtaatcacaatttaataaatgatcataggctattgggatcattatattgagaattattatattgagaatattcactcattcattcaacaaatacttgagtatatattatgtcctagtgatctgtgtacgtgggtatatgagtgaaaaaaaatatcagacacatgcagaataattagtgagtgttaagatcattttgaagtgataagagaaccttggggtgtctttgagaatgtctgagcatttcttgaagagttaaggtcttagaaacttgatggccaccaaagccacctgaaatcaatggcttttgggtttactactcctcctcctcaactaatttgtttatcttatgtgtgtatgtgcatgtctaagtgtatgtgtgtgtgtgtgtgtgtgtgtgtgtgtgtgtgtgtgtgtgctgatgcctacagaggccagatgagggagccgaacttagaggtgtttgtgatctgtcttctgtgggtactgagaactggacctaggttcttcttagaggtgtttgtttgtttgttttgtttgttctttttgtttttttcaagacagggtttctctgtatagccctggctgtcctggaactcacgttgtagaccaggctggctttgcactcagaaacccttctgcctctgcctcccaagtgctgggattaaaggtgtgcgccaccaccgcccggccgtagaggtgtttgtgaactgtctgctgtgggtgcggagaactggacctaggttcttcttagaggtgtttgtgaaatgtctgctgtgggtgccaagaactgaacctgggtcctttgctagggcaacagtgctcttctctgctgcttatgctcccttgacctgcttttggggttttctctaaagaactcagtcaatgaaattcatcctctatagagggggagttttagagaaaaatgtattatagatggttcgttcataggtgggggagagaaatggggagggggagagaaaagaggttgtgtgtttgtgagagggagtatatgaatgagagagaggagggagaggaggcaggggggagagggagggagagggagagactcctgtatagaagaagggggtactagaaaatagggtactatgaagcctggaaacttattaaaggttttatgatacaaactgaggtgagttatagggaggggtgaattgggcattccaactgacctaaccaagggttgtccatgtgcctcttattttcagtcttgtagtcataatatcctccaggctgaggtgtgcattttggaaatagcaaagaaatgtggacaggcactccctctggctgtctccggcctccagcaaggacattcttggaattgctgctttgggtcccagctctatctgatcagtttctatctcttgttctcatcaataatgtagccccgcttactaaggggctgagaattttagggtagaatcccactagatctagtcctgaaagctttatatctattctcagaaggtttttctttttttctcagtttaagaataattatttttaactatatgtatgtgtctgtgtgtatttatgcacataaggcaggtgcccacagaaaccaggggtatcggatgcccctggagcaccccgataggggtatagtatgtgtgcttagctgagccatcgtcaatccagctccgtaacttcttcctcttcctcctcttcttcctctttttaatgcagagacacttctttttttgtttgtttatttatctatgtgtctgtttgtttgtttgagacagagtttctctgtatacactcttggctggcctggaacttgctctgtagaccaggttggtcttgaactcacagagatctgcctgcctctgcctccagggtgctagaatcaaagacatgtgcagccagcacccctgtaatgttattcttgagaaattcgccttatttacctatctattctcatccatgtgtctctctgtgtctctctttcatctatctatctatctatctatctatctatctatctatctatctatctatcttctttctttctttctttctttctttctttctttcttccttttctttttttggagacagggtcttatcatgagctgcgtgatgggtggcttggaactcaaaaatatctacctccctttgcttcctgttcctgggattaaaggtatgcaccaccatgcctgtcatgtaatatttctttaaaattaagcatgctgtgggccagggcagtgaatcagctggtaaagccattttccatttagccttaggatctgaattcaactcctgggacccatatggtggaagcgaagaactgactcttgaaagtttccctctgacttccacactggagcctttgcacttgcatagtacacacacacacacacacacacacacacacagaataaataaatacacgcaataaaaagttaaaactgctgaagcaagtttcaagtgggctgatgatcactgtgattgtcagaaccttggaaattattattattattattattattattattattattattattattattactttgtactagaaatttgttttacattgcttcagggttccataatttaccatttgttttcaatctgacttgtgttcaactattaatttgtttcttgtctcgccatcttggtaaacttttttacaacatgaagcatggttatctaaacctataactcttagaactgaaagtctagatggagcgtaggcaccatctgatattttatatgttccttgtatgcagcaccttttctgagagtccgcgggactctaggtctcagaggcagactatgctctgtcttagggatcgatatccattgcgtttgcttttttcttcctttcttttggttacaatccacccatgcagcttcattcagaagacacacactgagctcctttggtgtaagcattgttgcgatagagagctgagagctgagagctgtgacctgtcaggcatctttagtgaaaagaagcgagagcacaaaggtctgtgttgtccagttttacaaatgtgtccattgccaagttccccaacttgtgtattttaggtgctctgctaagacgatgactcagactgacctgtttcctgtgtcttgctcatccagagacaacagggtagggaccagagttccaaaagatatacataatacaactcatatggctaaagctgctagacattgggatggattgagacagacagacacatggaggaaagatggtttcatcagctttgccatagcagatctcacaaccactccaaagtacagtcattaaacttcctcaccagaatcatccacatatctattaaaccacagagtcctagcaacctggacccacagaaagaagtggagatgagaaatattaagtgtttaaagatagttcgggatttgggctgtagcactatattggaaggttctaggttcaggcccaagtccctaaactccaaacaccacaagaatggtgtctactaccagagtctccccaaatccccaaggacaaatgctctggtgattatccatgctcagtaatgctgctgccgaaactatgctgcatttctgaaaatgggaaagaatttgggccctggtgtgtgacagaggcagatttactctgtataatcaatgactagtcatttaaagaactcaggctggaggattccaagccccttttcttgaagaataaattttacacacaattaaagagtgaattttaggaaggagttttcttataaaagaggacctaaaagcaagcaagcaagcaagcaagcaagcaagcaagcaagcaagcaagcaagcaagcaagcaagcagaactcctatatggcaggaggggctcccaagaaatggtcccgctgtggctctttgtctggaatttgtaaggctttgctgggttgaggcatgctgggtgggctggtctgttcagctcaaccatgagctagaccttcccatcctggttgttggattgggattcctacattcaccttcaggggccaaggaagtatctggttgcacagagcttccaggcaccggtgctcttggggttgctacgggcctgcagaagtgagataacaagaaatcagacatgaaccagtgtgctgaagcatctttggcacttctttgctttggcccaggcagaaccaaggacattaacagcttctaggtacaacagtactgactgtcaagggcaagaggcagatgcggttgcttaggagtttcattaattcttcattagcatgtggtagaaacagtgagtggcattaacttgcgttgtcttaatgactgtttgttttgagcattttgcattctctgctggaggaatttatggaaggtgagacaaatgtctgataggtaccatggctatgaaataatgtttactgcatagtaaatagcaaagaattcatctggagggcccagattttgtctggagtaaggatgcgaggagcatagggttgttcagaatttattatcatgggtgagccccaccacctgaatttagtccttgggatctacatggtagaaaacaaactcctgcaagctgtcctctgacctccatatacaggcccccaaaggcttggtggcagtcacctttacctgctgagccaccttgctggccatatatgcccatcttttaaaatgcattgctttaaagagttctgtgttttggattagttcttcatcagatatgttttgcaaacatttctcccagtgatttcaatttgcatttttttcttgatatcttcaaagagaagttttcatctggaagaaatacatatttttctcttttctatattctgacattagcatatatctaatatatttttcctataacgaaaaccataaaggtatttagtccttaaaaacaaaaacaaaaataaaaaacaaaaacaaaaataaaaaacaaaaacaaaaacaggttctttgaacagtgtcgcatgtacccaggctgttctcagatttgctctgtagctgaggatggcattggactattgctccttctgtccctgcttttctttttcttttttcttttctttctttctttctttctttctttctttctttctttctttctttctttctttctttctttctttctttctttctttctttctttctttcttttctttcttttctttcttttctttcttttctttctttttctttttttttttttttttgagacagggtttctctgtatagtcctggctgtcctggaactcactttgtagaccaggctggcctcaaactcagaaatccacctgcctctgtctcccaagtgctgggattaaaggcgtgtgccaccactgcccggctctgcccctgcttttcaagttctggggtgaaaagtgtgtaccaccatgcttagcttccctaatatttccttttggaagttttaagggttccaatttaacaatgaatgaagttaaagattccttgggccttgtgttagggttaggtgaaaagtaggggctgatgttttcctttgcctatttttcatataattgcccacttgtgtctcagcaccaattattgctactttctgttatttattttttgagacatggtcttgctatatagtcctagctggcttggtacttgctatgtagacaaagctggccctgaactcatcatggtaattctcctgccatgatcttcaagtactagaattacagacatggggcactataccatgtattgctattatttaataaaagctcatctttatatttccctcctcctcttctttctcctcctattccttcttctctttctgcccctctcttctcttctcttctcttctcttctcttctcttctcttctcttctcttctcttctcttctcttctcttctcttctcttcactttatacaattttaactctgccaggtagaaagtcttactgtgaagaagtaggagttggtcagccttcttgggaaaagccaatgaaataatgagatgcttagcagttctctgtgtagttggcaagaggtgaagctaaacctggactgatggggtaagcattgagctctgacgtgaactggagtaagtcttgagttaccttagaccactcattgctgtctatcatcccccacctcctaagctgatgtggcttcctggtcttccttatataatgagttatcctttctggggaactttgaatgtctctccaaggtttgttcttggtggccattgagaattgtcgggttactatggtagtcccactgacatttaataatttgtaatttattgtgtggaagcagtgatattgaaaattcaaaccgttctctgtaagtcactagcatgctgggaatttccccagaatttgttagtaacaagaaaaaaaccctttgcctctcagcatcctctgatttataattttgtggaatttgccttgatttaattttgcttcgaggtgactcagtaaacatcctgttaggggtggacgtgaacttgcagtaacccggtctgcagtttctgcgagcactgctggactttgggaatgaggctgcccagtcacaggttagagcatttcccccttccagctctagttgactcatgcctgggtacagggaaaggaaagtggagcttctcacccccactactgtcttctaaaaggatacagcgggaggggaccagttggaagatgaaagtctagagatggctttttcatcttccgggcctgctccagtggcctgcaggcattgtcactaagaggcagcgaaacctggggcaaatttacttggatttcttccagactctgctgttccttgtttgtatcaaagttcctcctggaagaacatgccgacgtgaaactttgttttgagaatgagtctggaacacatacttgcagaggtcagttataggtgtggatctagtagagagggccccaggggagactttcaggttcttgtatcctggaacaaggagatagagaaagaacacatggctagtgatagaaatggagtttgtaattcctgttctgggctatccaccaccctttcacacagacgtacaatcaaaacccaatggtcatgcagcaagcaaattcaagttgcttctatgttaagcttctcacatgttaattatgaggtcttctcctctgatagaatagaagtcaacgagacgggagaaatagcttttcacgtgctgaatttttggctagaattagtggttggaatattgccttagcctgtacaaagtctcaagttcaacctccatccccccaaataaacaaaagcttggaaaaatggtggaggggagaataattttctaccttctgaggattttaccactaaataggaaataaactgacagtaactacgaagattaacaagagacaataaactgatcgcagggtggcatcatggaaagaagaagtgggtatctaaatacccagtgagattttgatgcttatatttattctaaaaggtctgtagaagtagggtgaaggcaactcaggggacagtcctgtccttttggaaagatgagtaggccctccaaatagtaagtgagagcctgtgacaggcctgtctgggtgtggtattacacacttgccttttttcctgtttacagcttccctagttggtgtcttagggagggtccttgtattctggttttgtcaccgaacacctgggggaattagatgacagaatacccggggaattagaggagaagcttatgtaggttcacagtccttgaggcttccatccattggaagttgttttgtaactttgagggttctggatgcatacaggaaaggtgataaagaatttttttttctctcactctccgatgagcataatgtggggtgctagggtcttggataaaccacaaccaccaatgcaaccccaagcctgaggcttccaggcccattgtcttgggaactggaagaatgaattttatggacaatagggagggtgagttttatcatagcaatgagaagagaagatagaactggccaggaaaggcagtgaccccaaagcaggaggcccttgctggaggcagagaggccagagagcttcaggttccccttctcctaaagcagccgttctgcctagaggcaaagactgtgggactgacactgagaggtggcccatctcaaggatgggcccgatggaatgaccatcttgtatccttccaccagcctcactccagggttttccataagtcatgtaagaagcccccagactaatagcttgagggtgccctacctcctggaatcccttctgctctttaggagctttgaaagccctcctctgcccacactctcatcaccgagtctacagtaagctttcctaaagctcatggtctttggtccttgacttctgttcttcacagttctgagacaagaatttgaaagctactggcttgggggaggttttgatggccaatgagtttccgagatcctaacttgccagagccaatctcacatcagcaaaggtccattgttaaagatatttttacgaggggggggggtgggtgtccttccacaatgggatgctattaagtttaatagtctagggacattttgtaggactcatgacagaaattagggtgcagcatgaggaggtggttagccctgttggcccacccatgaggtctccaggtttgggtgcgtcctcacacgcagcctcttggacatgttgctttgttaaggtgctgcaaaagaggaaggaaggtatagcagaaaccagagtcccattttgaccaaaggtaagactcagaactgctgctttctagacctctgccttcaattacgtagtagtggtcagccgaggaaaggactttgacacattgacccttaggagatatttcggaccaaaccatgttaaggcttatgacagctgggttcctatttggaggctgtgtctttggctaagtgagaaaatcttaaagaatgacccttctcttcagttctttgttattaattttcaaggtgtatttatttccttttatgcatgtgattgcttgcctaaatgtctgtatgtgctcatgtgcacacctggtgtccctggatgtcagaagatggcactggtgacagatggtcgtgagccttatataagcgttgagaactgaattcaggtcttctgcacgaacattaagtgcccttggtcttttgtgtcaacccctacctctctgagtgttactggagaagggatggaggacagaccagagggcaggagatagcagctgcttctgagagcttgtttttagtttgtttaccttgacgtgttcttttctgagcttcaacagtgacactcaccatcagccataattatgtaccgaaaacaagggaagagtatgcacatcaaacctaggcagaaaaatcatcacttcctttatactaactcactgaaaataaagttcaactggtccaagcttttcagtccacctcttataggccctaaaagtggccaaatacattgaagttgccatcaggagtgtatatgatcgagagcctgcgcatggtagcctaaggacatgtgtacatgtatacatgactatacatgtatagtcaatgtttggagaatgacagaaagccagtccttgcagggaaccagggcaaaggcatgcaaatgtaaaacttctgtctagtcagcttgggctgttgtaacagagtgccagagattcgggtgttttaaacaatttatttctcataagtctgaaggctgggaagtctaagagtaagatactggaagatttattgttggataaaggtcagacacctgattcttgcttggtacccttttgctggctccttacccggaagaaagggcaggagagatgagagtggatgaatagttttttgtttgttttagattaaaaatattttaaactatcagctaatatatctatagtattaggtttcattatgatatttccaaacacaatttattttcactgattctcctcttaactcttccccatccctcgacactactacttctcctgacccaggagaaagaaaaagaattggggaaagctattgatcataaaaaagaatttggataaattgggagaaagccctagtgagggacaggccttccccaccaccagagggcagtattcatccaacctctgttcattgtattctggagaatagcaccgagatctgcgcatggcaggggtgggggtggggtgtgggggtgaaacaccataatccactttaatcttatagctcaagctaatcgctctaagtggctatagtgatggagcccaaagataaacaccaatgggaaggactaagtgaaactacaagaaaggaagattccctccagtgctgatagtaggcacaaatttgcttgggacacaaaannnnnnnnnnnnnnnnnnnnnnnnnnnnnnnnnnnnnnnnnnnnnnnnnnnnnnnnnnnnnnnnnnnnnnnnnnnnnnnnnnnnnnnnnnnnnnnnnnnnnnnnnnnnnnnnnnnnnnnnnnnnnnnnnnnnnnnnnnnnnnnnnnnnnnnnnnnnnnnnnnnnnnnnnnnnnnnnnnnnnnnnnnnnnnnnnnnnnnnnnnnnnnnnnnnnnnnnnnnnnnnnnnnnnnnnnnnnnnnnnnnnnnnnnnnnnnnnnnnnnnnnnnnnnnnnnnnnnnnnnnnnnnnnnnnnnnnnnnnnnnnnnnnnnnnnnnnnnnnnnnnnnnnnnnnnnnnnnnnnnnnnnnnnnnnnnnnnnnnnnnnnnnnnnnnnnnnnnnnnnnnnnnntatgtgtgtttgtgtgtaggtatgtatgtatgtaagtatgtgtgttatggtgtgttcttgttttttcctctcaatcctattctctctggccaagcagagttataaaattgagtacataactccttacaacatttgatacgtcttattttttaattgaaacattttatttgaaggtatataaaaagtaatcaatggcttttaacactgttcctacaagagtccattgcttcccagtaaagatttaataattacctttatatatttgatgtagttgtttgtaaagccaatatcatgtgagggcctcttggcactttgaattatccattataaggggaatcttaaaaacaaaaagtcaggataaataccacccagctaagttaaaatatgaagtgtgtggctgccaatgatggaaaaatgaagtgacctatcacttatgaatattgtcacttgaccctcatttgtgtatttagaaaccttatatagagaacagagagtggcatttccttccctttacaacaataagcttaacactgtaaagaacgatcccatgctctaggcttaatttttttatttatgtcgattttctgacatacttcacaaaagcagaaagaacttttcagtaaagcaagctttctcgagccacgggttgtgctgacaaatgcaggccaagatgagcgccttctctggttgctgttgttggatttccatttagactttgcctcagcccaaaagaagatggaagttgcttaggatgtgaacaacaaaaactctcctcacggtttcagcaccctctctgtgcagtggagaatgcagtgggagccttctccagctttccaggagctcactggtctgagtcccctggcccccggctttaccttagctcccagcctgctctggagtctttgcttcagtgtctgacttaagagttcttgtttctgtttcctcagcctgtctccggcttcaagagtttgggtaaagctccttgctctggactttgtttgaaagtccatggactacctcttgattcttcagtttatctctctagtactttctctcctcccaagcttgaggttggaattttattttgtttggaaggttttttgtttctttgcttttaattcttaaaatttactccatatttaaggaaatccccaaaggattctcgggttagtcactttttgatggtaggataaagtgcctatgttaaaccaccagagggaagacaaacttatctgattcacagtttagaaggctccactctcatttcctggcttcatcacttttgtgctagcaggacagcagagaaatcacagcaggaaggctatggaggaggagtgttattttcttcatggttgtaaagaagcagagagcaggggaagggaagggcctgggacagggtatacctgcagaaatttccacgagtgtcatagtttgcccaactaggctcaatttcctaagagcccactcagccaagaattcaccagtagctttaagctccaatcatatcttttctttttttttttaattgggtatttatttcatttacatttccaatgctatcccaaaagtcccccacatcatttcttaaagccccccaggagcctgagagggagacttcagtgtgagtccttggggtcatttacattcaaatcacaggggctttcttcatctgcataagcacgggctgccttttcagctccttttggagagaaagctgggattagatttctactcattcagtctttatcttcctgttaataagggctccgtttgtacaattctgtacaacattatttcttttaggccaggaggaagcagcagaggacatttctgaaggttcaagagaacattcttagaaaggtcaccttcacctgggggtgggactgccagactggtgtgtgtgtgtgtgtgtgtgtgtgtgtgtgtgtgtgtgtgtgtgtgtgtgtgttggtgctaggcagagttcactataactatactgtgtaaaaatgacgtcaggacgtggggctaaacactctatctagtctgggtaggatactaacttactgacatttctatgggttgtggggtgtgacatcccttggcaggtgggccctcgctgtgtaagaaagccagctgaacctgagccccagagccagccattaggagacagacattctgactttcagggtactctccagctcctgccttcacctttttaacccaggatggagcttctgggagctgaaataaaacctttcctccccaggctgcttttgcttatggtgtttatcacagcgacaggaaagcaaaccataacggtaagaaattgtttatgagttatatttataaatagttattttaagttgcaagtaaagccaaagcctgaaatttcattttagatttcatgaatcccaagttttgataaatatatcttaaatagactctaagcaaaaccggtagatttttagaaagtcagttactgagaaaaaagactttcaacaaatcccccccccccccccatttctctgtgtatccctgactgtcctggaactcactctgtagaccccactgaccttgaatttagagatctgcctgcctctgccttccaagtgttgggattaaaggtgtatgccaccgtgcctgttttaaataaaactttaagatattaattattggcagtgaagcttagttgttgagcatgtgcataatgcacagaaattcttagttcaaaccagaatagcaagggaaaaatatttttggtttagatagtatctatggctctatctggcagaccttcctgcttctagactgcatgtttggagtgtcaggcatcacgctcaccctctgatgtgtcctgtgtgtaatggatgcttgtttggtttaacgtaagaatgcactgttttagtgtagggatagatgcagagcctgtgtgctcttggctccccttagcatctcagattgtttactgttaaatgtgtttactctcacccggggccgtccttgcagcaagctaatgtgtgtcagccttagtggccacccaagagaaggggtcttagtcagactggttgatacttgggctcctgttgccacttcacctgcttccaccctggattttagaataattgattgaggtaagcttcccatttaccttgttccttattttatttatttattttatctatctatctatctatctatctatctatctatctatctatctatctatctatctatctatctatctactgaggcagtgtcttatatgttgctctggctgtcttggaattcagtatgtagatgaagctggccttgaactcacaaacatcgccagcctcttcctccaagatgctgggatcaaaggcctgggtcaccacgcccaactcagatactctttgtctttttgagaatccaaggcttctgtgttgcctgtagtctttccaacttccagagggcctatgaagtctagaagcttctaattccatgacttttgcttcaacttcagctacgttcttctgtgctctagttggctgtagtcatatcctagagagtctttcccatcattaaatgattgcgttgtcccctagcttgactcaacagcttcgtcttcacagtactcagctcctctctactgtcttccttccgctccgtgccgtggtttgcccaagccaggagtcttcatgagaccattctcagatggatttttttgtcctcttacgtcactttgggaaatctccaagtgtttttgatattatttgtgtctttgtaggttattaattcaaacatttttttaatttattatttttgacactttattatgtgtatgtgatgttttctgcactttcatcctgcatctcccccaccccccaacccttccctccaacaatgcccctgacccttagtgaggggttgagcctcatgcacctctccttcatgtatgctgaaatggtgatgggccagtcttgctcaggtctcctgcaggaaaccacagctgcagtgtgttcgggagggcagtggtcacatcgtttgtgtccagaaaccactgctttgtagcactcaccttcaacctctatcttcagttttgttttggggaacaaggctagcttagaagtcattgtccccagcttcccgagtgcttggattacaggtaggtgcaaccatgcttggcttagactaggtcttgaatgatctcagaagcccgtgtgttaaagatgtgctcaccagagtcctggtgtttggagaggtcattggaggtatgttttagagagtcattttggcatactgactccttcttttacgttctttgcttcgtgactgtgaggagagtaatttgacattactataggctccttccttgttctgccttggcacaccccaaacaactggggctcatgggtaatggacaagaccatctacaaatggaagccaaagtgagccttccctcattatacgttaatcatctatcgctaggatttcactatggtgatggagcattgatgaccatcttgtttggtttatagaagttagagtccacaggttgcagtgtatattcttgtagaaatctctctgcccatcgtgaggattgccagtgggttgtttttgtttagttcttctcatcatggtggtgagcagtcgggatcatttagtgaatgtagttataatggtgggtcaggtgcatgcttagccttattattattattattattattattattattgtattggaattagtacagcgcaccttagggtccaacagcataatattcatattcattatataaactattatggttctcatctcttactggttttgactccacagcttttcagacttgccgtattgtacaaatacaggcgagtaaataatgaagggcactatgaggctttgtgcagccctgacatttgttctatttttaggctatttctggactccgggctttcatcatgccgctattaggaaattcatcaaactttcatattgcctgcgctgggctccattgtctgtggctgccatctgctccgctcggggcggcctgatgattatttcatgtgctcctgcaaccctcctgtcttcgctgctcttcagcctcttcagctttttcgttctttgcctctgttctctgttcctgggtgtaggagaattgtcacttttctgaggaggagggaaactttagtgaacattgctgtaggtctttgctctctctctgactattgccaggttttcccttgtctccgtctctcttttgcctgagccaaattcaaatttttaaggacttaaaagatttaaaaatgaatcacaatcacttgttgcacatgtactgtggtgcgtgaagatcacctgacacctcatggtgattcctgacttcagtaaacttttggtctaggacagaaaagagtggccttaagaatgatgaattaaagctattgtaattcccgggttgctggcttagtaactcagagtctcagaaggtgctgggaggaaagggttgactcaggaacattggtctttgtggaggccgtggagagaggccgtttgaactgtggaaatggactaaggaaagcactgagcctttaggaaggtcagagtttatgggtcgatgtgactttgggaaagccaaagcaagatggctatttttaaggagtacaaagtagagttttgaaaagtattcaagagacaaaagattaaggccgagccatgcttccacccttccatccatccattcatccatccatccatccatccatccatccatccatccatccatccatcgattggaggagcctgtgttcatatctgtgccaggtgcagaacctgagtgggtggggcatgtggccgcggagcagcgaggaagggcagagcctctgaggcttgagtttaagcaatgcagaaaatgtaaatcctaggatttcaacagaaagtgaggtgtgcatggctctctgaggactgttcacccaatcgggttggagacgaggagtgaggcaagattcttctagatgacatactcagctgggagagtaaagttgaggcagaaggatccaaggacaggccagagctagatgactaacaccatttgcctctgtgagaaacatttgtaaggcaggcgaaccccgccccagagtttgacacaaagagtggtttacggccagggtgaagcaaatcaccctgttagagctttcctgattaacccatgccctgccgcttcccatccagtcccaccctgccacaggcccgcccagttcggatgcatagtcaagcgaggatctgaactgcctgccacatggtaatgctaggccggggaagcagatctctgtgtccgtgagccccaggaaagtctcctgttgggggagggaaattgtcaagaggactgagaagactctcagaagtcttaagtttggcgtctgaacacttcttaagtcagggtttctttctgtaaaaatgcatatacatttgtagtcttgaggattgaagccaggcctacacctatacttggctagtgttgtggcattgagctatctgtcaggcttctcttagaactacggagggtcatagatctacaagtaaactgattctctactttaatatacaaacttttacgtacaaagtgtcaaaatctatccgagtgaaccaacaatgctcctgtgggaacactctagaagccttcgtatacttagtaaaggctacagttttgcagtattataaaaatatttctcactttcaccaaatacaaccttatgttgtgttttaaacctcacaatgagctgttttgttgaaattctttttagtaatgtgcctggatccagtcattaatatttagactcctgcagtactgagaacataccagacagtggcagcaaagaacagagacggatttcaggctttgtttcgtttgtcctctaaggaagagtactgtggaggtgacagtttggtgcaaatttgttctctcataaggaagcccgaagtacctgtttaaaatcaaacacataccagaggaatccaggcttcttggcaggtcctaagtccttcccatccaaacagtttgtcttgtagtcatatctcagtgacacacagagtcagaggagaacttctaggccagcccaagacatttgaatcagaatcttccagagaaaggcctacaaacttggctgtgtttcactaactctgcagacagtgagtctctacactcagttaagagttgacaagttagtccttcctatggagcatcatgagtctatgaggtggtgttcacaaaccaggcaaggagacaaagggcatcaggaacatccctccacacggctgttcatcactcaggaccaggcactcttggttatgacgtaatgctgtccggatactgttctccattttcaaagagaacttatagttctcagcatactgcgtcagcgttgctaagggaggtcactgggtttcctgaagaaggattcctaaggccatcagtatttggggaagaaacccaattaatcaatgtctatgggttaagtatacggtacattatatgtcttaagtaagctccaaaatggtgtttaaaaattattctctaccttttaaacaaatcaccctagtaagtacaaataaaactagttcttggtcaaggatattttaaattagtaagttaaacttttgaggtgaactggaaacgtgattgagatctcctaaggctcagaaagagtctaaaggaaagagcttagcatctgagttgcttgaggaagggatttcttagtagtcctgtagttggaagtgtggctcactcacagaagacagctagtggaagtttgtatacccaagagctggggccccatttgttatacttttaggtatgttttagatctcgtgtgttgaaaactaacaaaggaagttatggaaaagataataaatggactgcagagatcttaattctgtggaattgttacccacaatgcaaaggagacacatcatgaccttttttgtcgggcttctttccttctgcctatttccaagaatcatccatgctgtatcgtgtatcagcacttcaatatttcactatatggttttaattgtagtcaatttattcattgattgattgataagcttttaggtggcacccacttcttttgcttaacatgagcaaggctaaataaatataaatgtttgtgtctgagatttcatgtggaaaaaaggttttcattttctttgagatcaaagtagggatagaattgtaactctctccttgcttcctggaattccttgttgagttggttactgggagcttgacaagtagattcctgaagaactgtgtcactgttgatcagtgccacagacaaccttaggagtagacatccatgaagagtcgttgagtgggatgtttatgtcacagacatacgaactccgtctctcgatgccaaacttacactgaagagtgaattgtatcattgtcaccaaagggtagacctctcaatttgaagtccatataggactaagtagtgactcttcacctgaaactgtaatgtagccacaccatttctaaaaatgaatgtttcccacagtgatgactctcacgggaattcacggggagctaggcaggccattgttgagacttgttcatgtgtgtgagacatttctgtacaaaacaacagcatcttttgactcttgaaaacccatgattatattaagcattataactatacttgaaatattctgataatggatgctcacatccacttacgacttgtatacccactacttaaaaacttgttgatctggaaaaaaataactcatgcagtagtcagggctttggggagactttttcatgaatactttctatccacttgcaacagtttaaattggagtatggacctatgtttggagacaaaatttaatctttataagtagtaggtgctagcaaaatagacgtgtttaagaggaacacatttgggggtttgctgtctccagagaccttaacttgtggctaacagggctcatgtggtcttggttttgtgtcccaagcaaatttgtgcctactatcagcactggagggaatcttcctttcttgtagtttcacttagtccttcccattggtgtttatctttgggctccatcactatagccacttagagcgattagcttgagctataagattaaagtggattatggcgcttggggtgtaacttgtcctgcatcagaaattattttacttcttttctttgctcaaggaatgtagcctagctggcatttggctccataatgactgaatgagaacctcaagtgtttagactgtttcatatttttgctgtttctttccctgtgtgggcccgtgcctgaggaacttgcattgggaggtgtaattactacacccactcttagaggaaggtcttgaagagggcaatggctttggaaaaatttttagacttgtgaccaccatgaaacattgtattctgtttagaattggtgatctgtgcaattctgatgaccacagacttggaagacttgtgagttggctttggttttgctatcagatgatattagtattggcagaaatagctctggtacattccagaatattatgtagtacaatgccaaggtttaatagaggctagtgattggggaatcatgcccctcaaagctatgttatttgctgaatatacaatatcatttcaccaattcacatgctacaactcagagacttaaccacagttcacagaggtgcctagccttaaaataccattttgcccacacatttcaaaacagggttagactcttaaaggggaaatgaatttttcagtttattttttattaatttttcagtaaatggacaaaataatttttttaaaagattttatttatatgtaagtacactgtagctgtcttcagacactccagaagagggagtcagatctcattacggatggttgtgagctaccatgtggttgctgggatttgaactccggaccttcggaagagcagtcgggtgctcttacccactgagccatctcaccagcccccaatttgtttatttagaagacagtttaacagggaagctagattctagtccaggaaaactttcaaattaacaggtccaccatggtacaagctctggtttaaagggttattcccacctaccaagggtgtatcaccaaagtgtcttagttatggttactattgctgtgatgaaacacaatgaccaaaaacaagttgtgggggaatgagtttattttgctcatagctcaaggcaagcctatcactgaggaaagtcaggatagttatggaaggaggagaggacctggaggcagaggctgatgtagctgccatggaggaatgctgcttactggcttactcccatggcttgctgagactgctttcttaaagaacccccaggaccaccatcccaggggtgtccccacccataatgggctgggctctctcccattggtcactagttcaaaaataaaatgcttcctagacttgtctccctatagcctgatcttccagatgcgttttctcagtcagcgtctcctcctctcaagatgacttctctcagatgtcaagttgacctaacaagccagaacaccagcgtgacaccagtgttttcccagaccttgatttttaatccttgagcaactggcagatctaggatttgtttctcacctgtgggagttgtgggctatgtgagttaagtgagccttggaatgaaagctgtgtctttctccaaaacctaagtcacactcttcccctggagatcaacctcatgtaacccaaagctttatcttcttgcctggatgtagtcctaggaggaatacttggatttcccatgagtgctgagcacgcacgggtcagctgcatcttagccagggaggagctgagtgacatagagcctgtggtagggactggggagcgtgaggcacaggagggaggatcctctctctacttagaggtcaccaaattgaatgttcaaagcttgctgacccaagtctcaatgtcagtaagttttctgtaacttacttttctttatttgtaaacttgggtatattggttacttttctgcttgttctgacaaggaagaacaacttaaaggagcagggatttattctgcctcatggtctgaggggattctcttcatggtggtaggctgtcaatgcaggagcttgaggctgctgatttgtaccttcgtagacctggaagcagagacaggaagcagggaaagctacaaatgcaaaggtctctcgaagtcttcacttctcctggggaggctgcatttcctaaacagtccacaacttccaaaaacaacatcatctaaggaccatgtgttcaaacacgtgagcctatgggagactttccacattcaaggcataaagtcagggagggtgatgggccccaaagcacagagtgagaatagatcagcattaaatgtgcttggtttgtcctgagggagggagccaaggtcaggaggaattaggatgcttcttctcattgtccagggagtctggggcctcccatctctgattcctattgcttctttggaaggcaaaggtgctctttgtgagcataatttacaagctaagacatatcttgttttggggaaaagttagcttttctaacacaacaataaacttcaataaattgactttaaaaaaggaacgaggtatgaggtatttgaattatatttttgtctaatgtgtcctgtgagccatcatccttgtatttgtgagttttgagcatgtgtagttaaagagatctgtcaaaattactgtattataaacagcaatagattgatatgattcctggaccgtcactggaaaatgagttgttttgtggagtcatggggatatgcagtggttgcttccaaaatggagagggggtggggttggactctttgcaactctagaggcgactgaaaggctagttagctccctttgtacctagaagcctgcagcttcttcttgtggaagggctcatctccttaggaggtcattcattgcatgcaaacattctgttatcacccaaatggagaatgaagacacatctgtcttttgtgaatggtttcatgatgtggttcctgtggcttccaatgccaaatgctcattggaattgtatcttacagggccataatctagtagcggctaagtcagttgtgaagtgaagatttgtaatcagctgttagcggaagtgaggctcatagccttgtgttggccagcaaatgaccccctcctttccctttctaaacaaatgcatacacaccctgttttctgtagccttgacttacacaaaaacatagagacagacttcgggattgtagacacttttcaatggcaacataagatgatatgaaaggtcttaaggtatgagcttgctgccggacatttagtgggtgttttgcagataaccagacagacatgaaatagtctttgagaagtttctagaatgtttgagtttaagttctacggttcatatggtcagaattagaactcagctatgaaactttggggcaagttgttgctcaaagttggcgagaaatcttattcaccgaaaggattacactaagcccatcagccagactagaaaggtttcaaaaggtaaatttgttgaatttagacatttcgtaacaaagcaatgctggttttgaatgcttacgaacttgacagttgctgcctctgtcattagctaatattttcttccacaagatttgccctttaaaaactccctattaatggctttggaggctacaggttgctagacaggtttgtcagcagtgctgtgcagagcgtgtcctggcgccagctctgttcctcctctactccattagcttaattatgactttcagcaggcatctcacccaggagccccagcttggatctgtgacatcgtggcttccttccagcaggatggccacacagcacatgaggacacatgccgtcctgcaagaaggaggagcctgggctagactgggtgcccttgtgctctaaagcaggctaaatgttttcaggcatcttttgtgcactgtgaagaagtgagagcgcatgtatttctttccttttgataatcaggtgtctgagctgtcatttaatcaggaccatgtggtgtgatgtgagacgggtctgagtttaaaccctgtctttgaatgaatatggcctcaaattatttaaggtgatattgacttgagagagagagagacagagacagacagagacagagacagagacagacagagacagacagacagagagagagagagagagagagagagagagagagagagaaagagagcgagagagcgagagagcgagagagagagagagagagagagagagagagagagagagagaggaagagagagaaagacagagagagattgtacagaatggaaggtgtggctagccacaaggggatcacgcctgtttgttttgacttttgataacttaagtggaaagcctgtggtctctatttacttaatcctgtgaatcacagcctcattacgtaaaatgtatcacaccttaaatagcttactaatgagtaaggttcacaatctttgaagacccaaaggactaaaactgccacacaggtttttttttttcagaactctaatttcttccaaatattttttttcctaatgtaacgatggaatctcatttgaaagtataatttaatttttagaaacaaactgccttcaccatgctatgagatgttttatagatcattataatttttacaatgtttccagatacggaattgatttagtagctttggagtcagattctttctttaagtaaggaatattatgttaataccttgcaaattagacactcattttctctgggaaagctttttctctactgtggaaggctctctggctggctagcaactgcagtaatagctatgtgggactgctgaaccagaggagggctgtggatatcgtgtgtatcatcttatttaattcccagcctgactccacaggacacatggatacctttcgtttccatttcacagatgagctcaaacagggaagcagtatctacagtcgatggtaggtactggcagggcgggagttggaacacaggctcatgggtgccagaattctgacctggccttacttgggcacctggagatgttggaaagtgactttaaggaatgcagctcaggtggtctcttgtattgaaagaaattcttactgaaaatatctgctttcctttgttttaaaactcgcagagttttgtatcattttgctttagttctttaggcagggttatagctgactttacttttatatggttgtacaaattgctgttttaaaactcaatcagttttctttgggtttctgagatagggtaaccagtaatatatatatatatatatatataatgcaagctttctttccttccttctttttccattttttgggggcttttgaggcagggtttctctatgtagtcctggctgtcctgaaactgtgtacaccaagctgaccttgaacttggagatccacctgcttctgcctcccgagtactgggattaaaggtgtgcacgtccactgccttttctaatagtcatagaatacttagagaaggatcaagtattcaaaaagaattctcattgtataaaatcttttctatcagcattttattttcattctctctcatacacacacacatgtacacacacatgtacacacacacacacatatgcactcaatttgtgttaggacaatgcatctcgttgaagtcagacgattaaaacctttattttttttaaagatttattattaattttgtgtatgtgagtatactgttgctgtacagatggttgtgagccttcatgtggttgttgggaattgtttttttttttttttttaggacctctgcttgcttcggtcaactccactcactccagtcgccccctggctctggtcaactctgctcactcagtctctgcttgctctggcccaaagatttatttattattttacataagtgcatcatagctgacttcagactccccagaagagggcgtcagatctcattacaggtggttgtgagccaccacgtggttgctgggatttgaactcaggacctctggaagagcagtcagtgctcttaaccgccgagccatctccacaactccataattaaaaactttaaagtaaaaatccgagttgctctttatgctttcaacacgtaggaattgattttgaaggcgtaatggtgacatacatcaatttagacttgtaaagtctaagtagctggaacacagtgaattcctcattgtttatatctgcccaccacttcaccatctgatgcacctgtcaccctcactggacgcccaggagctgctgttgggttttagagtctgttgtgttgggatgcttttttgcaaagttcagcttctgtgcttcacatttcttagtggtaaaatagaaagaagaggaggaggaggaaggggaggaggaggaaggggaggactgagttaatgagctacatagatatcgagaaactacccattgtaacaactggtgccttcctctgccatcttctgtgacatggaggaaacccaggaatttgcctatgcctgatagagtccaacttctgttgacaattgctccttcaaaatcaatttgttcgttacagacatcaatgattgttaaagatatgaagcaaataaaacctaaattagctcttattccaccacttatgaatagttgctattggcctcgttctgctctatttgtacgatgctttcttatagaattatagaaaacgttttaaggattgttttcaagagataaatctacctttattatatgagttgaaattttgtgtatctttcctggtgtgtttatgtatatgttttctatcatgttctaaccaatctcctcttgctgggtaatttaagatgtttgcagctgtcatttatttctatgatgtcatacaacttgttttgtatgtcctgtgtggtcttgtcttagtgtaagttcctaggtctgctcactccggtctgaggctgtacagtcagtcttcagacgtttaagatgtgtgtgtgtgtgtgtgtgtgtgtgtgtgtgtgtgtgtgtgtggcgttgcagggcatgtgctctttatgcatactataatggcctgcatgtaaagcttcgaggatagctgtgggagtgggttctctctttccaccatgtgggtcctaggcatcagactccagtcatcaggcttggctccagtcacctttacccactgagttacctgtctggctccagctttaagacttctgatacacaaaacaaactggctttggggatgctggccttctttagttactgagcctgctagatttccatgttctcgacatacagattattattaaaaatctttgactgggggctcatgacatggctcaacagatactcctgaggggacctgagttatactctcagcactcacatcagtcagctcataattacctggaagcctaactgttggagacctgacactctcttctggcatgagtggacacacacacacacacacacacacccatgaacatatacatacataaatagaaaaatgtcatcttgttcatatagtcaggctatatttttataagtgtaatataagtaaagtatggctttatcattgtttaaatttatgaaagattgagtgcattagtattttgccgtaggaaaaggggcagaaatcatataagaattttgtctttctgtaatatttttttatgttcattaacaaattatgtgtgcatgttcattcaccatgtgtatgcaggtcctgtagaggtcagaagagggcactggaaccccctggcactggcgttacagatggttatgagccaccatgtgggtggtgggaatcgaacctgatcctccaggaagagcagctggtgcaccttaaccactgagccaattttctagctccgttttgatcatctttaaaatcagcttctctgggttggtggagtttctgagtagctctattttcagtacctcaactttattcaatagtattctaggcataatccagtctggctaggtcttaaattattggagtaccgacaagtggtaaatgcaggattgaatcatgtcatggacaaggtgtgcactctttggctactgtcactccataccgtaaaagtgggcaggtaatttgttttcctgtttcagatgaagagacgtgagtgacaggtggtttcatgtgtctaagatcacatagctcttaggtagtggaaatggggttgagtttagctatgtgtgactcgaaccccttccctcctttcttgggacactgctctctggactggcccatgcactgtggtgacttctatccattggtctcctggtgtttgcagctcacagcctttctttcttcaaggcctccacttcctgtctaggttggcttgagagtgtcatggccgtcctatgtttctgaggggttagctttcattagagacaatgatcctgactgtgttcagcatctcatggataggagaattcctaaagagtgagctgctgcggggtttttcttacgtgggtccaccctcactttgagtttgtttctgatctgtttgtgggggaatatctggaattggttgcataggttatctgagctaatccttgggtgggctgctcaaaataattcccaaaggagtacatcattctctctaagccaaatgctatgcctttacgtctttacttacctgactgagctcctagtgggaagagttatttgttttttattgttaatctttagcccagtgttcccagcaggaacagacaccaagctcatgcatagttgtctggttctactacaggtgattgctataggtggggaggaccctctccttcttcctgggtttgaggctatcatggcctggccaggctcttatgaaaccaacaaagtaaatttctctccccctctctctccctctctccctccctccctccccccctcctttcctctctctctccctctctctctccctgagtatagacccacaccaccatgctctgctctggtaactttgagtaaaaagggggctgtggttttgtcatctaaggattcagaattaagagctctcggtggactgcaaaggcagcagcgacagtgggttaggtggagcgtggagaacatcccgccatcatgtgcctgatccctttagctgacctgggatgcaagagtcatgactttcaaattcacgattccaaaaaatgtatttttccccagaatggcaggtaggacaagtattcctgcggccagctgctgaacacttgtctgggggtgggggttagagatagctgctatttagctttgtaatgaaatgaggaatttaaaaatggcattgaggagctagagagatggctcagtggttaagagcactgactgctcttccagaggtcctaagttcaattcccagcaaccacatggtggctcacaaccatctgtaatgggatctgatgccctcttctggtgcagtctgaagacagtaactgtgtactcatgtacataaaataaataaatcttaaaaaaaatggaattataatcaatgatgcatatatataaatgctatttcaagtttataattgtgtacatgtactcttagtggagcacccattgtttctttttttaaatatactggaaattcagtttagtttttaaaaattatttattttttgagattataatataattccatcatgtcccccttccccttttctcccccctcctgcatacccttgctacttttgaaattcatagcctctgtaacttttgcttaccatcctacaaaatgattatattcgaggcaacacttgctgtttctgtgtgtttgttcctagtaagaagttgtaacacagactcatacacaatttcctatgaagaatagctttcggtgctacgtgcaaatcgtcagattaaacattaaatgcttgttagtcaataaaattgtacatttgccttgtttcttagccccatttaattagtactcacatctgtctttcaggctgtaactgagaagaattttgaaacaacggattttcgagcctctctagaaaatggtgttctgttgtgcgagtaagtatttcaggcctgctccctatatagtcacagccttcttagtccaaagtgagatttgatccctgcaagctgacacctctatggtgtgagccagtaaggaaggggttatcggtttagatatctaaagattgtgtcggtaatatatattatttttaattagtaaataagcaagagtctgttattgctttatgggtagatcattgaagaagaagctgattatatctgactataacttacttggtatatgattgcctcattataaccgatccttttcatccgtaagacatgatggtcagagtagctaattcacccttaagtggagtcactgcattacctaagtcaatctgagtcactgactatttattcagttaacaggtaccattgtgagcaatattctagactgcgtttaccagacgctaaacgggctagtgccctgattgacagtatagggtccaccttgtttgcttgtgcttgggtctacagtggctgcttagtacagttaaccagataggttacctttgtcagtaagagcaggcctctgagggaaaaaaattaaatcccggaggaaagaatgagttgcagaagtgagcaaataaattataagaatgtacttcagaacccacccacattctttgaaagcacttgataattccaatctagactcttaacccacagatatttatggaatctgtctgcatggaaactctgggagtggactactggcacctagatgtgttctttcttgtgtgtgtggggggcgggggggaagagaagggttcttttgccggtatgtcctggcctactggctgcatagatgcttttggttcttctccctttgaagggcgctgtttgcagcgaaggttccaagggaaggggttagattccttttccaccctggacattcacacgagtgactcaatttttattcacacttacaagtgatttctagtgcttgagcctgactttcctcatctgtgaagtagagatcctggatttccatctgcctgattcctggagctgccatgacacaaactgtcattgacagtttaggtttgcataagctacggaagttggtataggtataagttaggaagatggccacgggagccagcgtgttgctagttgtccaaactcctttgtttgagaatattaattccttaattcactccatatgacatgactggaattaaagcagttgtgctttatagaaatgtcaactttctgtggtttcacccaggagaagtcctctcagggccacagttgaggttgaaaggacatttctcctcctcactctcccgtgtgctcacaatccttgttgagtaatatttaactcatttaattggcctgctcaagtgcttggcagagaggaaatgatcttgatttaaaacttgtgtgatttaagtgttttcttatgtgttcaaaagatagaggagagaaaatacctgtaagtgtgtgatcgaacaccgcctttgctctgagtctagctgcttcagggttgacaggaaagcacccatctgtgggtgcgaggctctgcagtcttgcggaggaactagatggcattgtgcagaatgtggagtcttgtttagattttcgagagtaggtagtgtaaatagatgctctatttaaagaagtcctcttgtaggttacccatttctaatgattagccattgctcagaataacttaggaatctatcctgttgaatagggcttccataagtatgtgaataaacatgtttaatggtggtacctcttgtgctttttttttgtttgtttatttttttgttttttgttatttttacatgcgtatgtgttttgaccaagtcttttccctagtctctcatctctgactcctcctaccctcactattctctcctaatttcatggcttttgctttgttgttgtttgtttttggttttgcatcccgatgttcatctagtgctacctgaatgtgcatgtgtgtaggattactggagcataggtaagctctgaggagtcgcatccctgaagaaaacagactctccctttccaagagcatcatttgccaatagttcctcagccagggtgggacttgatgaccatctccccactccatgttgggattttatctggcttcagcttgcaccagtcttgtgtatactgtcacagcggttgtgtgttcatgtgagcagctactctgtagtatttccacttctggaatacttttttgcccctcttcttgggtactccctgggtctcggaagaaggagatatgatgggcatgtttcatgtatggctgagtctctgttgcagtctcttagtctctcacctttgactggttataaatctgttcactgtaacatgtcttctgtatttaaccacaacttatgaccagctctggctctgagtgtttggaaatgatttccaaaagctactatttatttctccccaggctaagatgagcctggtaagatatatatcatcacaagggaaaatattcagagttgactagaaacactgttttaactcaaataaattagagtagaaataatttctgcattgatccaaactaatacaaagtaaaataaatttaattcctaccttaatagtgacaacaaacagtttacttcaggcatatacattataaatatatgctgttaataagggatatatttatataaatgtatatatgtatatgtacgtatgtgtgtatgtgtgtatctaattgctatttttagcatcctcaatttttaccattagtaagtttcttactattttatctagtattttcagcagtttttatccttcaataccaaattgttttccaactggcattctgagacttccaagtcaggagttagaggagatttttttttttaactgcttccacttaactgatagtagactgtcatttcagactcaagttagaaacaacctctgcactgttgtttcaggcagcaggcctatttgagtagcacacactgccctgtgcgttattggcaggctgatagaccattggaatgagcctgtttgtggcagtaatttttgttctatcaagtttgactttggtacttagtgagttgaaagctgaaagtgtgtgtgtgtgtgtgtgtgtgtgtgtgtgtgtgtgtgtgtgtacatgtactcgcgtggacatgtagaagccaccaacatcggctactctcttgattactctccagtgtctttgtatttgtttgaatctggagttgactgatttggtgaggctggttagacaatgagttccatggatcccttgtctctacctcccatgctaggattaggaggctccaacacctggctttttgcatgggtgcttaaggatctgatctcaggtcctcgggcgggcgggcaggtaggcaggcaggcaggcaggcaggcaggcaggcaggcaggcaggcaggcaggcaggcaggcaggcactttttcaaccgaaccagctcttatactatttatattagacatacattctcttggctttattaacaatgaattgggcacaaaaccaacccctgtccctttagaaaaagtttttgctaaattaatgacaaaaattcactagattcttaggagatttcggctttttgagtcttatccacagtatccatacagtctctcatttcttttgtgttggttattattcataaggactactagaaaaagttgtcactacataaatatctgcagccgccatttgctctggctctggcataattatttctgtgttctgaacacatagcatctaggcattgctatcagttagcaatctcccggtgactcatcttgtggtggcagtcttggaagtcatctgaggaaaatattctttcttcctctgtgaagtaagaaggtttgtttgaagatagtctcactgggtgtgtcgctggttactcagtctatagttcccctctttggaatggtcccaagtttctgctctgccaccgctggccattgcttacaacttctgactttatgccttggtgagcacatggctcatgtcactgagaagtttctcacagtgttaccaggtctttctcccgaccccagtgtcctttgcttgttgcttggaaaactggagcaaaatgtttacctgttgctgtgagagggcctggctgtatttatatttcctctggaactctcttcctgtctaataggtccagtcttgaaagatccattcactagaataagaataagacagttatacagataccactcttagcagagggagaatgacttctaatgcggtagacaacatagagaactatgttgcttgtcactaatgtttatagaacacgattgtttgctagagctgaggacttctacagaggccagagactagggaatccctaagacatctatgcagtgggcctgaggaggaccacaggttttggtgggatggaaaaggtgttttttgtttttgtttttttcctgctgtttctggtcttgaatttataaaggaggaaaatgactcacaagcgactccccaggtcgacaccacctgctgtgatgagcaactttctctagaggccaacattcttcaattacttttggctttaattacttagttttggcttctcattgtgtgacaagttccctaagaaaaagcaactggaaagaaacaattgcatcctttgcttcagggcttcccatccaaggttgactctctggtctgtgctaagctatggtttcctagcagcaagagggaggggctactcacttcctggtcctgtccagagtgccaagcacagagtaaaaggaggaggggaccagatacattggcataggttagaccacacctcctactcatcatcacttcctgacaatgtcatcatgttaagaatccattgagggattaatccagtggtcaaaccaaggctcccaggattgcagttattgcactatatagcccattaacagaccagcaagcccaaagtgtatacctatagggaaataatttccctttcaaattataacactctcacaaaatctaaccagacttttccaatacttgtcattatttcagcacttacatagaataacaaacaggcaagaacaggaaaaattctgttaataaaatgtattgaaatcgcctgccctaatattataacacatgacaaaatcgtctaagtacaatacttttaatgatatgcatggtaaatggataaaataaaggttcagcaatctaatctcatgtataagaatttatgttagaagagctgagagtaagtggagacgaggtgaaccagtcagtttgtggcatttgggtaaacggttggctgtgagtcacttaaaatccttactctatatagggatgtagtatgtaacaaagtggtaaaaaaaaaaaaaagctggctataactctgggataaactagacagtttgaaattttgagtaagcaaatgaggcaagattgtgaccaaattcttgacaaatgagaagatggttatttgtaaataataacatctctaccttcattggtgagaattagagtgccacgtgctccttttgctgctgtttgttgaaagtagtaaataatgtaaatcattgttaaaatgatggctctatctcagaggcacagctcagtgggaaagcgtgaccttaagcttgagtgccaagaccctggatcccagccctagtgcccctaagagcaagaagatggctgtgttgtagcatcaagctctctagctgaaaaagaacccttggatagaaacttaaacaagtctcagagaaacaactgtgcaacacctatcaaataactttgtgctattttattaacacaaataattcatttatcacatagagaatattttcccagtaaccattcttttttggagtttgactacggatagaggaagagcaacattttaaagccttctcatgatagaaaatattaagaacaaatacctgaaacataaaattggtaaaaattgttcttattagctgggcgtggtggcgcatgcctttaatcccagctcctgggaggcagaggcaggtggatttctgagtttgaggccagcctggtctacaaagtgagttccaggacagccagggctacacagagaaaccctgtcttagtaaaaacaaacaaacaaacaaacaaacaaacaaacaaacaaaccactgactactcttccagaagtcctgagttcaattcctgtgtgggagtgctgggattaaaggtgtgtgccaccacgaccggctctagtcagtgctcttaatccctgagccatctaatagtacaatatatacccctttcagactggtttctttcagttactaatatgaatttaatttgcttccatatctttacattgccttatagctcattttggttttggagcaaatgttatcccatttttttgagtgggccagtttatttatttagcccaatttacctaatatgagaggatttcataatggtttaaagttgttgtcattatgaatgagacttctctttaaggttagcctggtctacagagcgagtttcagggcattcagggatacacaagagaaaccgagactcaaaacaacaacaaaagacttctataaacatccacatgcaattgcttgtgtggccacacattttcaacccatttggtaaccactgaggagtggtactgctgctcatatggtaccactatgtttagttccataagaatctgccacactgtcttccaaggtgttacactgctttcttctccctccagcaacgaatggccattcctgttgctctatgtccttgccaacatttgctggtgtcaggatactgatttgggcctttcttagaggttagtaggtgtgtagcagtaatgctgtttccagtttccatttccctgctgacattatcatgtggaattttttttttctcatagttattttctgtgcaacttatttgctgaaactgttaaggtctttgtttctattttcaatcagtggcttgttttgtttaaacttgatgagttttgagaattctttattaattttagtttttggactcaacagatatgcctcttgaacatatttttctctcattctgtcttttcattctcctgtcaacgtcttttggagaatgaacactttgaattttaatgaagcttagcctgccagttgtctcttacagagatttttttccccctttcgttctgtgttgtctcttaggaataaaaggtgtgtgatccatgagttttctttgtggggtctgcgtctaaatgttatttgttctgataaggtatagaaaagtccctggtgttcaatccactagcctgtaattcacgagactgttcagagtcggaagattctacggtcaggtccctaagctttgcagcatgcccttgtaacactttaatttcaagttttttatcatctccccctcttccttttccccttgcatgcactcccagttattccttcttgttctctttcaaattcatggcctgttttctttaattgtatatatatatatccttagctgttcttagatagataaatataactcagcagaggaacaggaagtctgctgtgagattgcatctcttagaaatgtcaggaaagctacacccctgaagtctcaccaacattcctgcctaaacaagacagctgaaaacaaggatgacgtaatagatatggaaaaagggagagctcacagggcctggaccctagcaagggactacaggcaattaaggactgctgagagcacccccccccccatattggttatctaataccaaatggtgagccctgaaaacatatacattgcatgcaagttacatgatttagctgtttcctggactctaacaggtttcaagcttactgacgaggctcagtacaagtgccataatggagaaatgacacctacattggtttttgacttgctgttcttccacatggttacccacctaagcatttgttgttaaatttttacttatgttaaagttaagcatagctttttaaaaatcacttatgcttgaatacactaatgcagtcataaagtttaatagcaaatgcttttatacttttaaattttagatgacaaatgctggttatcttacctatgagaatatggtaactatctacttgacgtgcgtttattttaaaatatgaacgtagaagaagctattgacttataatcttgacacctcctgaaagtaactaggtcagatgactgtatcttgtggcttactctccagatcacctttgacaattcaggagagaacaatacagtttgttgtacctggaacagagaacagacagaattggttttgttggcttaaaaaaaaaaattatgagccgggggtgggggggtggggttctttttttctctctcttttctcttttcccttcttcccttttcctccttcccccctgctttcccccctcccctctcccctccacccctctccctcccccttccttccccccgcctctctctcctttcaccctctcccctcctccctccttcccactccccctttctccctttctcccactcccttcccctctcccctcccctccctccccccctccccctttcccccgcatcccccccttccattttccgcccctcctcctgtaactccttttccccatatacccctcctcctccccttcctattctcctcctcccccctctccctccttcccctctttcttactttctttggttttgttttcctttttcctttttcccttttcttgtccccgccctcccccctctttcccttccctctcccccccctttctcacccatatttcccctttctcccttatccccctatttccccctctctctcccccatctacccctcgatcctccctcctccctctccttttctcgctccttcaccctctctccactctttcttctccattcttttctgcctattttctccccttccttccccctccttcccccctctctgtttttccccttctacctctttccctccttatcgattatttttctnnnnnnnnnnnnnnnnnnnntaaacaaccccccccccaaattatagcattgaagcagagtgattttctttttttcttttcttttttccaaatcgacttctttaaagaagacacagattttgaaaatgttgcaggaaccaaatatgtgtacacacacacacacacacacacacacacacacacacacaccagatggatttcagggctttgctctaatcattcatacttatgtgcttgctctgtggccaagccctgcccagggctgtctttagtaagcattcaaatgtttaatgagcagaattcctgtctggaataaaagtaagcaaataaagcaatactctatcagtgacagtcagtcagtcaagcaagcaacaaaagatattagtgtcttcagttagtcttcagttaggtatcgttactgtgccttcttttttttttttttttttttttgggttttctgagacagggtttctctgtgtagtcctggatgtcctggaactcactttgtagaccaggctggcctcgaactcagaaatccgcctgcctctgcctcccgagtggtactgtgccgttttaaaacaaaatgtggcatggagataatagcttaatgaatagagtgctcatcttttctgcatgaatgtctgagttcagtcccatgcactgcttcatccaggtgggctgacaaatcagggaatcagaagagtaaagtcacccatgggtgtgcagagcaagttcgaggtcagtctgagtgagctacatggaaccttgtcttagtaatcataaaaattaaaataatcataaaaattaaaaacagtagacctaatcataaaagtgatgtgaaagatacacatttgcatctatgctgttagaacaacattggtacaaactgtaacaactaacgtgagaaatgtgcttcttgagtggatggctaataagataacccataggtcaccaatcccttccatgtatcaatacattcttccatgaatggctttaatttttttttttaatctttgaagacaggaagtaaaaaagatatcccagaattttgtactttggataaagagctttctgatcaagggggaaaatgaagtttgatagaacttttttttttcttttttttttaagattagccaacagtagaatgtcaattcaagttcttaaaacctttcatgtctgagccatgttaagttttatagatggctttctgtgtgtcacacctaagtagggaagtcaggatatatctacagagagaaagatctgtgaaagaagccaatgttctagtgtaattctaaggacagtcctttgtggggagggggacagtggggagggatagataatagcaagggatgaaggaggaaatgtaggcatcttgagacagagcttagtccatttgggctacagtaacaagtaccggaacatgagtagcttgcatatagcaggaagttatttctctcagtgctggggcctaggaagtccaagctcaaggccgctgcagactgggtgtctggtaagggcccacttcctttataagttaacgtcttgtcctttataagtgctactttgtcaccacaacttcccatagtagaagggcaaggcctattgactgaaggcactagttgcattcaggaggttcagagtcatgatcttgccacctcccatagggccctgccctctacttgaactatgggagttttaggagagtcacaaacactcagaccatagcagtggagaagctgagaaaattacttaggtaaccgtgagagtaccccaagttattttgtgttctagttttaatccttcccaaaagaacaaccctctgatgtgctaagcaagcagtaattatgtttgttcctccatagaagggaaggcttgagagggataaagatataattctactgggctggagggatggaacagagggttgcaggccaagaacacaggccatgggagcatctggaagtttatcctgtaatctgattcttgcttcagagccagtgacctgaagtcagtgtccctttagaaagtccacatgtgaaattcaagaccacgtactatgcaaagcatttctgtttgtaaaagagagcatttccatacatgggtacttgaatttcctttaacttgaggccctgcctgtattccattaagtgtgcttaaattcatggaattatttttagatctcacagaacatttttttttatccttgcaagagaatatcctcagagttcttccttgagaatcataattcataactcaccaagtgatttacatgctcggtatttgtcacaactgtatgctcatttcctcctcagcctagtgtttataactgtgagccttgtgatggatgaaataaaacagcattttcctccagtgactcagagttttcgagagtgagtgtgtgctctccagagtgctggatttttccttgggagtagttccgtgtttgcacatgtacaagaaggttgaggagtgggaaggggaggctaatccattgtgtatatatcctctctaagtcatccctcaggccagatctgccaatgggggaggagttggttaatttaccacaaggtatctgtcttagctgtttacttaccctgcccctttgttcactgacagtcatctgtttgattgttcattccagaaactgaatagaaaatgctcttgaaattactgacactatatgtcagaagtgataaatcgtgtcaacgtgtaaacagagaccaggtcaccagtgactcagtgggtgaggcaggggtttatgacccttccctctgaaaggacaacggtgcttagcctttcccgagatgctatgtgactcctgttcatattagcttcaacgttatgtcattgaaagattacagtctcaggaaaacactacactaaaaaaaattaccactgtcaagggagtggcgaataactaaccgtagagattgtttgaatgactatgtcagaattgtgttgttgtcaagcaatgtgtcatgtattagctctcctaggcactgccgacagccatagaaatgcagaaataccagtgttatggaagcagtcagtcaagagggggaaactcgagggattaatatatagttgccatttgttattagtctgtttaattattttctagctcctcagttgttgaatgaaggaaagtggtgtggtcagagaaggaaagaggcttcttaaatggctcacaatgcacacttcagaagttaggactcacagagtcccagctgaggggctgacttaacgctgaggggttggggctgcagtatagctccagagtaaagttctcccctagcacacttgaggccttgagctccattcccagacacccggccccaaagccaagggggtggctgtatctgcaactaagttgtctacagatctttatgtgaacaggctatgaaaacagaaaagcaacttttgtttgccaggctcaatcttcataagccagtgttccgtaattctgaatcccgtcgagcaacattctgaaggctattaagttgagactttttgtcttttttttttattctcattcttattcttagcatactcggatgtatatagaaatctctggaatgtaggaggagtgacattccataggacacccccaccccccacccttccacaataagtgtccattgcaaaggagataccagggaagcagatgattttatttgcatttccttctttgttttgctgttggacctcatcacagagtaaagaattgcttgcttgggggatgaattgttaaatagaatttttttttcactatttcaaaatactgctctgtgacagcgattaatgattaattacccaagcttgcattaatgggaaaacattgtagtattaaattattacgctgtctggcattgtattagtgaataaaaagaatgaatgcatactggtggagatttagaagcagaatcgcagaatcatatcatcagcgtgcttgtcaaagttgagtttcttttctattgctttgttggatagagacatttctaatgctttggtggacagagacatagctagctatctctgcagtgtgtgtcctattaactgaaaagtgctcagtattagattccagggtaatgtgaaggagttctggtacatttaacttccacccagtcattccactctggtaacaaagcaatcagtcatgggcacgaatgagttaccagtaagaaatagtcaattatttggttgagctccttggcaccctttgtatgtgaaacggtatgggttagaggccatctttcaaaacaaggacccagatgagaaaacaagaaaaatccctttgagaattatgaatagggaaaaagtattcttagggccaagtgaagggaattgggatgaagtggttttttttttattttttatttatttattttttattactgcatgttgaaatggaaccaaattgtgcctctgtttaatacatgtgaaactacttctaaagcagtgggctttggatacagaagaaggctgatccaaagaacccttccacccttttgttcagagacgttctttattttgtctgtctttgtttgtttgtttgtttgtttgtttagttgtttgttttctcacgagcctctagctcggtatgacacatctgggatcagagctgtgttcctcaggatttttgacactgtttcagagaacactcttaccacagtgacatctttgtaattgcctgtgttatttgtttatttgctttcagcttgattaataagctcaaacctggcgtcgttaagaagatcaatagactgtctaccccaatagcaggtttggtaagtaatgcgttaccttcaaaactagttttcccccttttcattttagttttttaatcaagaagtgacagctgtacatatttttgggtgcagtgttgtatcaccctcatattgtcatgcagtataatggattatatacttcaaaacacctattgaaatataagaaagtagctaaagaaggcttctccatctatagttactattgctttaaaaggagtaacaaccatcttttttttgttgtcgttgtttctagattcctttattttttccttgatattttccttatttacatttcaaatgttttcccctttccaggtctcccctttggaaagcccctatcacataccccttccccctgcctctatgagggaactaccctacccacctacccactactgtcttcctacactggggcattggatatcctcaggctcaagggcctctcctcccattgatgctcaacaaggccatcctctgctacatatgcagctagagccatgggtccctctatgtgtactctttggttggtggtccagtcactgggagctccagtgtgtgtgtgtgtgtgtgtgtgtgtgtgtgtgtgtgtatgtgtctgtctgtccggacaaccatttttttaagtgcccttcaacacttccttctgtttcagaagctgttgttttaacttgtctgactttgttggtttcgatgcttcagagtctgggtagcctttcccgccttctctcttgccctaggttgcttgggagctgcttctgttcttcctgcaactcaactctgcgtgccatgttttttgctgaccacagcagctcccgagagtatcaggagctccctggctgttgtgtttctgctgcttcgggctcatgtatcaggctcacttagcatgcggttcataagtgtgtctgcaggataatcaaggctcgccagccgtcttatggtgtgccatgtttcctattgatgtacggcgtctctaccttctgtgtcagggtcacatggtgtaaagaagcccgggggattctcaggggcctcttgcctttatttctattccgattatgttctgtggtgctagggatagaaccaagggcctttcactttctaggcaagcattctaaccctcagcctaactttatattgaagatttatttttttaagtattaagaaatattacacactttcatcatgtggttatttagatgtttaagacaccgtggacactaatgataacatgagccaatacctttgtgaaaacttctaatgaaataaaattgatgaagaaatttccaggatttaataagcctcgtcaatcaatactggaatactggtaggatggagaaatggtctagcagttaagggcacagggtcccagtgcccatgacaggtggctcacaatcacctgtacctccagctccaagggctctgatgccctcatctagactctgaggatgcttgtacttctgcacacctatcccctaccgcataattaagttaaaagcaataaaaagaaatctgctgacagaagtcagttaaaaagatctcaaagtatataataactggaatgtaaaaccaaactaattatctatgggttattcgatgctcttataataatctatttaatttatttatgtatttttttgtctttcatgaatttacatctgtggctaatggcctgggtaaccacagatagctatgttgcagttccttggtttattggaggtatcaaaagttcactaaaaccttgacagggctaactttggccaagtatttattattggaaaatatctgtctgggagcaagggagtgaagtgttgagagttctttgaaaattaggaatgcatacaaagttctcaggaccactgattccagtactgacgctttctctctataatcaggttgcctctagtctagatagatctatcatgaatgtgaagctgacccgtaatttgtactgtcttaaatttggttaggtaaaaatcccatctcacacacacatgcatacatacacacacacacacacttactctctctcacactgtattagtcagggttctctagagtcacagaacttacggacagtctctagatagtaaaggaatttattgatgacttacagttggcagcccaattcccaacaatgattcagtcgcagctgtgaatggaagtccaaggatctagcagttactcagtctcacgcagcaagcaggcaaaggaacaagagcaagagctagactcccttcttccaatgtccttatattgtctccagcaaaaggtgtagcccagattaaaggtgtgttccaccacacctttaatcccagatgaaaggcatagcccagattaaaggtgtgttccttaactcggagattcaatcttctggaatccatagccactatggctcaagatcttcaaaccaagatccagataaggatctccaagcctccagataagggtcactggtgagccttccaattccggattgtagttcattccaaatattgtcaagttgacaaccaggaatagccactacacacacacatataaaattttatatttttccaattattcaaagaataacataaaaggaatgtgtccctcaagtctttccagaaggaaatgatcagtttagtaaaataaatatgctttatatgacaacgacttataaagcaacctctacaataataaatgtatgaattgtattgagttacactatcttttccagggacccgagttattcttagatagtttaattttttgattttgaactttcatttcttggatcaattacaggcattttaaatgaaattagcctttgatctccaacacaccccaagaacctggaatgcttgaattgtggtgtttgttgctgttggctactgttgggtttattcagttttaagattgtatgattagatgcaagcacaaatgcattttatttttaagccccaaaccctctccaagtatttctatttcaagcatcaaaaattctctccagtttggattttatctttagaggccaagatggaatgcatttcctctgtactaaatagaatgcgttcctaagctaagcacaatgcagtgagcactttcactgggctatgggtgtgcaagagtgacatcagcaacagagtgggctaagcccaattgctttgaagccagcatggtgcttcatctgccagctgagacttgtcacaacggttatcacagaacatgtgcggtagagccccagcgtccatctggagaccatgaaaggcatgggcaagagtttgataagtgaatcctcagtgtgtggatgttctttctttgaacagatgctcggggggcctgttgggctgagaatttttctagcatggagtgttgtaagagaggacagagttgtatggactctgactttcatatcagggaaggagagccacacagatcaattaattagcagatgagcaagaaagtaccccaaggcgagtgtgcgacaggattaacacccagcagagcgacactgagctgctccttaaggagtttcttagggaagaggccggggtgtttggcatttggacaagaatattgagtaatccaggccagacttttcatgtactgagatggatgttcaccggacccaacacagtgactgtcgaatacaggagataaaagagtttgttaaacaagtagtgaaccatgttttcattgtagaatttaacaggttctagaatttagtctttggtggagtaggcctacaggttgaaggggcattgtccctgcccccaaagacatacaaaggttctaagccccagtactccagaatgtatctgtattttaggcatctgatttttacagatgtgattggtccagatgagatcatttcagcgtagagtgagcccctcatctgagaggtgtccctaaggaatggtgattgtgaggagatatacatagaggtagaataccatatgaagatgggtttgaggtggagcaccacagcccaaagaaccccagagattactgatgagtttccaacatcccgcaagggcctgaggagacttgcagagacttcacaggaagcaagagtttcctaactgatgctggactcctgccgcagaacaccaagacaataaataggttcatttctattgcttgttcgtattttgtggtgatagccctaggaaacttaggtacataggtaaatgtttttagttgataattgtgtactttgaagtaaatgtaggtttctaggatgtataaagagggcctctctagtatcctaaagttcctctgtgagacatttcagatacaaagtccagaccaggaaactgatgttgacacagtcaaaaagccttcttagttagatgatttgcctctgtgtatgtgtgtgtgaggggggggggagagacagagagagagacggagagaaacacagagaaaaagacagacacacccagagatagagagacaggcacacacatacagagacagacagagagacagagacagagagacacgcagagaggtcactgtcaggtgtctgcctctggagctcttggtttggattttgccagctttcagcacaaggcttttctgagtagcgaagcctagagatgcgttcaagccaagccaggtgaagatagtttattttgaagatctatcagatgcctcttgtggtaagccagtgttcaaccataaacacgccagctcagcttacttcattcctgtgctgttctcagcaggaatcttggtttggcatctcttatctgaagttcagaaacttctcactggaccaggcctttctccctctggcgatcagcaatcctgagagtgagtttcttggagaaagtagttgtttgggtagaggggagtgccccaaggccttgctttcattcagcagaggtttgaaggttgaagtgtgttctgggaagggtgtttgtgtaggggagatgcaccaaatatgtcaactagtgacaggacttctgggtgaaaatgtaagctgagaaggtgtagtgtttcctgtctttccatgactccttcttaagtcttttttagccatactttttcagcttgtgggagctatgcattacatttgtttagtttttaaacgcaaagccccttgtacaaagtcccttgtagactagcctgtgagcaaaccatggagtatgttctgagctaggaagagtggcaagagaagcaactgaaacattcatgcaattgctttctttagaaggtcagagaatatgttctcttatgtgttctagtgataaggttggtctcacctaagttttaaatgtgtttatctttaattaacgtgtgtgtgtgtgtgtgtgtgtgtgtgtgtgaggggggcgggctcatacatggtctgagtatggacttcaaaacacaacttttactagttgtcttttgcctactgtgtaggtctttgggatcaaactctggcttgagggcaatgacccttaattgatcaagtcttctttcataaacaatcacattcttcctatttcttctctgctttctattaattacaaaactgtttaaaatagaaaaaaaaaaatctaactaactaacccaggagttagtccatatcttccaaataactatgtggcgcttagtgtgggtatgttcaacgtaccgaaactcaacaccaacaatgtgggaataaaaaaatgttcaacaacaaagtaaaaccccaaggcagaggcaagacatcctgatggtgaaaagagccgctgaagcagaataatgtttaccatcggattgttagcgtacaggaaacacaatatgtggagaaacagccaggaagttgttaaccctgagtccttcagccatgtagaacacctgacaatgtattggtgtataaataaatccagttgtaaactgtaagtctgtaagtaaatcaaggtttctccccctcagcatcactgacctcaggggcagacaatactttatgtagagctctaccttgcgcaatgaactttgtggttttttttttttttttttttttttggttttttgagacagggtttctctgtatagccctggctgtccaggaactcactttgtagaccaggctggccttgaactcagaaatccacctgcctctgcctcccaaatgctgggattaaaggcgtggcgctaccacgcccggccgcacggaactttctttagtggcattgcagcctctgagactgaccggaggataaagcacttttctatcatttgtgatcactaaacaagtctgacattgccactcacccctaggagataaaaccatccccagttgagaactacttagctgaagaagcaagatggtgagcaccaggcttttcctacaaggatcatgtgaccgactctgcctgaggacttcacctccccctcccttctgccccttttccatttcaattgtgatttccctttggaaagaagtggtgcttcagaacatgcagccggacttatttgcttgaatatgtgggctccatggaaaaattcttggtgtgtccaaatctgtttgaaagtaggggctgaactgaacctgcttggtgtaaagaattacctttgtgctcttggctggcatggggctcatccttgtaatcccaggactcaggaagttgaggcaggaggatcttgagttcagccagggcctgcttaggctccatagagggtttgaggccaacttcaaactatctagtccaatagtgttaactcttaagggcagaattgggccaagggtggcattgaagttgagaaggcagactcctcattggaggaaatgggcagagatcccagctagtggatactgttgggtgtgttcacttctcttgcctgtcatggctggtccagggacagcgcaggcccgggtcctttctgactgctgttttctaggtgagttgatgtgtgcttgtgtgatgtcacccttatccatcactttcgtgatggtgtgacttagtggagcctcattgtgcctgcctcagcttgttcttttccagaagccgtgcaaacttgacctgggaacctgctgtcaaggtgacctggctaccttgctgctcttaggtgtggactgactctctgtaccaccacccacctctttttttttttttacttttcaggaaagagtgaaaatctgtaggcaatgatgcttttgtttgtttgtttgtttgttttctcctacaattcaagaagtacagatataatgagctaaaggaaatgaatgcccctctcctgcaaacaactgccttcttaaggaactcctctggctaaccactcacctgtttggggctcacaggcattatttcctcagttataatgatcagatgcattcatgggcatactctagtgtttaaggacagaaaacatcggaactggatgtataacaatgtttccctagcatatctaaggctctgggttccatatgttcctcagcaaatctcacaagcaatcaaacacacaaaacaaaactaacctacctcctaaccaacctacggaccaaccaacccagaaaacacatcagagcctaagacgtctacgtgtctatagagtagcaagatgaaacagttacttaggatccagggatctgtcctctcctggggcatcttttgttttctgctgattttggagatgactctgagttctcagttctacctcagaacatgtggaaagtgaattctttttgacttgtgcatccttgcctgtttgattgcaagtcaatatgactagtaattctgacagctgtgttcctcatcttccatcttcagagggatagagataaacatttatatgctggggaaggtatggagagggagacagccagccgccaccatgatgggctgtctgctcatgctcagctccgcttcattctcaggcttttatttcaccacaattggtaattagtgaaggttctgtgtgtccatgaggtttcatgctctttcaattttatttctctcaaatcgccaccatagatcagttttatgtctattgtatcagatcttgatactccattgagttaaaagatgaatatctctgtttctaactcatttccaaatagataatgaatattagaagatattaataagattgattaaaatagttaaattcgcataatcatcatcaccatctattatgttggtttttggaaacacaagtccagcccttgctgtcctgaaacttactctgtaggccatactggctctgaactcagggatccacctgcctctgcctcctgagtgctgggaatgaaggagcgcacacccacacctggcaaattgcttcattattaaactacaatgagcaatatttcctgagggaccacaaaccacactccaagtcatataactagcttaaatgctaaaatggctctattgtcagtcacattcaaaacagatatttacttatttctcttgagatagtgtcataatgtagcccaagctgtctcaaatgcccactagcctctcatatactgatattcaccgtttctctgtaatcctagcaccaataagtaaagctctgggtactccatcttctatggaaacaatataatagtagtaatattacaatattgcttactcatgtaagaaattacagcataaaagctaagcatctactaaaaatgagatgaatgaaaaatgttttccgtggtttcatgttaattgattcattttggtaatgatgtttccctgggattgctggggattgccatctatgttttgaaacagtccctgcatcggatctattggccagggcatgtgtgacgccatcttgttggtaagaaaggttagctataaatgcgggggtgcctgagcacttctagagaggtggcgtatgaagacggccatggtgggtgacctgcttacacagccttctctccttgcttctctcctcctttcaataaaagacaagagtcatcagggatgaaaatttaaaacttgccgtcaaccttgagttgttttatttatatgtgtgtgtgtgtgtgtgtgtgtgtgtgtgtgtgcgcgtgcgcgtgcgtgcacacaactgtggaattggagttggtgtctgcttccacctctctaggctctgggcattgacctcaggttgccaggcttgcagggccagcacctttaccctctgagtcattgcataggtcccctgagttgttgctgatacccagtgatgatgtagtgcagcaaagcaggaaactcctgtttgatttccagccacaatttcttaatcacctgctggcacaagttcaggagcatttcctcagatctcccaaagctgctcggtttttaagtctgagatccacatttatatgtcaagtttctgccttggggccagcttcttttttctttcataactttaatgaattagaattgctaaaccaatactctatcttgtggagttgaaaaataattaatccaaaaaaaaaaacccaattgattcagtatctgagtaggattatctcatagtttcatccaaatgaatttggaacagtcccttttaaggtaatttgcgctatgtaggaattgcctatcggggagcaaatgaggttgctaagaaatagaatggaaggtttgaaaccaatgtgaggccctggtcccttgataagtctcaggaaggccctcccttcctggaaacatttactgaatgcctactgtgaggtcaggccactttctcacacttgggacaaggctaccaagaaggctgagacaattactctctgggagccggcattccctgcagtgaggtgagagccgcatcaggatactgcagatgaataatgtttgatacatgctaataactccagggaaggaaatacaagactgccttagttgccagcagttatatggggaaagggatgtaagtggataatgatgctgaagaggggcctgcgtgaagtggctggaggactgatcttgggcgggtgggtgggaggtttccagatctaaggaagagaggagggtatgtttataaaagacttaggtctgattggtgtgaggagaggtgggtaagccagactgcggaagcctcactggcatagttgggagtctaagggaatattctgagaacaatgtaatttgttgtccccaggttagtggttcctatggttgtgggtgcacagtatccgtgagtatacatgagaagcagtgcactgtgtgttttcaatgggtggcgtgtgttatctgaataaagctgctagctcatgttagtgcggctactcgaggagcagactacaaggaacttaggaagagagaaagccggttgaatagttcagttacttcgatggcttgttttctgtattagcttgactgtgataagggatgcctagatatttggtcagctgtgattcctggcattgcttatgagtgtgtgtttagatgacattagcctttgaatcagtaaattaaggaaagcggatgggggtgggtcttatccatcagttgttatctatcagttgctatccatcagtggaaggctgctctgaagaaggctgacctttctatggagagggagcttctctgcttgcctgagcagccacacaggctttccctcctttggactgaattgaaggatcagtcaactttcctgtcctccaggtcatcctactttggaatagtaccatggcatggactctcctgggtctccaggttgggacattgcagcctccactttaacatttattttttattactttatttctttattgtgtgtgtgtgtgtgtgtgtgtgtgtgtgtgagttcacacttgtgaaggttagatgacaactttcaggaggtgctgcttttctttgaggtaagatcattagcttgaactcacgtggttgtcaggtttagcagcaagcacctttaccgcctgagccatttgactgacccaagaagtccttttctatatccaccctgttgattctctttctctggagagtctggatgggccactttatttatgattattttatgtatttataccactaatctttccctttggtgcctctgctttcatttaattctggcaagatgcatgctcccagggccttgggatagttgaaatggacgaaaacaggctccgtgattgtgtctatggatgaagcttgaatagctgctaaagaagtcagagtgtttaaatttatggaaactttaagcagaattactggcaatttacctcaaagtttgtacttgccctgtttgtatttgaagaagaaggtcgagatgagaaaacacaggaaacaatttaatttacagatgtcggaaccctaaggtggggcaaatgtggtagacctcagggtctgcaattaatggtcggaggttgggttgacaagatggctcagtgggtaagggttcttgccaccaagtctgatgacctgagttctactctggggtccacttgatagttaagttatcctctgatttcatatactgtggtgtacatgtgtacacatgcatggacatgcacatctatacatacattggcatgcatcacatacacatgtgaataaaacagacatacagatagatagaattttttaaatgcactatattccagcttcttgacatttttatatcccagtcagtgtcttgacactttttttttacagcctttggttttccccctcttactcctgaataagaagtgcagaattagcttgttatagaagctttgtcttgttagggagccactgctagtccctccttataatacctgtaatttatggatctgaagacatctatctgtcctacaaatgccatctgctgcagtgcctcacccacagactgcctctctcctccatggaactgcttgctgagccttatcttttcaccaatgcacttccaaggcagagaacaccaccgagaaggaagttagttagctccagggcaagaaacggaagaccccagccatgttcacccagaccccactgtgataggttccacagactatcttagccactgtactatacctgtgaagagacaccatgaccaagacagctcttatagaagaaagcatttagttaggggattgtttactgtattagaaacttatttcacaatcatcctggcaggaagcagacacatatccactacagatggaactctgtatgcatatgcaagcccatactattctcaccaagaacaggttcagatctggttccaaaaccagagagggaaatttagggcatggtaaaatagcaaaagaaccagaacaccgtgagttaggactctgcacctgaatactcaggtctctattctaaattgtaacctgaattgcttgatgaacatatctggaaagggtctcacctagagagagcaagtagacctggaccaaccaaattttttttttttttttttttttttttagttctcacacacttttaatccttctggatagaattcttatatacagttttggggtgggtaagggtctgacagcaggtacttctcattggtttgatctgagagatttggagaaaccttatttgcatgtgggagggcttagtgctgctcttacatgactgatgatcacacacctttttgcagggagctgtaggaggctgtagctgcaacaggagcagggggctggggagggggagcccaagaggtatggtcgaccaccttctgtctcatgcaggtggaaatcagcacccaccaggtactggggttccagacctttgctcgaccagggaccatacagtctgtgcacagcccactgccctataacgaattaaaaaatagttttctttctcctgtaactcatcgatggagcaaatgtttcaacgttccatttagtgtgttctattttttcatcaattaaagatataaacatttatatgcatgtgtagagtattagtaatgttgatgctattgatttttgttactaatattaagacaaactaacattaacactatacaatactttattatttgttttctaaaatagaatgtgatatagtaaaattcttttttccttttatcattatctatgttagaaaatgtgtcctatttaaaggattgcaacttccatattcatttattattatgtaggtggtatgtatgtatgatattatggaggtcagagaacaaccttttggagtttgttgtcttttccacttttatgtgagatctggagatcaaactccagtttttagtcttgcatagtcaggtgcctttacctgctgagccatctaacaggttctcttttcttttgactaaatgcataggattcaggacaaagatcagtagctgttgggaatttgttctaaggctttcaattaactcaaacactgaaggtctgaatttctctttctttgttggatctttgtgtgatttaggtatcagagtaattgtagcttcatagaacaaattgggtagagtaccttcggtttctgttttgtggaataatttgaggatggaccaacccaatttaaagcaacaagttgcacaacaaacattccctggacacctcaggtctggatcacacaatcttggatcaatatggcctaaaacagttgattccacagctgtggcaaggcatctctgcagctcatctgcagctctgtctctgatttagggacagtcctggctagtgcaatgttaactcgagtcctctgaaaggaggagacttcaattgaggaaatgcctccgtgacagccatctgtaaggcatttattttctcaattagtgatcaatgagagaaggctcagactgtggtaggtgatgctatcccctgggctggtggtcctggattctttcagaaagaaggctgaacaaaaccacagaagcaagccagtccaacctctccatggcctctgcatgagttcctgtctccagcatccttccctgtttgagttcctgccctgacttctgtcagtgatgctgtcttagaaagtacttgagacggtcattagcattttagtgctctgactttcctgttactattgctgtgatgaaacaccatggccaaagcaacttccatactgttgttcatcttccaagaagtcagggaactcaaacagagcaggaacctggaggcaagagctgaggccatagaagggtgctgtttaatggcttttcccccaaggcttgcttagcatgctttcttgtagagagccagaccaccagtcttggggtagccccacccacaatcagctgggccctccctcatcaatcactaggcaaagtcctaccaacttgcctacagcttgatcttgtgcaggtgttttctcaatcaaggtttccccttcgatgactatagctgtgtcaagttgacataaagtagccagcacacgtttcacaagtgtacaaccacgaagcgtgaagatgtggctagagtcgtgttatgaatttctgtgtgagttttagctgacttctttcttccctctcctttctttctcctgttatgatgttttgcatagtggtgtgtctgcctgatttcctgattctcattgagtatcagcaacctcattttctatagacaggctttctctagctatagattagtggatgtgaccatagtttagataccttgaagctatacattctatctagcattaagagtgaaagtaaaaagcacaaagatacatgaagtttttcccgttttctgctagtgtagactctatgtgttaaaaaacaactgaaagtttatattataataagctataagtgctttgccagtgacaattcctgaacctttgccctgccaattcctacgacccttaagttttcatcaatatttataggaaaatgtcttatatttggctgaatcatgataattcagtttgtccaatttaaatacagcttgaaaacaaattaataaaataaagatttgcaaaaatgatctagatgggcccaactccaaaaggacatttatcaggaatcgatgctaactacattttagttggaaaaaaaggtcatgggaacccagaatgattttatgtggtctatgagcttaatttatattttaagcctttatctacgacactgacagatttataacttagattctcttatagccattttatttttgttctaaatttggccagctgtattttacatatcttcctgtgaaatgtgagtgagggacacctgtgtattgctggagcatatgatgccaattagctgtgcaatttcaatggcaacaggaaaaaaaaatcaagcctgtaatacgtgatgttctgggctatccctccgctcactccccacttatgtgccagaggcgctgcacactatataatcacactacaacctcttttctcaaagctctcactaagagcccaccaccctacttttctgaggtaagcattattaatgaaaccttggcaataatttagcaccttgaattccagcctggagttaccgagaaggaaggatctagcacatagaacctatcttaaaggaggtttaaacactgctctagtcaaagtggttctcaggtggcatgcattgtaaaccgtgaaaactgggaacgtttcacaaggccaagttaggatgggacagaggttgctaatctgcttatgtggtccaggtgggcctaatgcagtcccaagcctgtgtgtagagatagagggctggaggagaggctgatggactcagtctaaggcagctctctttgacgacgaatggacaggagactgagtgaaggtgatgtctgccattagaaggtgggaaggtaagacaagtttctcttaggatgagggaccataactagtagacacatggatttcagcccactaagagaacttggatcagtgcttctcagtctgtgggtggtggcctaagaccactgggaaacacagatatttatactatgattcataagagtagcatgattacagctatgaaatagcaatggaaatgattttatggttggggtcaccataatctgaggaacagtattagggggtcgcagcctgaggaaggtactgaatgacagaactacagaactcagtgttcatctgagttacaatgcagtgcttgattaccagccccacaggataatgtattaatttgttgggactggtgaccttgggtacctagtgttccttttgtctcaagcacaggcaaggagactgtaggcttttttgtttttttgtttttgtttttgatgagaatttgagtaagataatatttgtaaagtgctttaatatgctaccagatgaaaagtaaaagctccacagtaggaaaagtagccagttgaaggaccaattaactaatacaagaactgccatgcaagcagagaacaaaggacattaaagagagaatttgaccttaggagaggctatggggtcttggaagacggactgccgttcagttggctaaggcttatgttagttaggaagggagtggatgtgttgtgcaccatgtgtgtggggtttggagcagtattttactaggactgacactttagtaaagtgagtcagcccggagaagcagcaagtcctggggctaatgctctcgggtgagtgtgagtgtgtgagtgtgaggtggggtagtgcctagcagaaggaagtactcactcccagctgcttctcctgttgctaggcagtttccccccaccttacatttgctccataaaagctttttcttttggattgtgatgctgagctttttaaagcagcgatgtgctgtactttggagcccaggatcctcttagcaagcatttcagcattttagtaaaacaaacaaaaagcaggtgagttttagtgtgacttgacttttaatataaagtgcaatctgaacactgtgtaaaactgtccccttattcatgtgtccattggataaagcctgttcctgctggtgctatatccgagattaattaaacatgtgggcaaacagcctttagcagagcacctgaccctttccccttggcttcctgttgccccgccttgccagccctctcctctgccctctcttgctgtggtaggttttgctcttgctctgccaaccagtgctggcaaaacctcagctgccacgcagctggcattgcagccgaggagaatctcctgtccctctgtgtctcttggcacttcctctgccctcccatcggtccttaggtctgcactcttgtgtcacaaaactttaatcactgctcgtggcctcagctgtgagcagagaccaagctcttttctttgagaaccaagaaaacttaaaaataaacagaacactgaagcagtgcatggtgaggtacacccgtaatctcaggcaggactcaggaagccaaagcgggagggtcttagatttgagccctgcttgggctctgtaatgagatcttgtctcaaacgaatcaccaggaaaggaacaagactgccttctttcctcatcaataagatgtaaagctggatttctgatgactatctacatacacagttctcataaatgtgtgtatttgttgataactgggtttactgtgtttgttattaactaagcaatctaagccagaagatttagcatgatttacctcacaaattaaaaagcaagcattagtggagcaagatgcactcaactctgaggaaggagaattaacatgagtttaaggtcagtctgggctagctagtgaatttgaggcaagtgagatcctctctcaaaacatctgaaaaagcagtaggactgagtagctgaccaaattgtggctcaactacttcttggtgggatctgtatatttgaaacgcaaatttagactgatattcagcggttttataaaaagaattttgatcactgtctatatcatgaaaggagtcttcaagtaatttcgaggttggtatcatatggactccagcatctctagggatttcagtgcccagtgaagaactatttgaaaatgcgtttgtctaatcaccctctccaaactgatgactggtggggaatctctctctaacatgggctgtgcttgagaaggtctgggatgaaacccaggtttccatgtgtctctcaggccagtgacagttttgtgaccttgctttatgagaaacagctaggctgtttccctgagtatcagtttcatctgcatggttcctctgtgtttgcgtggaactgactggccactggtgactgcagaacaccagtggattcagctgggtgcctctgcttcaatgagggccccatctctgcatcacttatacttgtgagcatcttgagactttagcactgcatcaaaacgggcaaggaattagggtttctaagtctctgagcctaacctggtgcatatccagtactcctatgtatgttaaaaggtttgtttacaatggaggagttagagaaaggactgaaggagctgaaggggtttgtaaccccataggaagaacagtatcaaccaaccagaccccaccgcagagctcccagggactaaaccaccaactgaagagtacacatggaaggacccaaggctccagcctcataaatagcagaggttggccttatctggcatcaatgaaaagagaggcccttggttctgtggaggcttgatgccccagtgtaagggaatgccagggcggggaggcgggagtgggtggttgggtaagtatcatcatagaggcagagggagagggacatgggctagggggtttctgggtgtatgtgtggaaacctgaaaaggggataccattggaaatgtaaatcaataaaatatccaataaaaaacgatgaaaaaaaaaaaaagagagactcgtttacaataggcttgcgcctcctgcagctactttaaagccacgagaagagtgctgtgttaactggggagtaggactttcaggtagtatcttgtgggagctttggattaagcttcggagctttgtaggttctcaaagcagatcctgaagcccagctttactctcataaattgcctaggatgatgagcttagtcatctgtgatgcatccctttattagtctataaaaccctctggttccagacagacatttcttgaccttatctactcgggaagtattgacagaaagggccgaaggtaatgaccggtcctttccatgactagttttccactgaggaatgtggatgatgtgatgtactctctctgcccttctgaagtcagcacacttagtagttttcactgagggcatttttgttagtttggattcttcaagtaataataagaatgacataggataagagcctaggtggtgtagtatagtttaattaggctatagatgtttgttaatggatggtttgatgtagaatagaaaacacatagaaatacttttaagaatgtgtgaacattgtgtgtatgtgtatgtatgtgcatgcacgcatgcgcgcatgcacgcacataggtacatgcttgtataggtcaaaggtgaaccttgagtgttccttaggattctctccccttggaaacattatcagttgtatttatgcctgtaggatgcatgtttgtatgtatgtaggatgcatgtttgtatgtatgtatggtgtatgtatgtatgtttgtatgtatgtgcatatgcacatgccatggcatgtatgagaaggtcagaggacaactttatgaagtcagttctctcttgctccctcccttaaatgtgttctaggtatcatactcaggccagtaggcttgcatggcaagtgcttgtttctactgatgcatctcacataccgaccttttcttagagatgggccttctcattggcttctcctcactgagcactaagccggccagccatccaggcccaggctgtcctgtggagaggctacacgtatgcaccaccaagtccagcacacgtgggttcctggggtcagacctcggtcctcctacttgaatggcgagcattttatcaactgaactctttcctctaggcacacagaatttaaaaagagcatttcaattttaaacacattggcgagggcacctcttagaaacaatttctcaagaagaagttcatataacattagtttcaaagttaatcattcagaggtatttatagtaacatgtaatcaccgaacatttcaggacttcaaagttaaacctctggatcattaagtagtttctccctgtgtcttttttccctccagcccctgcagccatcagcctgcattttgtctctaggggcatagccattttggatgtttcatttcagtggcggtgcatgtgacctttgagagctgctctgggagtttcacctaacctgtagaacgtgttcgtattttgtggcttttttaaatgggtgaacatcaatcttgaatgctgacgttgcagcttgtgcatccatcggtctgttcgtggacatgggaactgttttttgaatctgtggcttttggtgtgtgtgtgtgtgtgtgtgtacttgtctgatcatctctaatttgggggggataggaggtgagggcacaggagtgagtgtgggattgggctgagcaagaaaacagtaggatcacaaaaggagagagtccttgtgtagactgatagcttactaaaacaggtgtgactgtttaacttaagctccggacagtcatcccaacaatttctatctctggaaaaagaacaagaaaacattctaaagtaacaagagaatatgttactggttaaggacttctagaaggagagaccttagtgaggaacaaatagaacaggctacacatgtgatacaacttgcctcgcctctggcctaggatttgaatgtttgtcagcttcatgttgtgctcagactccatcttcaggatgtagaatgaagacacacccacatgattgagatataaacattttacacacgggacagtaatgggaccagttgtggcacaattgatatattggtctagctagatgtgagagctatttctggactcccccacccctatagtgagcttcctaaggggtggggtgcagtggaggaggagcagtgatctggatatggggaatctttgccaggagccagtttcttagtcatttatttacttttttgtcctttggactctatggtcactaaaggtacttcatatcatcgtcaaattctttgagtggttttcattcctcaggactgccatgcatcatagcaacccacacttccttctggaaacttcctctcttccccgtgtttcataatcctcttcatgttttcataaccattcttcttctctgcgtgctagattttatttcttgccttttaaatattgtagttaattgggaatcctcttctcctttcctccctcctcccccctcccttcctgtctgtctgttctggaaaatcaatccaagacctttgtgatgctattcaggtgctcttctgctgagatataccctagtgttttcttccattcctctctactctctgatttgtccattggagatggggtattactgtgtagcccagctgagctcatgatcttactctcccaggaaggctcatctgcagtatttagtttaactactgcccctactaccaacgcatgctgactccttaaaccaactccctaaaaacgaacaaacaaacaaagcctcctttcgaacagctcttatatttcagagttatttttatttttacgtgtagaggtgttttgcatgcatgtatgtttgtgtaccatgcatgtgcaatgccctcaggaactcagaggtaggtaccagctccctggaagtagagtttcagatggttatgagctttgtgttggttctgggaaccaaattcaggccatttgaataagcagtcaggccttctaacctctgagccatctctccagctctctttaagttatttaagatcaaatatttctcatgggttctgaacttgatttattgctctctggatatcctgcacagggcatctgaagttccgtagctctatatacttttatgctccaactttgtgatgtttcatgttccttattgtaagagtgtcatgatagcctgtttccaaggtgattctcctcttctgacaaccactcctgtgtacctaggaattatacccagtcagctaggtggtctaggacagacttttcacttctgtaatgagaataccagaatttgggagtcaagtctggattctgttctttgattatagcaaaaccccagaggggagagaaagggaggaattgaatgaaaagcaggaggcacaggggcatcacgggattgacagctatccagaatcttgagtcagtatacgctgctggagttgagacatagttttcaggcctagattaagttcagagcattggcaggaaaacaaggttaatgatgaagttgagggtgtggctatgaaaccctttgagttcctagaaagatgcaaggaagtgcctacaaccattcaacccagcaatagggtttctaagatgcttcggggtgttgtccctcagtcttcctggaagcctggaataggggaagcttcttcggagttccacagacctggctttctgaagctcagtcagattcacagtggagaggtcattccttagagggaacaggcactgccagccactgcaaagagatccgaaatctctagtctcccccagtgtctgcaggcaagatggcaagcagactgagaaagttacactgatgctcacataggcaactctgccaggaagaaggaagataatgtttaaggttaaatgaagagtctggagggaggagccagctaactgagaagtcctcatggagaaacttccagcatttccagggagaggtggctctatgtgcctttggtttctccacacctggacctggagtgtggaggatgcttggagttcaggtgctcccccaccagctgaagcctcctcctcctcctcctcctgttgtgtttgccttcatttatctccatagcaacactgtaaacagaagagagctatttagataccattaaggtttatctttgtttgtttgttacctttggccccaaaactgtctgcattacacatatttaaagcaggctctcgggacaagacagactcccttttcattcactggcggttgtattgagaggacactgtactcaaaggctctattccgggaagtacatttacccaatttcttacacacctggagctgactttgatgatgatctagattctgatcttgacaaaagataaggatttgggggttgtggtccagtgagatggctcagtgggtatactggatagtctcatgttactagttacaaaaggacggaccctggattaaaaaaaaaagtctctgtaagatctgtttgtaggcaagcttgtatgacattttcttagttaatgattgatgatgacggtggtagggcagtctattgtgggtggtgccatccctgactggtggtcatgggtccaataagaaagcaggctgagtaagctatcaggagcaagccagtaagcagtacactccagagccttggtttaaatggttgcctccatgtttctgccctgtttgagttcctgtcctgacttccttcagtaatggaccatgtgtatggctgtataagccaaataatttttttttcctcccccaacttgcttttgctcatggtatttcatgacagcaatagtaaaactaagacagtgggtaaaggcgcctgcaaggctggtgacttgaatttgatcctagaacttctggtagagagagagacctgacttctaaaaattgttctctggtctcttccacctggcatgtatccacactacacacatgcaaacaaccccctaatagacacactaaacaaatagttaataaacagaatttgcgaatccttgagagagagtgtgtgtgaattttttatatgagtggggtttgaatcactggtgtccatacagtgaaatgctggaccagtattcccccatggctggatgattctcgcgctttatttatgtccttgtgcagtcttcactgaacagggctggtctctgtaacagtagagtcctgtagaaacgatggaacaagactttcagagccaggacgtgcggcttccactttgctctctctcagatcactggctctgtcagctaagtcttctggaagcatcggtttgccctgatttgccaaccacatgagtgagttacctagggaacagccaccacggcaggccaagctttgcataactgcagcctgagctgacatgccagttacagctctctaggaagggtcctccacctcagagccacctacctagtcaaggcggtccccacattctagactctccagaattgctgtcttttgtctgaggcagctgtttcaggatcttctgttttacagtttggcataagtaacagaagttctgcagtgagccagtaccaaccggagaactttgtagaactttgtggaattttcatcctagtttcttagtgagcaccactattactaatgattagtcggggttatggtgtgtgtggcgggaagtatgaacatctcaatccttctactttttttgtagtgtttgcttttctttcatctccacagaaacattgtaaatgagaaggagctacttgggtaccactagagtttattattattgaagttattattattattattattagtagtagtattttggtttagtttttgaaagttacctttggccctgaatgtgtagggatcacgtgtgtttaaagcacgctatttgtgatagggtgtcttttgttgagctatagaatatttgtatgaggaatcagtgggctctgacactcatctccttgcagacagaattgcctgtcctttgtaatggttcgaagatctgtatgcactcactatgtggataaagaaaatggggccagaaagcataactaatctctctaaagctagtcctggctcccaggccaattagatgaggtagatttccatttatgcttttttgttgctgttgttgatgtttttgttttactttactttttttttctttttccttttttttttttttttttgagtagtttctagtgaaaatgactctacccagtaaagactaaaagccttctttttattatgctgagctgggtgtggctgcttgatgctggaacagacatgaaatttttattttataattttgtctatcccctgaggcaatgctccacttggatcctttgaaatggcaggaaataaattaccagtgggctccagtccaggatgcgggatggaggttccaattctgattggagcagacctcacttccagtgcgtaggccatgtgtgagtttatataggacgcttgtctgcttttaaaaccgagaaccgctaagccttgaaaacagcattctgctttgtggctgataaaaaaaggttttactcaagcctaagatgtaatcacaccacttgtgttctttccttgaactttgttctccatggagtagagtcactttcgatttgaagtggtttctctctaaatacttagatgggctttgaggaatgtgtggcttctctcttatcaacctgaacatttcgttcacaaggtaagtgctattatgtttttgtaaaatatgtggggtgtgtttactctcagtttcttaagattattctgtttgattttgttttagtatctacctatctatcatttatcaatcaatctatcatctatctatctatctatcatctatctatctacctatctatctaccatctatctacctacctacgtatctctgttccaggcaccctgtttgaggatttgtatgttttctaggcaagcattcttccaactgtactatattcacatctgataattttatataaatgtaagcattcagagccaaattaggcagatatgaagatgcataataatttatttttacttttccctcccccaaatatgagatttgcttcctgttggatatgagatattgtcttaatgagatatttttgttgtctgctcttctgagagtaggcattaaaattgttaatttgtgttttcaaataattacagataacctagcattcagaaattgtaaacttactagtcaagataccattgtgttcctaactggaattttgccaataggttatcactgtgtgtgtgtgtgtgtgtgtgtgtgtgtgtgtgtgtgtatgtgtatggagattagaggtcaattttgggtgtcttcgtcagtctctcctcattgtatgtagtgccctcacctcttggacataatgttaatttaaaattaaatcatcttgtttaggctgctcaactttttacttagaaatttctttaggctttggggccaacttatttcaaatgaagcaaacatttcagttcctggctagttagttcacgatgtctttgtctgaaagcatcctggaacagccttcctcctccacaaacagttgttgttgatttctagtttcccttgcttccttggcagtcagtgttgcttttctctgggcacacttttttctgcactttcctcaagtcacctcagactctgaggaacttaagctggtgaatcggcctcttcctctctcattctttcggatatacctcttactgtgtctaacaccccaacttcgctgcctgcacatagaaagtactggcaggtagtcttggaccttggggagggaggtggggtgtggctccagggaggcccataccacagagccggtgttgccagccaacctaagtggacaagcatgtgccagcatgcaagcaagacattcccctacccacaactcccagcagagcaaaagcagagagtccacacggactcaccaggaactcagccacataaaatacttttttctttttcaagagctgtaaggggcgatgccaaagctaatcctggtaaccaaatgtgtgtggttgcaatgcagcgccctgaaaatagaacgcatcgtggtaccacacagcacgcatagcacagtggcacgcactggtttgtaagtggaggactggagctttgaaactagataggaggtcaagcttggaggtggaggataggttttcagttttttggaggcagctcttcagacaggtgcagggaatgagtaatacgccactccccaatggtccggctcagccaataagcaccaggcttctccttggtcggatagcatggtctctgtgcctgtcacgagctggatcagcaaccaaacccagattccaggtgtggtattccacagccgttctgtaatttgtaatcatagaaacagaacgttcctcctcttatttcttccctgccaacagtttctgggtgggtgaatgtcagtagctggagttatttttaaagaggtgaagcttgccgtgcgaagctgggaagagggcgtttgtttgcagagcagagctgacatcaaagtgtagattgctgctcactggctaggcgcttgtcctataacaggtaatgtttaacgtgccagtcacaaagatcacaggaacagtgtatgctcgggcataagatagcaccacctttttatgctctggaagacggaaaggctatacgtgttctcggactttttttttctctctctctttcgaatacacttatgcggctgttcttgccaccgcctctttggctgactataattggactttgaagttgcgaactcgtatcataaaaattggtaacctttgtctgagagcaagctcggctaagcaatcactttccaattcttttcacaggataacataaatgtttttttgagagcttgtgaacagattggattgaaagaagcccagctttttcatccgggggatctacaggacttatcaaaccgagtcaccgtcaagtaagtctcactggtgtgttttaaatgtagaataattgtatcatagctaaatgttatatatgtgtatgtgtgtgtgtgtgtgtgtatatatatatatatatatatatatatatatatatatatataggaggtttgcagcttaagtgaaaattgttgctgagaaattttgtgcttatggaactatctttcctctctctgtctttcttgtgtctcattccaaaatagactcttaaaaaatcgtcttgaggactggctcagagtgtgaagccttctgtaagtgacacggtgtcaggatcttgttgtaaatctctacactgaccagagtggcggcttatatttgaatgttttccagcctggccatgcttggttgctaatggtaacgctgtttattttaattatcaagcgaatttagaggctattagcataatagaaaggtaagaagggtcagttgaaagtagcttttaggtagttggacatggaaaatgacagggacagctggtgcaagcctccttggtcatatctgacaggactgtcttgcctagggccaacaaccttgtcagtggttgcttttagaataatgaacccttcccactgtggtagtagtttgggcaagaaggtaaaagtagagaggaactcacatccgtgggcgttctgttggagtttaggtggacagtagtgttcatgtgtgagtgtgtggtttcaggaaagttcttttaagctgttatgagatttttttccccctccagcagtctaatctgcatgcaggaaatcagtaataaaattatgttgctaggtaaatgtgacatagacgttatataattttgaaataatgcttaccctcttatctggcctcttgaacctaattaacatgtttccaaatgaggaaacacactctgttctacttgtagaaatagcgaaaatgaaaagctttgtgctctaaagatttgtgtacttactgtccccatagtgtggcttcagtcattattaaaatcaaccaggaaatcataaacagggccacggtctcatggggaaaaacaatgctacagatattttttgataatctgccctgtcttctaacagtctaacccaaaaacctcaggcagcactagttgctttaaaatctaacagtaaatatttcaaatgaacaacctgtgccacgctggcccacctcttcccgtggggtgttttctcaactccacagcgatgatatctgcctggaagagtcatctgtccacatttctgatgaatttgaaagtaccaatctgaagtcttgttgctgaaaatacttactttcactctactcaaggtccttataatggccattgaaaatgagaaactatttgtttaattttttttttcctacatagtacatcctttcctaggacttatctgggcaaagaaacttcagcctttgaaatagtttttccctgaagctggtgatgtgaattaagtctaagtgtgtcctcctctgcagtcatattgctttgaacctcggcagcctatacttgaggtggcttacggactgggtgaaacatgtttgtttggctcctgattttaagcgttgcatacagggcttgcctggaaccgctttcaggagtggttgggtctaaagtgttgacaagaaatcaggatctgggctcaaccttcagtgaaattaaattactgacaaagtgaaactggggttgtgcgaagcctgcagaacaacttgtttgagtggaaaccacaagcctgtcacagcaaggtgtgcctcgcttggtcagggtgagagagccgctctcagtctgcttgagaactctccatgcttgaaccttgctgggcttaaagtgtgagtcctgggtgtaccccagtgtaaggctcagtgcctctcagacaaggttgaagatcactggcaaatgactgcccttgtgctttgagaaagcccctttcattacgaggaacaggcttaacggaagacaaatgattgcttagtaaagaaaagttttagtttggattgttacataatacacagacttgtgtagttcaactcttgacctgtcattattataaataaaaggacttgatatcgattagatcggtggttctcttgtggaggtagtttttcctccctggggatgtttggcaatatgtggagacatttttcattgtcatagttgtgtggggtgcctacccagtgggttagagtgactctaagtgtcctgtagcccacaggacaaactcaacaggggaggatttttttttttctattccaggtgatcataatacaggggttcagaaattcccaatgtagacatagaagaccatctttgccagcaaaaaagctatggggactgaaagactgtgaccggacaggcttgtgacatagctatgatgtcacagcacgcttgctgtcatcaaataatttcatttctgtgttagttcagtatgcttatttcggtggcaaggctccttgtgagttgtctgagagcgtccgtgtgtgtagcattccgagattgtttgactcaactacaaacatttgatttggcagaaatgtagcaagcgacgtgattattcgaagtgcggtgctgttacggaaccgctcaggctatcatctcacggcgcgcagacgtaggctggccttgctgcatctgcaaagcagccatggtataccaagagaaagcagtagcagctggtatgctctgtgtggggaacaggaggtgtttagtctgtgggtggaggacgcatgtacaatggctacatgtacagtggctacagggagtgagggagaattgaagcagaggatcagtgaggacaaaagctgttcaagagctgctgtctctgagtggccggacggacccagcgccttggacattgcttttcagcagggtgtgccttaaaattgaatttgcaatgcattcctacccacagaacggatggagagcactcccggggcttctgtaactgcatgcactcacagatgatcgactttcctcctgggcttccctttgctgggagtttgaatgttttcacaatgcatttgaaagattctactcatcttggtattgtgtcttattcacaagtcaggaggatccatttatgtttatttttttgtccccaaagggttaataaataaacctaggattcgatctccatgagtggctgatgagggctaacccagtatgcagctgtgtaactttccctgcatctttataaccatttttcggagttatccgcatggaactgaacatacatattccatggggaatgaacattgaggtgcccctgacccagtgcccacagaggcatgccacagaacactgggagcacccccaaaacagctgtgaagggctttgtgatggtatcaggtcagaaagaggggtacacagtgactgattatgttagaaattaactcatcggaggagtcctagaatcctgtcttacggggctccgagttggtggcaggtcaggctcagcattaaaactttgcatgattaacaacttttgatttaaaaagtaaagctcatatttaaagcattgcttaaaacaatttcttcttttagcgtgtgtgtgtgtgtgtgtgtgtgtgtgtgtgtgtgtgctgtttgcctgtgttgtgagggtgcgtttacccatccatgcaggggtcgatactggtatcttctgtcagcttctttgagacagggtctcttactgtcctgaaacttgccaagtcagctattcccgatggccaatgagagcccagcatctcctgctttccatcgcccagggctggggttccaggtgcagggccctatctgtgcctggcttttatgtgcactctggcgattctaacttcattcctcatgctttgcccaggaaatactttactgactagtgagccatctccccgagctactcaaaacaacttctatcaaacattttaagttgcagatttgtacaggctgtaaacatgtttgttccccccagcccctcagctctgcagtctgtctggaatttaacacttcttcagatgcattctgttcataattacagagtggccgtgcttttgaacacaatatttcagtaacaaaatcatcttctagtatgagtttagtgctgcttttattaaggtcttttattatactttaaaatgtaactttaaatagtgctattttctggtttttcttcttatatattacctcagggtatagataatcaagatttttttttcttgccttaaatacttgctagttgccaaaggaacagtgattggaggtaaaattagtattaatatctaaccatcacgaaacttatgggaagctcaaaatgacagtccagatgttcagatctatggattctgaagccagcttgatttttgtcaccgcactgtgaagtcattaaggctcccagatggcactctggacaaacagtctgtcaaatggtggccggctgtgtttgatggtatatgtatgtatttgtagtttttttcaggtaggtaaaaataatatgagtacttttttatactaagatgattatgtcttacatgttcataaatgtttgtatgtgtgcccctatgaatatatgccatgtgtgggggtgctctcataggcctgaagagggtattgggtcctctggagctggcattacagacagctggtcgtgggcaccttggcacaaatgccgggtgttcaatcagggagccatctctccagccgccattaatgtttgtcctaattttaagcctggttttagattattattattaattttttatatgtttatcttttaaatgagtattttgccatctccatttttattcatttatctaaagcaagcttagcgctatccaaacttggatttgtccccagaacatggcaattttcacctgtcactgtgtgttactattttcagtgctccccttcctatcaactctagacaagcaggcagaaaggaagttcactgtgctctgtacatctgtgtctccttgctcttttcttcaggggacagcaacttactgagagggggacattaaatcatctgaaaggtctgtggtnnnnnnnnnnnnnnnnnnnnnnnnnnnnnnnnnnnnnnnnnnnnnnnnnnnnnnnnnnnnnnnnnnnnnnnnnnnnnnnnnnnnnnnnnnnnnnnnnnnnnnnnnnnnnnnnnnnnnnnnnnnnnnnnnnnnnnnnnnnnnnnnnnnnnnnnnnnnnnnnnnnnnnnnnnnnnnnnnnnnnnnnnnnnnnnnnnnnnnnnnnnnnnnnnnnnnnnnnnnnnnnnnnnnnnnnnnnnnnnnnnnnnnnnnnnnnnnnnnnnnnnnnnnnnnnnnnnnnnnnnnnnnnnnnnnnnnnnnnnnnnnnnnnnnnnnnnnnnnnnnnnnnnnnnnnnnnnnnnnnnnnnnnnnnnnnnnnnnnnnnnnnnnnnnnnnnnnnnnnnnnnnnnnnnnnnnnnnnnnnnnnnnnnnnnnnnnnnnnnnnnnnttcctgaactctgtcaagtcacaattcccttctttgtttattcaactctgcatacttatgtatgcattcactcagtgatcttagcatacaaacatggctggctcatttctaaatgaaaatgaaaaacctcttcaccatttcacctacagcatttacctggtgcttattgctttctgtatgttcttgactttcatcatttctagtactgactttgtatatgtgtgtgtgtgtgtgtgtgtgtgtgtgtgtgtgtgtgtgtgtgtgcctccctgctgagctaccagcattaagttgttgtttctctcagagtttcgtgctatgttctggcctgcttaaactgatcatcaccatgaaggcaaactttattgaaaaagagggaattttgttttagagaggtagtttgcttatttatcatatgaaaacattgatacagaattttctgacaggtacctacaatccacaaataagatgaagtttgcttgaccatttgacaggaagtcctacaaattcatagttgaatgcatggtgtagataaatccactggaggttgcgaatgtcagttcagtgcgtagagttcttgttgagcatgcacaaaattctaggttcaaatccccgtcagctgggtatggtgatgtatgcccgttatcccggggaggtgaagacaggagatgtgccagtgtttgatgtaatcccaatataaggaaagtggagacagaggagtctcgagctacacaatgaggagaagatgagcctgggctacaagatatcctgtcctcctgacacccagcaatgagagaatagaaacactcaccagtttctttgattaaaaaaaaaaagtacaatcatttcatttcttttttaatcaaggaactcttctaactggaggggacagagattttccatatgggacctctatgttcttattcatttatgtgaaaagtttccccaaatcacaaaactatttgaaaacaaggaacatatattatcccttttatcttttggtacccagtggaaatgttggtatgaaaattggattctgatcataatcacatcctgggtacttcaagagcacactgcaaaggtccgggaggctgattcttccattgtccagtttcccttcattcctatcagacgcaaagctgccccagcagcgccgttgctggacttctggtttcagtcacctttgacttatcatggtagggtaatgatatggcacattacaacacattctgaaactgcgcagcatccaaaagaggcgagcttatcacaccctcaccaggaggaagcaaagcagagggggaactttgaaccatgagtctttcaacgcagttggtggaaggtttagtaactccccctatccctgtataaagaatacatatttacatctagtgtgtacacaattacatgtttacatctgtgtattcacatgacctcttagaaacatggcctttctatgagtttatagtatgattatgtactgttctctgtctggtaaaatccgaaatgcacatttaagattttcaggctgggaaatacagtgggtatatagggtgtgaaaatttctgtaaagtttaagggcaaggaatagtattgaaagcaggtgttcctgggggaggtaatttcttatgataagtcacaaatgctgctttaataagacatttcaccaacatttacagtaagccttcttctcaaagctagtagcatactggtaagttacctgtctgggtttgcctaccagtacatagcattaaagataagggtgcctccctctctagccatgttgactgtgacacaattaaatgccatctggagactgaatccttagaaaaccgaccgttccctagtggtttgtttgaactgtttccacgaaacctctgggtgagttttgattacttttctctgggatccagcaataaaattcaagtgaagaagggtcacttgctgtgaccaaaagcctcttcgatgatttttggtgtctcctgagttgggctaactcttgtttgttgtggtaaatatttaatctcagtcaggggtttctaccctgccttagatcattcagttcccagataaaagacatacaacttttatatttatactaattggtagacagcactagaactgtggagatgtctactctctaagctattagtttctacttccctatcaataaccccgagttatgacttgtcatagcgtgcctgggcagctcttaactccaattggccagccctcatggccatgtttttatgactcacctattccatggcatcttctcctctctctcctctgtggtcctcctcagaccccaagcttgggaacccaaactctgcctacctctcttctgcccagctataggctgtaggcatctttactcaaccaatagttttaaattaaagagcatggttacatagcatcacttggtgcacgtaaggattccctcatccctggggacaaccagggtcaatattgagtattacatccacagcagcagaccaaacctcaacacttgtatttttggtggcctcagccaggtcacttttgctccctgtgacggatcagcttaccattgtgacaaatggtaatttcttgctcactctctatcatgctgtatgctaaattctagaactagatcactaaaaatgacagtggtaattcctgtttgcctgaaatctagaaggtactcaggcttggacggcaagctgcttcctgggagtgttgggctgctcaaaggaaatcagcaggcacatgtatggcgcctcgcttagcaagtgcccaataactactagagtgttattgtgaacattagcacaatctagttacctttttttgatcctgtgaaaatacatgtgcctttgagggagaaagtcagctctggctatttaaattgtgattgtcaattatgggtctttatttttctgaatttaggcaatctgagactcattgtttctactgggggtagatacttgactagatgtagtttaaaaatatttttatttaattctgtgtataggtatagatatatgcacgtgaatgtgggtgcgtacagaagccagaggggttggatcctcctggctgcatttccaggtgtctgtgagccatcccatgtgggtgctgagaactggttgctgatgcattccaagaggagggcatagtttctccagcccctttaaataatcacattagtaaagaatttatggtcagttaacttgacgtaatcactagagtgaaggggctgctgtcgtttctgtctcattgcatgtggtaccaagtggttgtattagtcagctttttaaaaattcaggtttccactgtatttcctgaaaatgtcaagattttaatttgcaatgatttccccattttaagaaagagcaaaccagaaatacttccacaaattcagatgatgccatcacagcacatccaaacccaaacctttgcattatttattggctcatttttaatattgccttctctccttcccattttcgtgaagtgtcattttggacgcagagagaggtgatttacacagatgagatcagaagatattatcagaaaggatgctggagggcttacattctctctcttcttggaatagctgttcatgatcccgactaagctcaagagtgcatttcaaggcagttgtccactgagaataaacttaactgctcctctgggctgggccactttgtcccatcaaagtgtaaaaagccttggttatatgattggatgtgaatttactcacagacatcaataaagtgtagtagggttaaggctgaacaagcatggaggttctagttttacttacaatgagaaagtgaaaaaacaaaacaagaaaagcataggagttgtggttttctattgatttaaaaaaagatttatttatttttatgtatatgagtacactgtagctgtatagatggttgtgagccctcatgtagttgctgggaattgaatttaggacctctgttcgctccagcccaaagatttattattataaataagtacactgtagctgtcttcagatgcaccagaagagggcgtcaggtctcattattgatggtttatgaaccaccatgtggctgctaagatttgaactcaggacctttggaagagcagtcagtgctcttaactgctgagccatctctccagctctattgatattttaaaaatatacattataagatgataggttttttcttttttttaaagtacctggctaccaagtaataaatagaatagacaaaaaagttgttcgttgcttatcatttgtttgcttctggagagtttaggctaatgaagcagtaagcgttcaggggaaatttcctggtgtaatttctggcattctgggtgagatttggtggctgaaggcttcatccttcatctatcagacacacacacacacaccgttttgtgcctctcctaaagtgggtggaagatttgtaagcatcgagcaaacatgcacagtaccccatgcaaacagtgccagcttcactggagagactttcaatatgaaaggaaaaggccacctgtcatacaaatctaagtgtcacacactaatcttcccaaatgtgactggtatgatttttgtaatgttatcatctgaaaagcatatgaaagacatgctttgaaggagcacagctaagattagccagcttttcctaagctttaaaggaaaggaggatttagtgagtttgagagaaacacctgccttgaattaagcactgtttgcattaacccagcttcaattgttagtttacctagagtttgctctgtgtgcccagaacagttgggggagctatccctgaacaaaatttcaagtaccagggtttctgctgtttgatttcattgtaacaatattgatagctgccagcccaaaatgctttgtattttttttctcctcagttaactgagatgtggaaattctcgaaggaccggtgttcagtgtgcctgttcctaggcttcttttgcttcatcttggagagaaaatttctaaaaaaaagtgtactgccttataaaatgccactgctagctcatatgacatgtgacattggagagcccagattggtgcatttagtttttcaaagaggcgtagtctgtgactgggaggagacaatgtcttagtctgtggtctgttgttgttaggaggcaccatgaccatgacaagtcctatcaaaggaagcagttattgaggctgggttatagattcagaggtttggtccattatcagcatggagggcagagtggcagacatgttgctggagaagtagctgagagttctacatccagatctgcaggcagcagcaagacagccactgggcttggtttaggcttttgaaaaccttaaagcctatctccagtgaattgcttccctccagcctcctaatcctttcaactagtgccattccctgatgaccaagtactcaaatctatgagtttatagggaccattctcattcaaaccaccgcagacagtatgagcatcattattattagctgtaggtagccatagcatgcagcatcccagattactgagaagtgaccgtaatgtctccactaagaaatggtggagtggtggcgcacgcctttaatcccagcacttgggaagcagaggcaggtggatttctgagttcgaggccagcctggtctacagagtgagttccaggacagccagggctacacagagaaaccctgtctcgaaaaacaaaacaaaacaaaacaacaacaacaaaaagattaaaaaaaaaaagaaatggtggagaatcataactactttattgaagactatggcttaagctgtaggtagaccattgggtttggatgtgataccttcccgtatggacaggaatagtgtttttgttgggctgaggggctgggctagatttgtagtgaggtataggtgggggtactccctgggtcctcacctgtggacttttcctctgctacctttaaaacagcacccaatgaatacgtgacattcattatctatagattccaaacctatgagcagagaagataaacaacttaccttgtaccttgaacaaagaagagaaaaagcttaattaatttttggtttgggttgttaaggggctttgtcgtgactcatcgctgtgacctctaaggccagggtggattggagtgaggtgtagcaacaacatgaggaaatcactgtgtcagagggtcctgagcacctcagaaatgttgctgtactcactcaggtttcaacacattggatgagggttgttagactctgtcaggtggctcgctgcttgcttctaaatgagacacagccagtcactctcccctttgcttcagatgcctgaggggaactgaagcagaaagaagacaaacttcctcagcactgtgaccttgggcaaataatcaaagtttgggctttcagtcattggttgtctccttctgccgtgttgcctaaacagacttaaatagcattggaaattggacttctattttgctttcttgtgctgtgtgcctaacattgtcaaaagtctatttttagctgtgccaggtttaccctaactcaaatttgtaaacttgatcgacactcccacatcacacgcctgccaaatacctgtgcgttctgatcttcagattctcttcctgctttgtttttaacttacttcaagtggaaatagtaaaatgtgtcatcaaattcaagatcattgaactttatggttttctagttgtaggaatgttaagtgctaacccatgtgttttaggctgggtgaactatagttgagaaataaccaggtatttgaattttattgattggcttacataaatgtctttgtaaattcatatatttatgaatgttcaagcgtattgtttgtcatgatgatggagcagacctagttagtataaggtgagagttataaaactttactaatctaaattgccagggaccacactgccacactttgacctttgtagagtgaaatggaacttgtctaaaaatagacctaataaataccttttatttagatagttccttgtttactggtttctcactccattttgcttagctttttgaaaaacaacaaaaatttacagatccttttatctttaacttcaagtaaactgacttctgaataagaaaatccaaaataagatattataattgccatcacttaggtctatgaaaatttatacaaagctttaacgattgctaatttgaaactaaccctaaagcccagattctatggaaaagataagttggttacattacctattttactggactaaagaagaaaaaacccctacagtatgctgcctctaagtcctgctatccctgtagccactggagttttaaacaggtggtcaccacagaacatcaagtgtaacaataaatagcacagtctaattccagtaagatgaaactctgctgtggttacaaggggtggcgcaggggaggacagttaggggtgggggatggggatcagacagtgacgccaaagagcaaagtccaaggcatgagtcaagctctgaactccttgcagggagctcccgttggctcaccaagcccttagaaactatttctatggtctacgtgaataaccaacccaccaccaacaggaagaagtcctcatggaacttttcctttgtcaatgtaatcttttagattaccaaagtcacacaaagctgatatttgtccaagctgaaaatattgcaggaaaataaaaataagaatagttctctaactactggatgggtgcaatttgatgatgtatctatctgagctttatagttatctatacatataaaacagattacacacacacacacatgtatatgaagaaaaagatactgtgtgcaggtgtggagatttgaaatggtgacattttgcttgatatgtgtgtaaacttcaagctgataggttggttgcttggcagatatgaaactctgctgtggggacagtatataggggctaaaggccacatgcttagtaaatggtgtgactggaagtcctcatgtgactcagctgcactttgcattataaaattctgcttctctgaacgttcaggagagagacagggtaattgaatgaaggaattttctagtttgttgtgtgtgtgtgtgtgtgtgtgtgtgtgtgtgtgtgtgtttgtgcgcaagcgtgtgagcttccagaaactgcttgggtagaatggatgttctggagataatggaggtgtttgtatgttttggtagttacaggtaagaaattatagactggactttttacctagaggtcagtgctttgagcaagctcttctaagattccagtgtgcacatataacatgggagtgtgttacaatgcaggccttggcagggaggtgtgggagctgaaagtttgtttttagcagggctgggcaatagagaccacactctcagtaggaaaggtgtattatatactaacataaggcttaaggaaggtgttagggtaaacaactccttcactcctcctgttagacagggccatcctcacagtggcctctgtttatgcctgcactctcctgcttgttcaaatggtgactagtaacttcaggtccaagctgcagctctgtgctcttctcttctccgtgaaggtcttcttaattatcatcatatgcctgaatttcccagccttattatggtatgatttacttataatcaaatttatccagtttgtgcatagtcttaaatttggtaattgaatgcagttgtgttataattactgtgatccagatgtaagacactttggaagctcccacatgcctcttagtggtcagattccttcccttgatgggtgattaccatgattttgaccacagtggatgatcttgctcctcatactcatcaatacagaggtcatgaataaccacctcccactttttttgaggcaagatcttactatggagccctgactggcctgggattctagaccagaatcactccaaactcacagagatctatctgcctctgtctcctaggtcttggaatttaaaaactgtgtgactaagtacagacaaagaacgtatacttattttcccaatctttggtatactgttgaaacatgagtataagttggctttgccctttctctcaccaccttcaaaacgtagacaagaattcactcctcagtatgttttctagaaatgttttgatattctatcttaggaactcttttactctggatcagttgacagtagaaacattacccttccaagaacaatgccgtagcccacctgtaagcagctggccacctttctggacccagttggataccaagctcagttaagagaatataacactactgtatgttgtagacttgggaagcttacattataattgcaactgtttgtatggtatccaaattttcctcatgcctggggaaaacctacaaatcaaatgagtggagtggacaactattcttgggcttaggctccatctggcctcattcacaaagctgcctaagagaggaagccatgttaccggtcttagctcagccacagtcatctgtggactctggcagcttcttcccacctgtgatggctattcttggatttcaatttgactacatttggaattaactaaaacccccaaatggaaagtatacatgtggtgatttttttgcttaatgtgaagtgataagatctgcttctaatccggatctttgaggtaccatatcatttaaactgggaaatcccacctctaatggggtacactttctattggaggcccatatacttgtaagaaggaagcttttgatcttggcctgcttgctctcaccttgctgtcaagtccattctttcactggcattagagcctacttctctagggttccaggacattctgaagaccagctgagacatccaggtgcatgcactgaacaactgctggatccttggacttctattcatagtcatccactgttggattagctggccatagcctgcaaatcattctaataaattgcctgtctgtctctctatctatatggcatgtaatgtattatacatgatatgtgatgtggaatgtaatatgcttatgtgtgtgtatacacatacacacatactcactctgtaggttttgttactctagagaaccctaatacaccacctatctatcctcattcttatacaacataataaaggcaacactagaccctgtgtagagggacccctgtgaggattaaaagttgccacaaacaaagagcctcgatgttagttaggcaagacacaaatattctgaaactaccaggagtttttctaatatctctgatagatatatattctcttctttcccagaactccagaagtatgtacaatctgcatgccagttttgtatgaagagaagtaatggctttgtgattggaaacatggtagtcttgagagtattggaggagggcacatcacttagatgatggtacagttttatctttggagaggaataagtctgagagaaatgaaggagctgtcattggaggataaacattcctagggggaaaatgtggaggaaggagacaggtggccgcaggactcagccaggacactctcagtcagggaaggtggcaaaactgggtgaccagcctatagtgtccacctgacagcataaagaaggccctgggggacctctgaatactcttagaggagagttttctttttccttattcgcttttgagagtaaattaagattttattttttattttttttaaatttttttactaataactctaaaccacaaggcatggaaataacagatttagagaatagttacactttccccttaatctttggtcattttcatactataagaaattatacacattttattttatgaaaaacagtatttaccagtcttcttgggataaaatatgaaagtgaaatgactttgcttcttcatgttaaatctaaacaataatgaaacttggacttgggtgtcccacaatattggaacacttgcctagagtgcttgatgtcctgggttcagtctctagcagcataaaattcagaaaaaaaaaggagataaaattatagaggaaagcataacgattcttattaaactcattattttggggcgattacttttattatttcctcagagacttttttacatgtgggcgacatgtctctaactttagataataaccacagaaagggtatcattaagaagttagaagtaagtaattatgtctaagggttaattccctttgaaattaattctcaatgggtgaaaatgccagatgcagtaggccttcagtgtaggaaagttctcactgatctttcctttggggctggagggtgagttcagggtcttgtgaaggctaagtaagagctcttttgcccagataagcgcgctctctctctctctctctctctctctctctctctctctctctctctctctctctctctctctctctctctctctctctgtgtgtgtgtgtgtgtatccttttagtcctttcaaatggttccactccctggtgagtaagcattcaaatgtgtgagcctatggggccattcatattcaagccagcacaagagtattaagcatggtttccgtctgttgagtgggctaattagacagccgttggttaccatcaagttacaggtgcttccagtgcacctgtctgagtatctgtcatactggtgtaagtactttattgtagtacttcctacccattctgaagtaatttcacaatcaaatgttaggtgccttttttatgctctgttggaagattaagtagaaattcggggttacactgtttaaaagtttacttaaaacatttatttttattttatgtgtatgactacttttgtttgcatgtatgtttgtaccgtgtgtgtacctgattcttgtgaagtcaagaagagggtattggatccccaaaatttagagttatagatagttgtgagtcaccgtttgggcaccaggaactgaattctggtcctctgtaagagcatcaagtgctcttagtttttgagccatcgttctatctatgctgaaatctttcttcaacaaattatatattagaattgctgttaaagaatgtcttaagaattacttattagttttctgctattagtgatcataactgattacaactgaaaacaatataaaaataattattttattttcaattatgtatacgtatgtatcctgtgtaggtttctgcatggagtacatttagtgcccatagatgccagaatggggtatcagattcctcagtgttatggttacaggtggctagtagccacctgatgtgagtcctggcatccacatttgagtcttctaggataaacagtatttgctcttaacctcagagccacctctctagcacctaaataagttttttttttttttttttaaagatttattttattaatatatgtaagtacactgtagctgtcttcagacactccagaagagggagtcagatcttgttgcggatggttgtgagccaccatgtggttgctgggatttgaactctggaccttcggaagagcagtcgggtgctcttacccactgagccatctcaccagccccctaaataagttttaattcatgactttcaaaagttaactttcttcttctttggaggtatactgggatttgaacccagagtcatgagccttttacatcttgcttacatttaaggaaagatacatatattttttttaatataaaggacatatctgcccttccttgatggcaagttacttttctgtacaaccactgcacatattaatttatacatattttgtttttatttttaaaaagttggttttcctttctctctagtgccttctgcctccacttataagtaattgtatttacagaaaccatacagatgttgtgattgtgtgggatttccagtgaggtgcccttgtgtctgtgccagcttcccctcacattagatgtttttttctgacatttagttcagactctgctaaatgaaggaagtttaggtaacataaaagctacgtctaaatgcctcgcactggtcttcagggacataacaggagtgaatgcaagggatgaggaagctcaggcacgtgacagcagtgtcttacccttctgaccggaccggcctttcagaaatcctagggcggaaatttcctcagcactgcttgaagtgttttgttctgtgtgactgaagatatgctttttttccttttacctcttttggcttaggtgttctccactggaaaccatggggcgttgctgcttatggagtgttaaataaccagttccctgaccttccctgaccttcagagccctggtccagagtgccctgagaggcagctctgcagtgctttctgaagcatgcctaagcacagtgaactgcatcgagtgttcttttatttcttagtcaacacttgaaaacccttggcagtagctccaggctttgcactaactttgagcttctttgtgctttttattgcttatttttaaactcaagttgggttaaggctagatgaattatgtttcggtttaattttctttttacaaaagtagccaattttgacgaagctatcacttgggtccgggtggagctttaatttgctgggtttcaagggcagtcagtggctttcaatattttacaattctcattattatgtgtgaatgtgacatacatgtgtgggcccaccatgacacttgtatggaagataggaagactactttatagagaagagtctcttccatttttgtatgggttctaagactcaaactcggatagcatgaggcttttgtaccaagcgccttgagccactgagccatctggtcaactcaactttcagtgctttgatctttttagcttgcatcaaaatcctccagatgaatcttcagattatggtactagacctctaattccagacaggatggccttcaagaggttcttggggttagaggaggcagtataggtagacactctatcgcatctgtggaagaacctggtggtcacggtcatgtggtattgaggcgctagaattcatgagtttctgtgatggggaattgtcttgggccctgtttttttggctctgaagctgccgctgtggccccttactagggcagcacaagtgaaaagatgaagactctcggggattagatggtgtaaccccttaagttctaagtgatggccagggataatggcagtgagtccatagagtataatacagaaaaggttcctgggtaacacagtagaattgggttgggatcagatgtggtgaatgggagcaagagggctggggaaatcatttcgttcatgatcctgggaaggttttggaaaatcactcatcagtaaaatgagaattggtggctcagacctgtaatccctgtagcgcctagaattcttatcacgtaagattcatctcaaaaacaaacaaaacaacaacccctaaaatcaaaccacaaaaatacatgagtggaggaaatggaagcttactgcagaatatgtgtcagtttaaaaggcatttaacaaggtatattgaattggaaagctgataggcatgcacagttgtattaaacctgaattggaaagctagttagggtattaaaatcacatgcatttactcatttccagtggtttacataggacacttggtaatactctcagaatattttgaaattactatcgttagatgaaagcacaagtaggacatagaaggatcatgcttacacacacgtgcacacatgtgcgcgcgcgcacacacacacacatatggagttaaaggtggtatgtatttatgtaatcatgcagaaatttaaagaaaagttctttataggaattataagaaacaaggtaatatatctaaagaaaatatgaaggcatttttttttcttggatagtagttacttcacttcatttatttccaagcctagcataggttagactcatgagatttaaaagtatctttataaatgacacatttctcattctgtttccaaagatatatatcgtatattacatatatatgtatgtgcagttcattttatcaattatatatagtctgtgatgttaacttattaattttatgtatatttaaaattatatatatatatatatatatatatatatatatatatatatatatatatataaatttgaaagtatacacacacactttgctatgggaaaatattgtctctcattaaaagccttttcttaatttatctcaaatagttttatgtgaaaatgtagtagcaatatatagttttgagtagagtttcactgaaatacagctgctgcccctggcctggttggctgtggatgtgggtaggagtggaggatgagaagcaggtaggtgtcttggctttccagtgtttgacatgctgtgaatgagggtttaggtcaggtaaattcaggtttaagttttaactatgtaagccagtgctatagaactctatccggaactggacacctattgtcctcaggactggcttgaccacttgaatgagcccccaggcatgttggttgttgatgttctcacagaaggtggctttgggagggccattggatgctcacttgagattctcttctgcctctccttcctatagttctgtcctaacagtcattgctggcgtgagagggaatgagtacagcatttggggttatccacacccctaaaagagacctcacctgtgctctgtaaggaagcctcagaaactcgtggtttaagttggacttgggtggaatcagatttttgtttgctgttggaatgagtagaggtttgtttaagtccccacagggaaagagttctcatgacacttggcaagacataaccaaaccaccaacaggaagagcaacagcattgttcctgctttgggtaatgagacagagagctgaggctcagctgctggagtgagaaaaggctggacaggcgctcctgacatggctgtctttctttctgtgtgtgaagtggtgtgcctccttgctgtatagaagcatatgcaacgcctctcttttgtgtaataagacaggaaatgaagctgaggtggcttcccagttggaacttgcttgtgttgaggagaaagaggattcctctgattaggaaaggaaattgtgtttgtgggagtagaggtattttatgacagattacttttttcctgggcccaagctcctgtaataatgactcaaactcaagatatatttacaaatacctaggtcatacagctaggctcaatccctgactagttaatgatgtaaaataacccacttatactaacctacattctgctatgtggctggtttcttctgctcatgtgctatgcacctgtcctcctcaaatcttccccaaggactctccccacacccgactctatcccagaattcttccagactatcagatgccccaccttctattctatcctttcctataggctataggttttttaatagacaagtaattcatccatacaatacacaagatcttctctctacttgggagtggggcagagatggagatgctgactgactgctgcttataataggagggcagcagggcaaatgaacaaatcagatctgagtggaagatccctacctggaatctaagagcttgaaactcatgggaaaggcaggataataaaatgggggaggtcccattacttgctcaaacactttaccagttatcaagatttaaattgtgaatgaggaacacatagttataatcgagtctctttaaaaaggtactatttgtggtgatatgatatggattattctgatgtagtatactttatgtacaggtatatttgacaatatatgaccattgtggagcacatgctaaataggatctagattgtgtgcactaggcactaggcttatacgtaggttggttagactttccaggaatgtatcacaatatcattgtaattgagaaatggaagatcagaggtaaacttcaataaggtttccagtgttgagtgcctatctcttctgacctgtaattcagctttagtgggtaatatatttagaagttgctgttgaaatctaggcactaaactggatcttacatctaccacccttgagattttattctcatttatatgtgtgtatgtgagcctgtgtgcatgcaggtgcctgcagaagccagaagaagtcattaagacctcagaatgaagttatagatggtagtgagcggcccagtgtgggcatgggaaactgagccccagtccctctgcaagaatacaaagcattcttaaccactgtgccatcccttcagccctgggctcatccttccatctgacagtatgttttccattaagtcttctggtgtatattcctggctgtttttgtctcgctcatgcatgtaatatcctgttccaagtttcagtcattaattgacgcttcagtaaattttagtcccaaggaagccctgcccctaccccaataagttgatttttgattagagatattagctaaattctttaattctataaatcaaaaatccacagataactttggccccagggaacttttgatcctatctggacacatttctgatgatccagaagtgaagaacttttacccaagggatagaggcaagagtaatcttttatatcgtgcactgcaccagatatttcctgtgtcacaaagaattatgagattcatgatagtatttctgaggctgaaaagccagcattgttctcaaattattacgttgttttacctacccctagcacaaatgaaatcatggaaagtatagtttttgctcattcctgtaagcactaaagggaagcttacaaagagcaggtacggaggacagaagtaacctactacataaaacctgaagactagagatcttttaggggaggttcatacttatatattctttggggtcagaggtcagttcttgggcctctgttctgcagctctgatgtgtgctttaggctagcttctgtctaggtttcctgttgcacagcaggggtgtagacattacagatgtatgtcaaagcattctgcttcttagatggagtccaggcactggactcaggtcatcagtcttgcatggaaagcacacttacctaccgaggcatcttcttggtctagataccaaattttcaagcaaagtcttggttgtaggcaaggaagaataatttattgagtaaatacagagtgttcagaacatgttataggaatggtttgatatgtgctactttgattatatgaggtttgtgtcacatggaacatattaaaagccagaattccctggaactggagttgcaaatggttgtaagatgccataggggctcatggaattgaactcaggttctctggaagagcagccagggctctaagccaacgagccatgtctccagtctgaaaaatttatcttttagaagctaagtagtatttccatttacccttgcacacttttataatctaattttgtcttctgtggtgttgaggataaattgccttgtacttgctagccaagcactcccgcacagagccacactcggcttctctttatgcttaaagttgtctactctctcttactctgagtccacatttagggcccgatagccaaggggcagaaaatgcttcatggttgcatttttctcttggctaataattatcgtgctatttcttttagttatgagtcttttgagaagacctttggtaacttttccatcggtagaaagctcaggcgagctcctcctccagcacaatggactgagagactaaggaagcgtctgccttctctgttttgaagacagatttgggaaggaaattactgttgccctaagtaggctccggagggacagtatagacggcagtgtattaggggatgatggtgctctttctaggattaggaaggaagtggatttttaaattatcatttttttaaaaaagctacagtagaaggaaggcatttgtgactactgaggcaaagtcttgaggcagcctgggaatcacatcccaacttaagagttgttgggatttggaaaggtttctgggtcttaatttcgaattaagcttgaagtggattaaatgagagagcaagacagaacaatataaaaatgttcaataaaggtgtcattccaagtccatgtggtagctagttatgtatgctacggtcaagagctcagagctggaaaatgactcattaaaagtaataaccttaacaatgccaaacatttaaatggtgaaaaattcaaaatataaaggaaatagctctcttggttcagagtttgtcaaaattttaattttgtgagtattcaatacttttctaattttctccccctcccccccgccctgatgtcttgttatgatgatgccagtttcttgttccttgacacacaattattgagctaaagtgtgtcagttggcccatgatagccaatcaactaccataagcttcccgactaaatgccaaaccaaaacactgcaggtcacaggtagccattaagtaagatgctccaggcagatcgcagagatctgcagcgggaaatttcatttgggggagttgccaacgcacagatgaaaaaccgtgtatttatcgtactgcggttgaattccaactgtattatagacatgactttgagcacggtctcagagctggagagatacatacccttcagagggatggttcagtcttccagtgcactgcatcttgaaatgaagaatggcttgataaggattccattggaggtgatatttgaccctgcacatctccctttgttgaggaagtgctcttagtggtttagtaactgtgtttgggtgtgttttatgatatgaaggataagaatgcactagttgattctcagatccttgtctaactctcaggagtgtcgtggctagggtctgcacttccttgtttgtcgaaggaagcgcctctttctctaggtggtcctccctagggtgctcggcctgggtttcctgcttcgtaacccttccatgtttagggctcaacttttgggcctctcctctgggaatacttacttttcaggtgatgtctttcagtcatggaacttaggtttttcttctgtgcattggcaactcccccaaatgaaattcctcgctgcagatctctgcgatctgcctggagcatcttacttaatgactacctgtgacctgcagtgttttggttttacctgctaactgacttgaccattagatctcatgtaacctaatacccaccgtctccagaatgatagctacctggtattggaaggtacaggagaaaagatgtgggtgggtggttgcccttctgttctctctgaccagtttatacagctgtgccctaactatttaataaacagatcatacacaattgttctcaatccgtgtttggcggctatgctgtgttctttctgtttgtcatttgatggtatttagtcccaactgtgaacttgcttttatttcttatcaagcttatagaatagaagaaaagaatcacatgatctttagttcattggtttgaaccaaacccacctcagttcctgaaatagcattcttcatttgtgctaagtgacattgtgtatttgggtcctttgaatacttgctttttctccccacttcccctttaaataaaagctgttttatgttatgtgggagggatgtgaaatttaataagttatttttaaatgaaggtacttagtcatacatgattgaaattagcctcatgtcgttagggcgaaactgttcaatttccaaaagttttgtttttctcacatatgtaaagatagatattagactcaggcatttgctcactcattatgtggatccaggggtggtggcattttgctggcgccattcttgaggttccatgctgaacagctcgagctgtgttctgtaggtctgacaagtgagtcacagaatttctgcatccctgggagctgtcagcagaaaggcagcttcatttatagtcggaaggtggggnnnnnnnnnnnnnnnnnnnntttttgatgtctggtagattacagtgtgtttcttgggcctggggcactgggattgtgttatacgggtgcagcgattaagcaacgtgtgtgaacaagcgccgtttgttcgagtgctcgggcgtgtacgaaagaaaggcggaggtgtgaagtgggatgggataggggcgtaacgacggaggtccagtacaggcaatagaacacgtgataggagtgggagcatcggaactggggacgggtaataatgtgggaggatgtcttgcgatcataattatacgggcgagacaaggaggacggtaaatgggggtgggatgatggcacttcggtggggagaagtcggcggaaataaattgggtgtcaagtctcggcggaccggaacggactgaagcaacgaggaaggtgtcggaaaaagggggatcgtcagtgcgagggtcgtggcgtctcaccgcgcgtccccgtagctcttttgctcacatcggcggtgaggcgagcggatcaaggtaaaggagcgtgaagagggggggcggtcggggtttggtggcggagaggggtatacacgagaagaggaggacagggagttggtgcggtggtggagaggagggcgtttccgttggggggttttggcggagggtcggccggaacggtggtgaggggtctgacgtgggcgggttacactggggccccgacgcgggcctgtgtaaacgctgaacccgttgaaaaagaaaacaaaaataagagaataagaagaataaaaccaacaaaagggaaggggagctggagctactctccgttagttagcacagtttgcttttctgagaggagggaagactgagtgaaatgttctaagaattcatctctatcttcctttgtcctcacttccatttgacacagtggaaggtgctagtgtttgttctattttaaatgatgggatggctggacgggcttccatgaatagagagcttccattaatagaaaaggagctgcaaccgatagcgtcctgggattctaattcctaatgggattgcggcatttgaagtggaaatggtccctttctttggagaccctagtgttgggaattttcttacttgtgtttcttgaaaagtctcagaatgttccagggttgatcagaatccctcgattttcctcccttttttggagatggatgccttgtggtctatgtggcactgatgttggcatggggagatggttcggttggtgagaatactggctctccaagcatgagggctgagtttgaagccctggcactggaataaaaagctaggtagggctgtgcatgtctctaatcccagtattaaggggttagagacaagcagatctggagccctctggccagccagactagataaaaagctgactgctttgggctcaggcagtaaggcagagctattgaagaagacacttggggtcctgttctaggctgcatatgttcctgcacttatgtaccatttacatataccacacacatgcatatacatatgacatatacatgcacatatacacattttaatatgtacaatacataaatacatacatacatctatatacgtatatgtatgtagcatctataacatatatattacacacagcacacacaagcatacacatacacaaacatataatgcatatttaaacaaataaaatacataaagaataaacacacatacatacttgcatgcatgcacacattcatatgcatacacaaatccactttatgtacacataagcctacacatatcacacatatatacacataatgtatatatacacatagagacatattccatccccatattcatagacatattcatactacacaaatccatatacacatctgtttatatatatatcattcttacatggacacaaacacacacacacacacatatatacatccacatatacatttacatcacacacacacacacacacacacacaagcaaaaataatgtaattgtggtttgaatgtgtcccccaaactgttgggaacttaaccttagtgcagtagttttggggacaagctgcttaaggtgacatggggctctgctctcctgagtagaccggttatgcagttattgaggggcaggttagatacagtgagagtggtccctgctgcaagtgcttgcttggtcctcctctctttattttctctagccattctttctctctttctatatcactaggtatgggtcaccggatcttggacttctcagcctgcagaactctaagaaatatacttataagtgatccagtctgtgctccattctagcaacacaaaacaggccaaagcaccctgtcttgtcattagatggacatctgctctgacttgccctgctgtctcctagcatactctgtctccaccccaactccatacacagctagcagatctgaaccggacagtgtccatagcccttttcttcttttggcttcctacaaagatcagcattcagggtcccatttcttgcttccttttcattaatttcttttctaaaagttctgagcaggtgtccagtgggggaagcggtagctggaaagtggagatgatttggtggtttggagagcgaccaagtatctggggaggtcagcttctctgatatcaacatagtttcccaaagggcaacgcccaggtcagctgctgccaccagggcagggccagccaggctggggctccaggaagcttcctggctgtgcactgggaagtaccctggggatataatcacttgatctgctgcagttgttctgtgagcagagcgagccaaggaaacttattctggtagcagggaggagtccgaacctggtgtggggctgcgcttgagctcctgggagaacttcaagaattcagatgtgctttttgttttgacagaggaggcctggattggaggctttgagtagtggtaggtggggccagaatttaaaaaaattatctatctatccaccttcctacttgcctacctacctatatcatctctccctatctccctctctccctctctccctccctccccccatcttcctatctaatctatctacatatttatttatgtaggtgggaaagggcctttgcgttccatatgttgcttatagaggtcgaaggaaaaccaataggagttgtttctcttcttccagcatctgggtttcaggaatggaattcagttcagcagtctggccaggaagctcccttccttgctgagctatctggtccaaggccgggtgctttgttgtgttaagcttctgcctgggggtacccgtgatgaattttttttcctactcaacatgaggaattccagtatgagtctttggatgtgtgcttccctgtggaatggtacagttacatttgagtaactgaggttggacttgaaaatggaggttgggaactagggagaagagatgtttttggagaatggaggagtcaagtctttagagaattatgatgttgggtagcagcaagggtagatggggcctttcggtagcatgtgggtatgggcagtgtcccgaaggaaaaaggagttctgagtcacagagcaattcagaagcagtgggattctgtgtcagatgccatgaggcctgacttgaggtaatttcctcctgtctcttggccctcgatcagccaggctggctctgtgaggggaggcaacacacacacacacacacacacacacacactctcagatgctatctttgccagccctgtgagtaattctctgataaaccacgtgttgggatggctccagttttccctggtccccgaggctatggagcaaagctgtggtgggtgtggtgtgtgggcccagagtgagctctttgaaagattttcagagttactttgggtagagcagtggatgactgctggctggcacgtactggcaaattataatctcttaacattttgttcttagactgctatcagataatgatgaaagcgggttttgtgtgtgtgtgtgtgtgtgtgttggctgtatagacatccctccttccagtgatgaggatcttagaaaacgtaaaggctgtggcaggctctgatagcccaaggatgggtggagatgactggcttggtgccagtgaatctctgtagatgatgattgtaccggggtgccacaccctttgttctgacctccttttggaagtaacttctgaccctcatttaaagctatccatactaagtcgtcggaagaagtataatgtgaaagagcattggacattatgtctcattcaaatgtgtctccctgaggggaaaggactctgtgtaaggggatcaatgactggcttccagcagcgacccctggctccagaggccagctgaagtggataatgataattggagactgtcatgaagtctcatttccttgcttggcctgggcttaagcagtttgaatctcagtgatacccagtgaggcgaggctcctgttttgcaggcgaggatttggggcagtgagttttcaagcccaacttcctgcagatggttgatgaggagtcaggatacacacagagtagatctaagaagtgcctgcggagccaagatggcccccctggaaggacctcacaccagttctccagcagagttagagatctgggtgggcctttattttcctggtcctccaatcaaaatttacttcttgattgattcagacttgtgtaagtagtgaagaaaggatgagtgttacagcttccagtttctacatttagtacgtagctgtttgggacagttgatgacgattgtgtgagcccacagactgcccagtttgaaggcccatgctgggcacaggcagcagaggatatgccagaattaacgcaatggaatagttagctctgcttactattttgtgattattaaatgtggtttctactgttagggcatatttaaggataaaataaaggctatccatatacttaagatagccatttaaaaaaatattatctgaatataaccacttaatccaatttatagtaaaaccttttaaaatataagtacgaagtctttgactattttttttcagatatcaccatgcaagattttttttaaaattatgtttttgtctctttttggaggttttgacacgcttttacagagttgcattttacttcagtgttagaggaaatgtggaggaggttggggaggtggctcagtacggctctgtgagaacaggggtctgagtttgagttcccagcccccaaatgataacctgagcatgacgtcagagtaggcaggtatggatcccaagaggttcactggcaagctactcacaaaacagtgagcttttgcttcagtgggagaccccaacttaagacagtgaggttgagagccatagtagaagatacccttctctggcctccaatgggtacacatgggtgtatcctcccccccaccacccgcccctgccccgcccacccaatcctaactgtgggtagcagtgcagttggagtcaagttggacagtcgttaaaaataagcaaatgcagtttaattttttcagcagtatatgaatattaagaatgttctaggtgttcattttaggccttttcttgccaacttgcctttccaaagtctgatcaacgcattccgtgaacgagaacatttgtgtatcttgcattacgctggtcatataaaatatttttatgcactcccaagtaggcagaccctttcttcgtgcactagagatggcagcgaacaacaccacacagagctattcacatactcaaggcagggattgagcatatagctaagtggcagactgcttgcctaacatgaagtctaggttcagttctcagtaccaccacaacaaacaaaaacaaatgcaggctaacgatggctgtaagtgtaagcgaagtagggagtaagaggaagttagggagtgctgtgttaggctggctgcaacttatgttggagtccagcatagaatgtcattaggaggcctttgtgggaagagtggacagaagagcctttccctccctgggccagagtctgagaaccggtcttgataagttagggatcctattttgtgtatttcctcttatctgttgaagtaggggacattgtgtgccttgcatctctcagtataaaatagaaatcttgaaaataaatggtccaaatgaagagaccctgggacccatatccattcctaaagtgctccctccatggtgttgtgtgacctcagttctgggcacacttgttctggtggggccactcagcaagggcagatttttctttcagctttggcttgtgcaggcacttggcttgttaccttgagcttcctctctctactggttaatttaaaagctctcaggagtgtgctctgtggccacccaagcccaggagctgcctgtttcctgacttcatccactggggtgtgtgtgtgtgtcaccgtgaactctgctccagcaatcttgggccatgtgaattcctgacattatgggtttcagtgataggaagctaatttggctggcccatgtgtgtctttgtgttctggagcacgttgtaaatgctcacacttagaaaggaatgtaaagtgaagggccagaaagcaaggtcactgctattggatctgtcacggaatagcattgccttgcttatcattataaaaagtcagagggtgaaggactggaaatatttatttcaagctattgaaaggaggtgaggttttcacaagggctctgtgattcctgatacccaagcgtgcttttgataaaagtgggaccactttgagaaccatatgtcggtgagactacacattcattgtactttcgtactttagataatttactatttgaagtgatacggcagtcaccattagaattatgggccacgagttcacaaccatttctagtgatattcctcggttaacaattcccgaaacagaattttattcagttctacaagatgattttcttttagttgacgagataaattataacctgagcagtgcagctgtgaagtttctccagattactttttttttttttttgaagtatagcacccaaacagaaagatatatgttaactcaaagatcaactcccaagggctcaggaaatgataaagtacttgccctgaaatcaagagggtttgcgtttgatcccagaacccatcttaagaaatgacccacaagctgctaaatgtacaggtcgaagatttcttaggaggctcacacagttcgatagccagtttatggctcagaattcaaattctcagcctcagagaggcctggctccaggccgtgactctcccatgctctaccccaagggtaccaactattcttctttgcttgttttagtagttttatattagcctatccacattacctgtattcttcttttctcatggtttgtgagacggaaccataccctagaataaagttacgggctgttttgtcccatggctccctggtgttcattctgtgtagctatcccataataacatagaaaggctcctgactatgacttttgtcaaacagatgaaaaaaaaaaaacaacaaaccatacaaaactgttcttaggctgtacctggaactgggttgactgggctatggcctgtgggctttagtttaagtagatgctaccaagtgggatccgagtgaatggagcagatgtttctaccagcgatgtgagaggacttaggattttcctcttggtgcttgtctgggttggagctggatcttaagtctgttttgtgtcgagcttgttctgtgaaaaggaagagttgtcgatgctggaaagctgagatcaaccgttgtctgtcttcaccgctcacctcatgtttcttttctatatgaatgtgtgccatgtacattaccagcttgatgtatggaatatgttccatctgcatatagacagcaaatgtgtgcgtgtcttttttcttctactacttaagccatgctgacaagccatcctagaggcctaaccaggctcctacaatgtggctctcactgataccctgtgttggcaatgatggaaaatacttacttcagtacttgagggaggcccctctgttctgctacacattattaagtctcttcaacactgaggtggtatctgtttccttttgactttcttataaacatcatgctcttttgcaggccagtaaaaatgtcctacacgcctgtaatagagtagaggctgttcaggtcatagttcatgatagggtttgtttgtttgtttgtttgtttgtttcttttggaactgagtattactaagtagtcctggctagagctcacttagccctagtggccttgaactcacagagatctgcctgcctctgcctcctcagtgttggggttaaaggtatcagatcccacacctagtttgtagcccatttttaaaactgtaatctgcagggccagaattcttaaaaaaacaacaaaaaaaaaacaaaaaaaaaaaaaaacaaaaaaacaaccctcaatacaaagctgtttgtttgatttttcttctttcaggtatgtgtgtgtgtgtgtgtgtgtgtgtgtgtgtatgtgtgtccagttttcctgtcatatgcatgctttgattttttgcttaaaaaccttagagtaggtttaaacattatttaaagataattgaacaattcatcagactatcattggtaaaacaagaaaaagagcaagggatttctttttatagaaaactcactgtaatattcaagtcagtggctatggaaagattcttgtgctgtgagatctaagatttcagaacatataggagactttcaacattgatagaattttataatgaaaatgaattttaatcataattaataatttaaggttcatggatattatttaatcaatatgttctctttcttcacaggcaagaagagactgacaggagactgaaaaatgtaagctgtatttaatggagtgttataaatagcttttcctttatattctgtaaagtcataatagctctaagaatacacgccgtgccactgtttctaattaaattttatccagaaaccaaacagttgaagtccaagagcacgcattaatgcattgttagacttcatatagactggattttggcataaagtggaagattaagtttcaagggtcattgttctatttctcatctggcaacaccacactcaatttataagttttaggggagcaagcaagagattatcaaattagacattaaaagaagacactgactgcttaaaaactctgggtaattattcagtatagactggcattatgcccttaatattctataattataaaagaatacctaaaagtaacagctctatttaaaaatatggtcatcaagcaatgaaaattattgactttaggtgtttattatatagttctattggaaaaatgttgacataaaaagtttcacttgtgggccagggagatgggcctcagtgggtagaagagcttcttatacaagcctggtggcctttggatccctggaaccagtgtaggaagctggatacagtggcgtgtgtgtattcacagtgctcttagtgtgagatgaggggtcagagacagagaggcccagaaactcatggccagccatgcttaatggggcagcgagctaccagagagagaccctgccttaaaacaagctaggaaatgggaatcggcttccagacgttgtccacatctgtggtcctgtgtgcattctttctgcctccctccctcacagtcgcccccctcacaccagccccgagttttacttgtagtttatactcatccgttttttgagatagcttctcatgtagcccagtctgatctcatagttttcatgtacacacatgacctttgaacttctggtcgtcttgacttctgagtggtgggagtccaggtatgcaccactagacccagtttcatgcaatgctgggcactaaacccagggctccatgcacgctaagaaatcattctactgagcactaccaccaagcgttgtgtgttcttcttattaaccctttctcttcaagggtagagtgtatgattgcctattgagttctgggccttttgatctgagatcccactttgaaacaatgaactatatcacgaataattatattttaagtgaccgcattccataccatacatctaagagtctgcttcttatctgtgatgtattatgaattgcaatttatccacttgcatttgaactggtacttgcataccaactcactggtcttgttctttccatttaggttttgataactttgtactggctgggaagaaaagcacaaagtaacccctactataatggtccctatctcaatttgaaagcttttgagactcttttagggcaagctttgactaaggtaaggatacaaccaacatggatatgtaataactactttatgacactcttctgcttttcctctgtggcaaacatgccgagtttgtcctctctagacagggctgtgtaggcaagttagggacttgttttctggctttatatgtttcttccaatagagtgggctatctattccagaccagttccaatatatagaattttatgtccttaattttaggcaatttgatggcacacacattcttttttatacactatataacttaactgtttttatactcattatgaactcaacctgcagtaaaaaggcatttttaggtctattaacatttataggcgttactcaatttctttatattaatttgttcttgaggtaggtaattatctctagtgactacattccaatatcaccatggtgctagcgttccttgaagagtaataaacgttaagtgaaactggacaaagtttcacttgtttcaagtgtttgtttcaaggcagagagtttcaaaataatctaagttatctaaaacttgctatattgccaaagatgaccttgaaattctgatcttcctgcctctacctcctaactgccgggactgcaagcatgagttatgactgactcctgaggagggtatatatttgtgtgtgtgtatgtgtgtgtgtatagggatgcacgtgagagtgtgagagtgctggtgaccttggtggcctgaagagagcatcaggtgcccagtgctagagttactggcgttgtttattacctgtgttgctgctccttcatcttgcaacaggcattggaagcttgtagactatttgagaaggaccaagtgctgagagcaaaatatactgatttttctgtaaaaaatctgtatttatagagccctagtggaaaaactaatttctctgtggaactattcatccagagtattttataagaattgagagaaaataaatgctcaaaatgataaaataccatttatgaagtagtgcttgctttgtgagagttctctggtgacattaaacaagaaagatatttagcatttgtttctgacacattgtgaggatgaaattcatgcaactagctatgtttctattctaactatgattagaatagaggaatatttcatcatgatgagaataattgccttctgctctatctatctatccatgtttttcaaaatacttttcctgcatttagctaccctggtgcattacaaaaaaatagggttataaagtttcgttgttattttttgtttttgtttttctattgtaagaaattggtagccctttaggtctgggcagaaactcagttggttcaatgcttgccatgcaagggtgggaatgagtctgatccctcaaattcatgcaataatgtggagtgtggtgatatgcatatgttagcccagcactggggaggctaagacagtaggattcctgggccctggccagccagtataacctgctaggctaactcctgacgaacaagatatcctgttttggtctcaagaaccataaaacaatcaaacaaacgccaggtggacatctcttaaaaaacaatactggagattggcctctggcctctgcacacatatccctgcatgtgcttgaacactcgcacacatatgtgcacccacacctgtgtgctgcatgtgtacaggaacacagaagagtagttctggactcaacactttttgcatgaggtaactgagttagtagttgagatattgccatttacacagattgtgctagaagttggagaatgactcatttaccagagagcataattgtctgagactggagagcacatcggtccttgctgtgggggagagtaaagctctggtggggtaattgcaagttgttttgggtacaagggaaacctggcttcccagtcatttgaactaaggacgtatgcagttagaaggttcaagggacatggaattgtggactagtgttctttacagccttcctcactttttatggcactgactcaggatgagtgatttcagcgcagtctgtgcctctttaaaggatgtttgcgctcaccgatgtcagagtcagtgtggtcagaagacttttttttttttttttttgtagataagactgtggttgtagttctattatcccattacctggtgagaatagacaggagaggcatgccaatctatcatttgtttggtatcagttcttttaaaatgtaaggcatgatgtggtcgactgtactttcccagttccctgacagtgataatgccaaccggaaatcgcaatgaaaccacactcactaagagctgttgtatttgagtcagattgtaatttgcagatgactcatttgtgggggacctatcagggtgaagtccttaggctgctgggacagactgggcgatttacaacggtcacatagttactaatcagtcactttaacatttataagatcagaagtcatttgtgatttacactgatgtttccaaaagtatggagttatgtgtgtttgaaaagcctgatgcatctaaagactgactttaaaatgtcagtctcatagcctgagacagagcctgctggctaagcttggtaacagcaggaggaaggtagtccctggccatgttcacaccaggacgttaagattaacaatggtggagtgaaatctctttactggccattcttggcacttcaaacactcgtcagacaattgactcaggaactgaaggatctgatttaagcagaagtctgcttgaaacagctgctagttatttgttccaagcacttgccaactttctttcacatgttgaaagtattatgataaatgttaaggcaataataacacttacaaacatcacatcattattgtctgacatcgtgtttccattttggctgtttctaatactgtctgctcatctacctgcttttacttaaccatttgaagatgaattcaggtaacacacctcaatcttatgttctcagtgtctatttcttaaaaagtaaaaatgtttctctgtctagctttaatttgtactctaaaaagctcatcaatatccattgtcatttaatattgaatctttttcctaatggtctctcaactattttttaaaagttaaaacatgatttaatcaatgattctgtagctgtgattagttaaatcactttgtgcttctggaaggttgtgtgagaatgaaagacacactcacgagcgtgcgtgcgcgcgcgcgcgcacacacacacacacacacacacacacacacacacacacacacacaccagttaattttaatatgcctttaggaggcctgattgccagcatcttatatctaggttttataatgagtaaaaataaataaattctgtaatgtacatactcactgatctttataataacaaaattctttttttttctttttttgacggttgatggggttataaaatgtcattcttaacttatgtttaacacaaagcaccccagatatttcctggagagaataagacatcctaaagatttgtctacctttgaggtgtcaacattaaaatatttttctttgatttctttcatcccccctcccattctctgtctatctcctctctctctacaccccccccccacacacaccactgaccagcatttcaaggctactgtaattttgttttattagtattttcatcttatgttttggttatacaactttgttaataattttaggtattttcttattatatgaaatttcgaatacccccttattatacagtttgtggagaaaaaaaagatatacttttcatgggttttgttttcttcttcttttggtgaacaggaaaaccctgtcaacttacccttcttattaatcagagcttttgcatccctgcaacttcatgtccattttctgatctttgtaccatgtttccttcaggcacttgaagattccagctgcctgaaaagaagtggccgggacagtggctacggggacatctggtgtcctgacagaggagaatttcctgcccctccaggtagccacagaagggaagattcctttgagagcttggactcgctggggtccagatctctgaccagctgttcctcagacttcactctgagagttgggaaggaaggtgagtgggtgttgtgtcttgggctgtgtgtttcttttatttcttcgtatgtgaagagaagatagtaaaggagagaaagtagaaaatgaaaattatccaaagagttttcaccaggatgaggcttttcataaggccgtgttcttatgtatttttgtggtggttgtttcttctgtatttggacttctgaggagatggttcctggctcattgggactggatttcattagcaagacactcttgagatagagatttagcaatagatacctagtaagacccgttaactcaaatatctaaacacaaagtgcattataagagtctgtaaaatgtctgttttacttcctgagtagtttcctttcttgtcttaattttaccggaagtacttaagaaatacttaagtaggatgcatcttccaactgtgctctatgctaatccacagcagagggtgaggcaatcagttactctaagtcttgttgtgggaaggaaatgtcactcaagcttgaaagcttggggtcaaacacttccctgaaatgtatcttcaaggcttggaagattgctcagtggttagagctggtcactgctactaagcctgagcgccatctctgggacccacatagtggaaagagggggaaaaaaatcaatttctgcaaattctcctcttccgtctacatgtgcactgaggcaagaacaagcacacgcatattcacacagaatcagtaatgattagtaaattttaaaaagaagaaatgcatgcctccccctttcacactgtaaagaaatccatgtcctattcctatggctattatacctaatatattaatagtttcaaactaaacatccaggtagtcttagttcattccgtctaagtagaaaccaaagataacagtccatcaaactctgaggctatcggtcagcgatagagcccatggccaactccagcacttccaagaccaagccttttccttttaaagatgccctgagcttcaagcaacatcgttatcagaacggaaatgggggttctgattgtgaagttgtactctatctttgaagattttcagtttacttattatggacaaatatttgacccaagacctttattatgcaaaaatctcagacatcacaaataatatgtttgttttcttaaagttagtgaagcatacccaaactaaattcctttagagtcgtgatagtagaaaaatgtgaatggcttagtgttaacctttgtaactgtcactgtctttactgaggtgtgactcttttagagtccagatgaagatgctcacacctacaaggaagccaatctaagtttatagttcatcggagtaatcacagttataaacgaagcctgaaaaatcttcaacctactgtgttctgttgtcctgaccggggagactatggaatgctttgtttgaatttatatctacttgtcaaagtatagcagagagaaagaaaggttgtgggtttgtggcaagtgtagatttatcatcaaaacgtacagaccgactggtgtaaggtcaactcctcctttatatgtgacctattcctggtgtgtgtgatgcaaagcggagggccccacagtctcagtgcaagggaaccttgtttaagggctagacaggtagacaattctaagtagggtagtgggagggagctgggttccaggagcatgaagcttttctgtgattactgtattaaaattctgctacccacacaattatagtgggtggtaaccacacttaggataatatttttaggattagaaaactgtgcatttaatgagttttatatgaaaacacatcaggagtggtatttgtatataggcttaaaaataatatttttaagtttaaaacttcaaaaaacaaatggaatgtgatttacaaattttactagtaggttttagtaaggaaagcaacttttttcttgttcttttaaaagaaagtgtttaacaaacacacacacacacacacacacacacacacacacacaaaacagggaaagtagcttaatgactctggttgtcctggctgtggctgtctttccacccagactcccctttcaccggttcttgtgacatagctgtgtcagaccacttcctctgaaccatattggcattgtttgctgttcattcctgcctggcaggtgacaaaggcaaactgtgttaggtcacgttaacctggctggtgtgctgacagccagtagctatgaggggagccgccttctgcagcagggaggaagtctgcaacccttaccaactactggcgttttacaagtgcactggaggcagggaacaagggacaggaaggagtttactgcaggcgacttgtgtggttactctctctattcttattgggtttttaagagctgtttctttccctccttcttctaattagagaatatattattatctgtttctgtctatccttgggatctatcacaaatactttctcattctttttctcctttcccttttcctccttctcctctcccttctttccttctccccctcctcttaatcccccccacccccgttaaacctgcttttaagtagagttttaaccacaattcctggtttccattacagcttctgtgcttatcaagtaagctttagtttggtgctctcgtgtatgcataagatataattcattaggacttcagatgtcatctagcctggcttctctgatgtaggatccatgtccctaagagtggccttacaggggtctgtctatcaccattgaatcttgctccatcttcctttggtttctatgcttgactgttacttcctggaaatctgatggcttcctgccttttgttatattactgagttcctgtagacttgcgctgtctcattggattttatcaggtgatatacctcagcagatttatgaagcactgtggtgtcaaagaaggttggaaagagaagggactgtccagggcttgggggatttatctgcttatcatgactgcagaagaatgcactacgtgtgtgcctccagtgggaaggcaagtccctcctcgtgggtcttatcacaacttcttgacaaagttctaaaaatattcaggcctttcagcagcagccctgggtttccaggggagaggagaatatgctgagggaaggggcttcagcaggagagccctggagagtaaagcaagtttttgtgccgttataggttgcgaaagtgacatcgattgggaatttacattcaaaatgcaggattacaacaaagatgatatgtcctaccgaaggatttcagccattgagccaaagtcagctctcccgttcaatcgtttcttgccgaacaaaagcaagcagccgtcctatgtgccagcacctttgaggaagaagaggccagacaaacacgaggataacaggaggagctgggcaagcccggtctacacagaaacagacggaacattttcaaggtagtatcatgtgatgtggttacggagtgctttctggatttgtggaactgtttaatgaggtttaacaaggttaacgaaatggctatttaaagtatagttagcacataccactaatgggaatttctttttttacctctgttttcagtcctatgttgaagacagttattgtgtttcagaacgccagcatccaatgaccggggcttcttttagatgcatgccctcagtttattggtgtgtttcagctccctggatcaccgatgtgagctctgctgtgttctttccattgtttttctttcatgttgatagcagtggacatgaaaagaaacccttactgtcccaccgacttagcagagtaaaggacggtttttcaaatccgtctttccgcacggagcctcgtggttctgaaagccgggttgcctgatgtgtttttggattgacttagccaaccagagattccaagtggaaaagagacctgagggtttcctctcataacccatctgtcaactcttgtctttgagtattttcacttgatacgctagcctctgggctacatacactaacaaggtcagacatctatttatcctgggtcttgggtatctatcttgctgctgattgcattaaacaaaagcaacaggtaatgtgcttagaattcgtctttctcttaacatagccctgggtatccagcttttctctagctaaagtgaggtgatgctgtaatgtctgactttggccctaggagctgtggtgttgagatgcggagttaacgtatttccttcacaggggtgtaagcattgagagggtagagtgcatgcctttcgggttcttcgccacaaactgctcacacagtattttaacctggttggatattttgaacagtacccagaggagaacctggggtcccaagatggagacctggcacacagtccaagaaacttccacctcttcttggtgtgtagaagaggaagaggaaaagctcacgcgcatgcccaacattgtgaaggatgatctgtatgtgcggaagcttagccccgtcatgccaagtccagggagctcttttgatcagttccttcccaaatgttggactccagaagatatgaactggaaaaaaattaaaagagagacttataagccatggtataaggaatttcagggattcaggtttgtctctgcatgctcctggtgttctctgtcccagtctggtggagtctgtgtcttggttttttttcagttagggagccagaaagcttgatttgccctctaacatctgtagaactctgataattaaagaaaaatgtttaagtgttatccttagactatacaggggggcctatgcctagaatcttagcactctggaggctgaggcaggaggattaaaagtttgaaaaaaagtcttaagcttcaaaatgaggctctgtctctaaaaacaaaacaaaagaaaacaaaagaaaaagaaactttctgacctacttgtaagctcccttccaccccctgagggtacttttttttttcttttaataaactgcctgtggcctatatttctattattaaaacacaacaacaacaacagcagcacaataaaatattccagattctagactttaaaaggcccccctcttatttctatctcagcatttgatttccaagcttacattcctcttcatttctttctttgcttcctccaccccccacccctttctccttgtcacttctcggcagaaggaattctgactctgagaatgaggattcgggctctttccaaagctccaccattttcagtagactagaaaaggcagaccataggttagacagcagctaccaaagaccttcactcttgctggagctagctaccaaacacgctatgaggtcacgtgacacccatgcagccaggaggaccagcagtgctttgcaggaatccaggtgcacctgtctgcatgagctacctgcttgtggctgaccagacaccttctctgactgcttctgctgctactttaacctagacccggagtaccgagtcatgggaacgtaatgacccagggtaaaggcacagtgtgtaacaagcatcctgccttccgcatgagggtgttgccgcaaagtcggtagaaatcaacgtgctattaatacaacagtgtgtactcttggcatacagtatatgacggccaactcttgatcacacattctctagggaggggacgagccactgtggataatggaattagaaagttggtacaaggagcggtgcccaggcctaggctgggaggtacacttgatcttagttgtaggtcaatgacttgaccttgatagtattcactcttcctgggagtatagcctcgtgtttctttagatgatactccaggaaagtcagagactagttttgaatatttgtcttgtttgtaatactcccttccatcgctcctaaaataagccccgccctccataaaccccgatgactactggttggtctgctgtctttctcctcatacttactacgattctccctcccttttctcttttctgtgcatcagtcagtttttattgcttcaggccctccaaacctactctgatgacatcttgtcctcggaaacaagtgtcaaactcgatcctacctctggccccaggctcataactcgcaggaagaatcgctctcccgcaccaggctatcgagcccatgaccttgagctgccagccctagatcccgacttagaaaatgatgatttctttgtcagaaaaacaggggctttccatgcaaatccgtgtgtccttcgagcctttgaagactttagaagtttctcggagccagacgatgccgtggaacgagatataattttgcagtgtcgggaaggtgaactcgtacttccagatttagaaaaggatgatatgattgtccgcaggattccagctcagaagaaagaagtgcccctttctggggccccggataggtaccagccagtccctttccctgaaccctggaccctacctccagaaatccaagcgaagtttctctctgtgctcgaaaggacacgcccacccaaagaacaaagcagcggctgtagagtgttagtcccttcctatcgacagaagaaagacgacatgttggctcgcaagatccagtcttggaagctggggactgctgtacctcccatcagtttcaagcctggcccctgcagcgaggccgacctgcagaagtgggaggccatctgggaggccagcaggcttaggcacaggaagcggctgatggttgagaggtcagagtgtgtttctgcaaggagttggcttgtgatggatgctcttgtgtaactttccttattggggaaaaaaaaaaagccgcatccatttttcagctctgcatgctgtgtgccgttttgaagcatcctgttttaaaaaaaaattatttggctttgagaaacttttagtcagttcatggaagacgtgtgattccatacaattccacatttactcagcttaggatgactggagaaggtatatgcaaagcttgcccctggcttgaaagagtccattagaacattctgatgtgacattggacaaaaatatattctaattgtgtctgcgggtttttatcatcatgtttaccacttttgtggcagtcttgctgtggtttgattttatgtgtttatcatattttgcagtctctttttttttaattgagctaaatattttctgaaaactatgtgattgcagatttcatttaagtcgatttttgtggtcattctaggttttgtgaactgtcagtttgtagcatttttatttataaagttcagtgcaaattccattgaaatgcatgagtctgtcaaattatttgtttgtagttgtggccatttctgtaaaacgagccacgtggcttcctgatagctcttcggctcgctacaggtggggaacgggcaaatttgaccaggctcaatacagcgaatggccctaaatctaacttagctcctggcaagtggaggccttttcttatgaacttgttggctcagagtaaatttagaaaatgttgatatatcgcttctcggccttttggctaagatcaagtgtagaaaatgttgatattatttgaccttagttcgttgacataggagacggactaaaagttgatatacttaaaagttgatatttaagaagcagctaagggcagctggttcagatttgcccatttgcagttaaactcaagttaaagacgtcgagtacttagaagcgaacaccgctggagagaatgaccctttttaatgtttggttttttggtttcttagactctttcaaaagatctatggtgagaatgggtaagtgtatggttcccattaaaaataatccctcctatctgtttgtctcctctgtaactcaccgcacctctgtcctggcatgtcactaaatgagtgctgtgtgcagtgcatgggacgtctacttactttttattaacattgcaaccctatagcaatatttttgtatctaaatgcccaatgcatgaacagttgtataaagcagtatcatttatttatttatttatttatttatttatttatttatttttggctgtattaaaatttaactccaccactttttctttttcattttcttttttaatgtaatgactgaaagtcacaaagcatcatgctaagactacgctcgttttgctatatgattcctacaatacactaagcttctggtttctttttgttgaaggtctcccccataaattacgtctttgagagcctgtgataggaaaagatatgactgcttgcttaatgttagaactcaggtagctggcagaattcacacacttagctcctgaggaattttattagtgggcacagttaatagttttaggagatatttccaagattcttgattacggtagaaattttactgtaatgtagctgcctataaagaacaaactagactttcaaaactataaaaagtaatcttggtcatttccaatattgttacaagaaatatatttaaattatttcgcaggtttggtctaccggtatttaaaattcagtggataaacatgtcaatgtaatataaatctgattgtctcacgtgttttcccagttctagactattttaagttgttattcattctcaatgcagttttacctggctttctgtaactgaaatcaattggtaatagtttttgaggaggagaggtgaaggacactcaatattttaatcagactcaggagttgtccccttaccatagtttgtctaatctctctgaacctctaagtttaacggtatttaatagtgttaatagtttggaaactttagaagctaccaagattgtcaacagaattcaccgtaagaactctagatgttgaagacacgactgagggataggcagctattgccgttacccttcccagtgtggcgtttgagggggaagaaattagtttttggcataacccttcgatatctgttcatcagttcattgcaggaaagctgttttaacttgatttaaaatccccttgaagcttcaagcatcctgactaactttcatgaggaatgttcatttggctttgtagcataaacatatctctaaaataggttaccaaaagggggtctaaaaatacccagagagtaaatacttggaggtgtgtagtaagcatgtaactacctctgacttggccctacctgttttttcttagagtatcagttgtgatgtgacttgaatttcccagggcaagagtgggtttcatggtagaattcatgcctagcttgcccgaggctataggttcggttcccagtactatgcacccacccttaccacagacacccataaagaaaatgtaaacatccaacctcaaaatgctgaaggatctttttcttaactgtaccagtcggcagcacatgcttccagtcagcacttgcaagtattggacttggttgtattggttatcagcatttgattgaaaaggctatttaaaaaaaaaaaatcctcctgtagtgttgggctaaggtaactatacaaatacagcaagataatcagttaattgagaccaatgaatattacatgacttgtctgataatggggcctcatgtgtcttagaaaatgcagctctgtttagaagcagttgtaaggttatttaatttccccctttttctcctatttttttttttttgtccaagttaccagtgatttccttacattgatttcttgcaatgagagtaaaatataaattaaaaatgagttacctatagtgactccattttacatttatgttgagtgaactttctctaaacataatatagtggaaaagtttgttactttgtaattagaaactaactgcccattcattatatgaatgctttatttgtgctgcagagcaatttgaagaggaatgtgtagggctttttttgttttggggtttttgtttgtttgtttgtttgtttgagtcctttgcctattaaattccagcttgcattttgtgcagttttgggcgcctgcgcatgctgtgtgttttactaagttttggttggcatgcaatccgttatgtttactaagatgctttgtgtgtgactgtcagttctcatgtgtgtgtctttgtgttgcatgaattttcatttgtttggttttatgaagtttgggatctggtcatatatgatgatataagtgaggtactgacaacagtttataaaaatatgtataaacaatctttcaatgtaataaccactaaatcggctattagtatcacaagaaaataaatgccaattacatgtgaattgatggtcaaagattgctaaggcagctgtattttccttatagagctttgtcaaatgactttgtaggattatcaggtcataacaatcaggacatccgatcaaggcaggcaaaagggaggtagacaagtgacctgggttattttctgaggatttttttttttttttggcatgctagaggacatctaggtatatctagaaatacttttcatattacagccaagtgtgtatgctacacttagtactttgtaaatgccctgcaatacccaggctaaccctctacaggacatgattttctggctgaaatgtcaatactgtttcccaaataagtccatcaatctataaatgaaaattctttcttatgctcttttttttttctacttgatagtaatttcaaagtgtcacacataggtttgaatactggctattcatcacaaaattctatagtgtctaatgaaaatatatgttcacatagataaattagcatatctatattgcttccaaagctagagacccttaacttaattctttttgaatttcaatgaaggctatgagtaaattcacatttagggaaaatggtctgatattggctctttgggcacttctgttctatggacatccatctgccagtttactgaagttggattttaggataacccttatttccagcagaaagtgccagaagcatcatatgcaatcaggggagcacaaggaaattatacctttgtgattcataaagatttcttcttaaacttcttcctgtccttccctaatactattcaattaattggaaaggcaagacacttgttacacctggatttgcagggagcaaatataaatggagatgtaacccggagccttccgagtaaggaagtataagccattgtagcaggtaactctgagagagccgtgtgactcacctgtgcgtggtccctgctaggcctgtcctccaagatctccctgatgctgtcttcagggcttatctcacttctgggaggcagacagggaggtgttatctgcattccatagatgtggagaaagagaccgagattgcggctttcccaagcatggaggctctcagggagtagaactgggctgggaccgtgcctcaggagaaaactcacagagactgcttggcagcgctggggccactcaaggatctcgtgagactctgatgtcatgtggttaatgctggtaacgaaagacttccatcatcttttgtactccagaagctgtagatgttatctctgtggtctggggcaaacccttttaacttgaagcagtttacagagttagtatctaccagattccattcagtcagaacctgccttaataagatttggtatatagcaccctgctttaaaagttacgcaccagcatagccttacctaggtatcctacattagtagaccaggagctggagaaggaaactgactcgtgttcagtgggtggaaacccagctggtctggagccctccctccttgtcgcttgctggagcttacagagaccgtttcggcctgtgttcttgctttaatgggggtaactttatatacccccaggaacaaactgtgctcacattcctgcctatacaaaaaacttgtctactgtagctcatgtttggctcactttgttcatgctgtatgcgtctgggctgctggacccagctcagtgctcaggccctcaggggagagaggccggtggtcttacctttgactggcacactgtgtgggaacgtacacagtaatgcttcccagcccaagaggaggaaaataaggaaaggagccatggaaggttctggactagttcaagtttcttcttcccacagaaagtttagtggcgtatcaaatcgtattttatttttgttttctagtttatgcagcctcaggtgttacatatccaaccccttcttatgccttggatctgcgaattcccttcttctttctattgaatatttttgttttgactcaaaaagcctcttaccatgtaggcatggcttcagtgagtttatattctcaaattcacatgattgaacttgggtatggagttatacctagtaaattatacatatatagattgacatgtttttgtatagctatagtctatatgtaattgattccctactaagtctgtacagtactataaaacttggagagcagtcatgctttcccacagagtcgatttggattttctgcttgactatgctcagcgttatctcattcttagcacagatactgagtgtatctgcatgcatggtactgcactctcgtttcctttccaagaagcatatggcttgtgagagagatgatctaggcatgcctgtgcatactatataagatgacaccaggaattagtaaacatgagaaatactatagctaaagtactagagcgggtgagagaaaggcagtccacttttcacatggaagaaccacgaagactgcatgcaagtggtagaacacgatctagattagattagatcattgactgaatgtgtttatggagtatgcactatggactgggctttgttttaagcctagtaatctataagcaaactgtaagatgtaatgtctgaaaatcttacaggacccagcacgtaatagggaaataagaatgtcttagatgccagtgaatgtccaaggaaaagaggtctggggttggggtcagcccaaagagacaggcatttgcaggatggaaggaaggaaacactgaatcccatttaagtggatacctggaagtgaagagaagtcatgtagctagatgaaacgtattctgagcagatggaagaacaaggagagaagcaagatgggtgagcataaggaagacaaccacttggcaggagagtgaggcagagtgttagaaatgagtgtggaaaggcagcaaggggccaggttgtttcagacctcaaaggtcttgaagattctacttagaactttgatgggaaaaagaaactcaagtgtagcggtcgttgagtaaaccgtacctgcgcaggagctatctggattcctgaatgaaagtcacacacacacacacacacacaaaggctaggtactcctaaaccttcccctggccacttactggaattcttacatggctggttggctttcccccctgcagctcttaggtcccatccttctcccccgaatcatggcgattctctggcttcctttctcccagttcctagcctgtgcaaatttaaaggtcctgcttcagtctctctgtccagccattggttgttggctctttattgacccatcaaaaaccaatcggggacaaggacggtcagcgctgtacaggcagattcctgattttgggggctggattaattcaaagcattggagcccacgtttggagctgagtgtcccatgacccgaccgtgacctagaaacctgctctttggagcatgttgagctggatggtggaagccgacagatctttgggattctccaagtggatgatgtggtgacagtgttgatcagtctgatgatggggaggaggttagaagttgttggatcctagaaaaagagaccagatgaattatgaatgaaataagtgtcttgacagtaagagagcaacctgggtgacttcaggaattttgaacctaacagtggaaggatggagttgaccttaactgagatgaggaaaacaggtggtgagcaggcgaccgtagagagagagcttagccatgattgtgagtggtattttgaaagacagagaggcaccagccaagggcttttgagttggagggagcatttgagggaagccttctccagtgataatgtaagcagctggtttggaaatgcaggggagggttgtgctcgacctagactgctggcagtctgaatggaaagaaagccgcattaaatgagaagataagtaattgaaagtgaggagaaacaaaagtggaaagtggttcttagctttcaaatgtggatggctggggcgcagggaccaccattaaccatcaccaaggaaaagcagcttgagattggctgtatcagcagtaacaacatgtctgctgaggcccagtttaaaaaaaaaagtctttttcagataacatttcagcaggtccctattcaagcataagtgcgtattcacaagtcattggaaatgagtcaaagaggggcagattcctggctggagcctccagaggcatttgcttagtagttacaactgtattcctgaaccagctcagagtagatttagaaaaaaaaaaaaaaagtgatagtagatctggggagaatacaaaacgtaggtgcccaaggatatagtaatataagtaatatatgtttagttacaatgtaattaagctcagaatacaataaagaggatttcagctagcccaccttttaaattctctctcagactctctcattgctctcagggatgagctggccccagccttcctgagaggtctttctcatcagtgtggtctacacaggggtagtagtcacttcccaactcggccactaactctcttgtaagcagtctctttactacaagggagcaagctttatactctccgagagttcgaagtctgttagaagatcgtttctttacaatggtctttaaaatatgtagcagtaatggggggaaaaggttttgaaaccctccactcttggctttattgcctgattgcacatatccgtatacaggggccacaagtcgtgaactctgcctgatcaaggagagggtaacagaggtggttctgatgggctgtgggaacgcctcatggtcttctgtgaatgggtccagctgcacagcagcagagtagatcttagagaatggttgagcacattgtttcatggtgttgaacttgaggagaaaatatcaggtagtcactaaattatttagtaagggcctgataaaaagaaaaagaaaaaaaaaaaaaaacagccaaacttgtactaggttatctttgaggggatatggacaaaacagacaaactcagacaggtgttaatgacgtttccccccaagataattttagagttgacccctctaaatacaagcaccggattaccacttttagaactgttcaaggttattttgactactttgtggaaaagaaaaaaagaagcgtctcacatgtgagttggacaccaggctcttgtttccgagctttggaaaaaacaccatttatcggtgtggcgctatttcagggacactatcagtgaagcatctgggtagggcagaagatatttcggtggaatttctaactataagcccagtcttcatgtgaaccctcaggccagctgcgagaacctttgtgactgtgggtgtttctgtgacaggagcaagtccatgagcgatgtcagcgcagaggatgttcagaacctgcgtcaggtgcgctacgaggagatgcagaaaataaaatcccagctgaaagaacaagatcagaaatggcaggatgtgagtattctaccacgagggcgggctgcatgtcttgcttctcttcagaggaagtctgggtactaaagagacagttttccttgctattctagattcagtactgtagagaatgagaccaaagttctgtcctatgtcttaaagaccactgtcaaatatagaagtgtgcttatcttctaagagactgtgagttctcaaagagcgtgaggtttcttcctagcaggagagtgagctgcttactggagggagtggctgggttgaggtatgatggctaattgtacctctgctagacaaaagagcattgctcaagattgagatgggagaggaacaggatgtgaagctctgatcttggcattagtggggagagttctcaacgttaccttggagaccaggatgaaatataactcagagtaatattttggttgaagtcaggatctagtgtgattcaacattaaccatttctgtagagctggcctatacgattgttcatatggacatagacttaacctttatctcgatcttaaagaatgacttcatcagttggatgaagcagttattgcaagctgtaggagtgtaaagggctgtaattggtaatcgtctccccaaacccaaagaacttggaaggctgcatagtaagagcgttgagtaacaacatgagcaaaaccatcagagaaagtcagtgctgatgtacaaaggcactactctgctacaatgtagtgagtgtcctcttatttgaaagttgactgaatgaacacaggcctcaggggtgattccatgttagggtgcttgcctcattggtgtgctgcacccctgcaaaacccagcaaagagctcagcatcacttgaccaactcacgcaatgagtttggataaagtaaatatcaaggtgggctacatatcaggggagacgcagaggaatatttgggtcactttttttctttttgggaaaagagttcgtattggtttcaggtttcaggacagtgggagaggccctgggtggcccccaagtttagtaggcagacttactttccaagccctgggtgtgtggagtgagatctggtttggtctgagaacttggctatccttccctttggactggaatttctcttggaatcctcactacggtgtttctctggtttggaaatggagaaatatttgttgcattcaaaatgtgtcaatccccgagtgtcacaagtggcttgcgtgcctagggataattggaaacctgcattaggtacattgtcctggctgcttttgaacatgtttctggagatgtgggaagcaagtgtgggcttatgactacattatgttccctgttgttccctcccaggtgaacttgattctctgaacctaatgggtatcccctataatctgcaattccaccttctgtagggaagaactgtgtttttgtttgtttgtttgttttgttttgttttgttttttcctttaggccattctccttggcagacctaccacacaaggcactgatctttatgtatagtctaccttatcgagaggaaccacatcttatgcatctttgtttctggggcttgaactagatggaacactcacttgagctagactgttccagagacttttctgtccctcttatcagggtacacatgtgaatcaggggtttggggtgctatgaaattgaatttgaaatatttcccggccaatcagatctagtacctaattgcaagcatttagcattctttgagaaatagacattgatgtgatactttctaggataacaaaagtgagatccctcttattaggtcaggtttttccggcagacacatgagataaaggcttggtacagaaacactggctataaaaagcaaaattaggccaccttggcacaagtgggagtgaacggtttcagcattgtaatgggatactccagcatgctcttgctgcaaggaaagggcgtgtagaaattcaggtatgaccaggctgatgtgatttcttgctcaggaccttgcaaaatggaaaaaccgccggaagagttacacttcagatctgcagaagaaaaaggaagagagggaagagattgagaagcaggcactggagaagtctgaccgcagctccaagacatttagggaaatgctgcaggacaggtaaagagctggacaccccttgtgtttggagagcccagtgctgggaacacaggctttgtatgtggtggggatgtgtagtctccagttttaaactgtaatcatatatgtgccgtagcagtcagggctttgaagtgttaaaataatgtggcagaattagtgatccgagttaacaaaagaaaatactacttaacattgctgaggggtatttgtacgctcttctatagaacgaggagatattctcagtatttgaaaacaacaacaacaaaaaaaaacccactgaatttctcaatttaaagtgagtttaaagatggggtagtcaagtaaaataaacctttaccttcaaatggattttgtgaactctaacaattcctcgttgaattgtagtggtagaggctaagttagatttttaaggaagtccatgcaagtgtggatgtgtgggtttgtttattctctgagttgtaaaagcaggataaaagtgaaatttccacttccatgagtgagaagttaactgtgtggctctgggggagattggtagatcagagagaaagcaaatatgctttcaaaataatgtcacaaaggcaatatgccagcaggtgaaattaaacaaagctcctttgtgtccaaaatgccaatgatgaagagctccattcacctctgtacagaggttagcccgggggtggggcagagactccctcccaactgccagatgaagctgtttcatcaattctctgtaagtatggataataagcttgaatctattataattgcccatggggattctgtcaagctccgtgaactggccggatctctataaaagctcatgtctttggtgctattatttttatcaatacattatgaactttataaagcaaaacttggcagaatcagattggtcgtcagccacctaaagcattttgaaagacataaatttgtagctaaaaacctgtgactaatcaagtgttaaaccttctttattttattattacaaccttttatgattaaaaaaacccatttgaagctgggcgtggtggcgcacgcctttaatcccagcactcgggaggcagaggcgggcagatttctgagttcgaggccagcctggtctacaaagtgagttccaggacagccagggctatacagagaaatcgtgtctcgaaaaaaaccaaaaaaaaaaaaaaaaaaaaaaaagtacccatttgagactctccttgataaaaggtcagatcagtttcttagctgatgcttaaaaattctgcataatcccattagtgttgttgctgatttttgtgttcactttacattttagtcattatcttaccccatctggggtcaaatgcataactctgtcgtaatggcacatttctctttgcccagggaatctcgaggttctacagttacgtcttggaggaggacctattcctctgatgacatcctcgatgatggagtgctccctcctacagtgactctgtcagaaactagttaccagagcgagagactagaagatgaggcaagagcgcatcctgctgagatgcccaaagaagattccacaacatttgcaaatagagaggacagtgtagtagctgagactcagcttgcttctcacagtcctgaagagcaacgtctggccccttctccttctgaggaaccgcgccaggcctctggatcttctgcagaaccgcaccaggccccgttgctgtccacagaaccacgccggacccctttgccttccgaggaaccacaccaggcctctctatcttctacactacagcgtccatcctcactctcttctcagcagtcatggagtacaagagcagagtccactcggatttcagcttctctccctagaagttaccagagaaccgatacagccaggttaacatctgtggtcacagcgagaccttttggcacatcttcaaggggaatctcctcactgcccagatcctacacggtaaaaatgccctaggtttctttaatctgcccctgagcacaatgagttgggggagcttgcacagaggctgagttgggcacagatactagatgtataaaatgtagatgatgtccataaacaactttcacgacaatttagatctagtaaaaacgagtgattagattttaaagaacagataagatacattttaaggcagaacatttgggtttttttttcttgtcatattttttgattctgaagtattaggttggactttatgaaactaccagcagtcatctttgacctatagtactgaagttttacatggctcttgttaaatgttctcagagttatatttgtaaggttttttaccctatccttccttcctaccttagaacttgatgactgagtatacttttaaaaaaaaatgtccacttgtatctctaataggggttggcacgtgtgggacatgttagaattatgtaaatgaagtagcatggtctgaatatttaaaggtcatggttctgttggttctacccatctatacttcagatcttaaaatcctgacatacagatgagaagaattatggcttaaataaattagtgtttgaggtgagaaaagcctgcctaaatcatccaggaaatccccgaacagcctacttaaaaaaaaaaaaaaaaacatattggattaaatctatatggtaggtactattagcatagaacagtttgagtcactgttgctattgaaaggcattacaaataaagggttgacaactcccaagatgcaaggcatttccatcatttgataagagataaagataaacactagcaatgggtgtagaaaaacaagtcggtcatctcaacgcaaaggaattcactaaagcacaaagaaaacaggtttaacctcgtgtttagcatgaggacaaaggtaaacaaatttttccctcattggacttagaaatattttaaatgttcaaactacgtggtgttaccaaggctgaaaggcaggcgtctgttttcttcataaagatgacaggcaggtactgcagatataaaacctttgacccagtgagtttttggagtgtctgggctataaaataaaagctccgtttaaaaaggcatgctccagttggtcgcagtgctttgggggagtgatggatagctcgaaagaatttaagtagctatcaaatagagaaatgattgatatccacactctgggatgtctgacaattcaaagagctagtttggagttgtatcttttgacttgcagtgatgtgaacaaacatagggaattttagaaatctatacataatgacgcttttatcagagcatgtgtttctgtgcacgtggatatttcgtagtgtgaaggaacacactccaggcctttgacaggagttaccttgctgtggcacacatgtgtcactttagtggctttaaaatattaataagtctgttaaaaaaaaactgatcctaaggctagcagaatattgagtttaaaatgatgtgtcctaatttagatggatgatggctggaaatacaacggagatgttgaagttgtcaagagagagcaactcgatttgggcagagccactggcccgaagcctgactccagccactttatttcgggctcagccagtgagaaggaggtcatagccacagaagatgtggcaagcttgtcctctcccacactcccttcctcatctctctcccacgaccgggcagtctcttccaaagccacgttctcatcaatgtctggtttggattcagtgtctgactctggagaaggaagaggctcaccattgagggaagtttccaggtccctggtaagttttggagggttctgagccatgtggctcagatacttcaagattttaatctggaaacagttgtttcagcctttggctttacagtacaggttgctatttatattacacaaaaatatagtatggtctatttttaacagagtgtgggggcagtcggtcccttccagcttttagtttgtaaatcccagacaaccttcatgagctgtgtctctagaaacatggtagaccagtctcttggagggtttgccttaagtttttattattcacgtttctccagttttctgctgcagaccattaatgtatgtgtgagtaagcaaagcccttctctgtggaaatcagccagctgcaaagagattgtcccatttagtggatgcttgtctctgtggacacagcattttgttatagtgtaaatttttggtggcttctcctacaaatttgtacttcagaatggcagcatttgcttttactcctgtctctcagtgagatcagtgaggcttggttagagcttgacacctgcgattctgaacatttgaactccaaataaaacatagcggattacaaacaaatggaatacttgtaatgtttcctgtttaaaaccctaacagatggctttcaacagaattattagatgatagatgttttccggtctacacgtaaaaaccactaaaagtctttgtcaagcaaacaaagcttctacaaaaaaaaaaaaaaaaaaaaaaacaaacaacaacaacaacaacaaaaaacccaaaacatatacacacacaaaagaacaaaacttaacaacacttacgttaagcaacttgctagctgtataagtccctttacatagaggcatttttttgattgttggcctggtccctaaatccttgttagtcttactggagcatagttattttccaagtcaaaagataaaatgtcacttgaatatgtgaataaaggagatttatgtgaaatagttttacatagcatatttatttaggtttattagatttttaattgtataagaaaataaaaaaaaaaaagtcagcctccctccctgtctccaggttatgatacttactttgtatctgggaaatatgaaggatacaagaaaaaaaaatccatgatgaatatgttgttcagaaataatcggtgttagcacttacataactttttgttttgtttttgtttggtgataggtgttttctggttcctgttgtttagctatttttcctgtatatattttcaaatatatctctaagacaaaatttttcagcctgtaaaaaccatcagttataaattgcaaatatattttaaaggaaataggaatttatggtcatcattacatgtctcaatggatgagaactgtgcctctggtactacacggggactgaaagatatcaataggtgaatataaaaccagaggcaaggtgtctcttgtcctatggatttgtacattgtcttcccgctgtcaaaaatcaaatgtaacaaaacagcttgactaatgtgctgcctgctacgtgctgggccctccttcaaggtgacagctggcaaactgcacccatggattagggaaaaaaggccatgtgtggtgtgtgtctgggtgtgtcttctgctctggcaactgcaagaagcccagatgaacctggcttgttccaggtttcatcacagtggatttatgctgtcatcattaggtttgaagcctaattctgccgtggaggatttggctgcatttaaccattggagctagtggagttcttgagcagtcgtgtatttcctatggtgacttgcttgtctctatttggactatctatttctatgctaccaggagagcatcttgtggagctggctgactccagagaggctgtgtgtgcccaacacagctgatgagtgtcagggtccttgtacatcagtctgtgcaaatttgtgcccaaatctctctctataactctagatgttcacagggaagaaactctgagtggctgaacaccttgatgctttggtagctttgggaaaacatgttcttttggtttctctcttcattcccctgtgcttctgctactaaaggccttatacttttgtctctaggatctcccatgtaatgaccctgttcaatctcagttgccactgttccaatgcaggaccttttcctgtccatgtagatggttagaagtagcctcatgtgtgtttgttctgactcagtaattttgctgttctagactctgctgaagcattctatcctttgaatgaagttcagagaactcagtagagtaatggtgttcttcataaatgagttcagagtcccttcatcatacctccgtatgaacatgttgaatgagcacgtgctgtattgaatgggctaggcaggcttcacagggttatatgagtaaactctttcctcagcccagtgatgtcagcaccatcacttttagtctcacctacagagaactgaaagcatagatggtcacactatcttttcaaggtcatccatggcactaagtactggggttgggatctgaactcagagttttatcctagattgcctacctcttactacatcagggaaagagaggtgcctaagaaagctagttttgtttgggcacatcagatacgttagtcattactcttctctatttgaagatgtttactctgcttatctctgttgaatgcctttcaagttcttcaaagctgggtaaaaccacctctttcatgatccctgtgttttatcttcctgattggaattgaaccaaccacccttgaaagttaactttttccttgttgcaaatatccttgtttccctccttcatagatagtctttgtacctttcagtcaacatacagatttcagttaatgctgacttgacctacatcggtgctggctcaagctatattccaggccttggttaccagcctcaagcgtgatcctgatctgggaggcaatttcagatgctttttggttcttgagcgaggggactcatgggttgagggatgcttttggaatgcaagttctgatatgttacacagaagtattttaagaatgcaggtgaggaggcagagggtgggaacccatctcagaactgtgctgataatgtggtttgggtcgtaaagcagggaaggtatagccatgaaaagacctgaacatgggtgctttcacctctgcccacaggagcttcctgttcctccccatggctgagctacaggcttcctaggtcaatttacgttgctagggaccagagagaagaggaagagatttgactcagagtccttcctcactcttcaactgccttgccttgcagacttggctttcgagatgccctctctcagcgggtttttcttggaagtttgttttctatcctttcagagcctcttgctttcaaactccacaccaatctacctcccagaatctccacctcagcctttgagaacaactcatagaaggagaataataacaatacatttgaaagtaggaaacgttctacatgactttgactccatttatgagctggatacggcgcaatggtagagcatttgcccattatgaggttctaagttcaattctccagtgctgacaaggaatccttttaaatatcaggggtgtctcgttcttgtttatcccacttaatcatctcagccacttctgacttatttttaacatttttgaattttataaccaatagtgattgaagtgtcttctggcctgtagtactaaaagtatctcattctagcctcaacctctcaattctcattccccagccttcaccgtattgtggttctaatcatcactctcatgcctgacaatgaaatgactcttcaaatgattgtgtggagaggtggcatatacatactgaaactcacctgaactgaacttatttcagaaatgcagaatttgaattcaaccaagctggcactagggagctattggcattgtgaaatttggatgtagaataatcagtatgttctataagtagatttctgacagctgtggggaagaggggatggggctggagatacaagagaaaaacaggaggtgataagaggagagaggggaaatatgcctctgaactctggtggggacatacagaagggtgaagaagctgggttcattcaaggttggtctataaacttgggagcacattattacaagggtgagcaaggcagcagaaggggaagaaaacagagaggggcatttctgactctcacagtggttggatagtgacacatgtaaccaagttatgaaaatccacaggaactagaacatgtcttggcggaagatgctttaattttgagaacattggacctagtcatttaagacgtgttagtgaatgcaagttatttaggcaagccatggtcagaaaggttatgactgaggaagtccaagatgagagaggaggagaacagcacactgataagactaagatgaaggtagagagactgtgagggttgggcaaggtggatagggacatcaggtgacttagaagagtgttccccactggtaaggacctggtaggctgtatgcactttagttgggttttgtagatagaagcttggaaggcttgaatcagctggtcggagtgggcaggccaccttcggctctaaagtagtaagtatacagaggatgcccaaaggttgaggtctatctttgggtaagggagatggctccagtgttagagcggggctgcgacttgaaggccgcttccctccttttctcattccaaggagaatttggcatgcactaaggaactttgtggacagaaatttaaagatttttttcctttgctattctggactgtgtcacccaaatctacttttagtggtttttttttttattattaaatatgtagggtttcctaagccaacacgtttgtctagttagaaacactggaaaggaatagttttcttggtgcataagatagactctgtttctcactcccagtggtagtgccatggaaattataattcatcaactccaggagaaataattcatactctggtgacatcaggtctatccttagacaattaaaagtctcctcctggctcatcagcctgacggtaagtggtgcaatctcacttttagtggagatttctgttcaaattgtagccgatccgagggagactgctttcagcgtaaacgctgagccattgatggatagctatgactttctcttttctggcatggacaactgaaactccttgggaaattcatttcttagtcatcaaaataatgtaggtttcccttgacaatttgtacgtttgtcccatctagtgcaaagaggtaactcctcgattgtcttctgtagttcagagcctttgtcctacgtgcacatggcttaaatttttgtagagaaagttaagaagttagaggtcctgcctgaagtcattgttactagttgaagcatgaccaaattgtagctatgtttacatataaaaagtcttaggcataatctagtagtataggaacccagcacttcacaggaatgtcctaaagaattctataatgaagaaatgatacaactgggagcctgtgacctacaaccctaatcctcaaatagctctcacctacttacatattgtgtttgagcgtgtatgtgtgtgtgtgtgtgtgtgtgtgtgtgtgtgtatctgtgtgtgtacacacatacatatgtatgtgtttgtgaaggatgctgtgcacataagattgtcatttgaaaggagagcttcaaccatgaaaaaccattgtcagttcgagcaggctctgacattacattcaatgtcatacatggggtaacttggatattaacagatttcccagtaattgtccctaccttgttctgtctttgtgttttgtcctgagttatggacatggcagtctggccgcttgtagccatcgcaaaaccatcctctctgttaggttcatagaggtgggtatctgttcttttatttaacatgttcagagatttctttattttcaagttcaaaacagccttgtggagagaattcttagctgtatagctctctctcttccacctctatggttgaagctcattctcctttgtgctttatttggaagaaaaggacaatgttcaatcgcagtctcccacagagcatttttttttaacatctccatgttgagactattaaaacaccatctcatcttttattcaactaataaaactccggtaaatggtttgactgtgtggcccatcatttgtctctctgtctttgtataacaatagactctgtgctgcccttggctttaggtcagatctttgtgtgtgtggtgaggatgatcacttatttccactgggtctcctctaatttaggtgtgccgtggttcttgctaagcagtggaaccaaccagtgcttttctctgatctattctcagacaagctttgttgccttcagattggcattcagcaggctcattaggaacacctgtcatgggaacatctggatgcctctatttaaactctttccaaaggcctccaggtggaaacttctactagctacactttcatcttgctttaggaagctctcatatccacttttgaagagctacagttacaattattcttaagaacaaggatcaagcctcactcatctttcttttcccaagtgctaagtgccatgtctcccagagtctacacacagtaagtgtatgttgcacagtgaataactgggctgtattactgtgcttccatgcatttataaagctcggcgcctgcttatatctttgccttccttccatttttgtaattcctacacatcatacagtttttctcagagtactgtcacttgaatcttaaatttactttatggttgaaaaaacaggcagaaagcttattactgctttggttagccctaggccctagcttgagggtaactgccaaattaaaatgaagaattggcaatctgtgatctggaaagtaggtttgggaagattttttttttcaaataggtgcatctaagttccttatgattagataataaagaaccgaaagactaatctgataaactcattattatttatattcgtttttacccaaataaagtgtatgttaagtaagatgtttcaaatttttaatgacatttgcttgtttatgtgtgttgtgtgtgtggtgtgtggtgtgtggtgtgtggtgtgtggtgtgtggtgtgtgtgtgtgtgtgtgtatgactcactctctcagaggacagcctgaaggggttggtctctccctctaccttctgaggcctggcgactgaactctggttgttgggcttagttgtgcttttacttgctgagccgtctgctggtcagtgaaagatgatttagcaatggtagcttactgtaaactgaaacttggtttagaaaaggatttatgaaaatcctggaggctggagagatggcactgcagttaagagcactgcctcctcttccagaggatccaggctcagttcctagaacttgtatagtggctcacaactgtctgtaactgctgttccagaggatctaatagcctatatggacactgctcacatgacgtacacacatgtacataaagacaaaacacacctaaaataaaaaatatcttaagagagtgaggagggagaggagacacacacacacacacacacagaaagagagagagagagagacagagagagacagagacagagacagagagagaatgagaatatgaatatatcctgggcagtttaggattatagtaagagggtggaagtaatattctcctttcctaagatgctattgttcttgggacgctttaaaggagccaggatctgtctgttactctgggtgtcttactgtgttgttcctctcagatgagagaacagagttctgtgttttataccacgggcaccagcaatgtctttgcctctgtatccccatgaaccagttgagccaacaagtatgcccagtgcgactggcctggtcaattccagatggattactcctgctgaggactaattatatatctatggggcatttgcctgcttcagctaccaatgcttaatactggaggtagattatttttcaatatgttgtctggcattttaaaaacagataatgtaacttaactctatttcattttaggtgatgaataaatggtttgtaaattagacttgcttgtatgatgaacagccaacctagactttattaatggccagcctatttgtaggattgtattaaaaggaaagaaaatgttggttgatgataaatttgcccttaccttattttagcaggaaaaaaacctacttaatgatatacatataactgaacatcttatcaaagccaaggaaggaagtgggaagctactgttttatggtggaggagtgagggtgtaccttggtgcagcctcccatcttaatggataggttttcctctgtgtgggtgccagggacacctgatagcagcgtttcatgttttactttcaggatcagttcagcgatatgagagtcagcataaaccagacgcccgggaacaaacctgtctttgggtttacgataaaatgggatatttctgggatcttcgtagcatcagtcgaacaaggtaactataatcctaacaatagacctaactctattgtgctcccttctcttctgtgtatgtgggaaatgagaagtgacttgatttggaatgtagtgggtacatgtgggaaagatgcatttcagtggaggcaaaggacagtttcttccctgagacaaatagttggaattacatattgtttattttcccttcctaattcatttgttttgaagaagctctattttgtaaccttagagggttttttttttttttaaagactcaatttctagaagtgttaacatgtagtacttacctgaaagtctaagttttctgtaaacaattgtgttttgtggtaggtgcataaggcaaccaacatgggggttgtttacattgttgtttacagtggctcgacccaaatgtgtcacacatgctaggccctctgtccgtggtcacctcccatgaagaatattttctaagcattgataatgttttatctgtcacgttttgtatgttgacggtgctttggaattctgctgactgattacttcttccacagccagggttatgtcaaggcaaacacagaaactgctcaatacgccctcaaggttgaaaactacagtgatatctgtctatgagaggaggtccctctttaatgattcctattatccagaactgtgtgttgagttggctcttttaaaattgttgtaatcattgtgctttcgtggtagttttatgtggtactctttttttccccttcttttcccacccccagagttctagttgatgctcaattaatgtatatatttcacatttttagtttaaaaataattacattgcttctctttgtccctcagatgattaagttatttttttattgtctgaatttaaaatttctcctttccatgtaaacaaagatagagactatgaaataaataatgcccttggtacttcatgtggtgtaaggattcagatattagatatatctgagatatgatacatatgaaaatatcggtgttactcccctactggaaatgaattgaacttgctgagatgaaaaagtcattctctttaatttaaagaaacagcagagagcatactgtacaggtttctcttcatccaactgttccctttatgttgtttaggtagcccagcagaattttctcagctgcaggtagatgatgaaattcttgccatcaataacaccaagttttcatataaggatacaaaaaagtgggaggaagttatggcaaacgcccaagaaactggaaacttagtgatggacgtccggcgttacggaaagtctggtgagttcacttcccactgtgtctggctttttaaataaggaaacccaacttgggcagatggttctaacagttggcttcattaatcctctccccacccccattttacatagctttgtgcttacagttgttttgtcatcgttgttgggacaaatcacaaacactgcctctgagtattctttctgaaaatgcttcactagcaaatctactgaattcgacaccattttgcttttttctgtaactgatagagctgaatgtacatgtcaattaaaagcaaatgtatctgtacctgggagtcgcaactattctttctactttagcaactgtgtgtattcgttacttgatcttcatgatcacaaagctaagcattaaaaacggcagtgtgaggtgggcagtggtggctcacacctttaatcctaggactggaaaggcagaggcaggtggatatctgagcctgagggcagctggtctacagagtaagttccaggacagcctgtctcagaaaaaaaaaaaaaaaaaacaaaaacaagaacagccaaaaagaatggctgtccagtttcctgttctctgcactattcaactatactgctgccctcaaggtcccagtgggacatgttcctacctattctcatagcagtttaatctgctttttataccatagtgtttctgtgtcataggtgatggtcaggtggaagggagcattgagtctcttcagtctttgctattggcatataacatgtagtcccaatttaagaaaagaatcagcacatttgctagttttcttgttactaactaccgtgattttttaacttttgtgtcttgggaaggtggtctgctggctaaagccctaaagtctctgtcatttacatgtgacttgattcacctgtctgactgtctgtacatctatctgtgtacattttatatctgtgcattcagtaactgtattctttccactttaccgtctatgtgtattccttacttgatcttcatgtgccaatcagactggggcaaagaccaaccttccctgccatttatacggcataaaaccctcaatcttaccagtgtggctaccaaaattataggttcatctgaaacaaagtggatcgatacaacatcaggaatttacaactcagacaagtcttcaagtttatcagtcacaactgatttctctgaaagccttcagagtcctgtaagtagaacagagtacccctagaggccatagatatgggggaagcaatggtttgtgaaatcattttgatacaatataagataaagttagggtatactgagtacctagactaagtgtagctttgaaaatacgtttttattagcagcctatcattattgagttatgtaatgatattgacatcccataatgatgttctgcccgtggtgctcaccagtgtcaacatcacaggcctctctcagatctgtgtgaatgagaaagagctaatgtggaagattgcatgctataagtgatctgtgtgctctccagtcaactggtaaagtgtgcaccatggagcctcacaaagcatcttaattcttacatggtgaatctgatagattggattgcttatgtgaccaagacatcatcagttttgtgaattgattcaaaaactataatgtatgaaatttcaaaacgttaaaagcagtatttttttcatgcagttttttttaaaaaatgcatctatttctaatcataattattcattttcagttgataatttaaactttgacctgaataaacttatctaatataagaaagtattaatacagttttgaaggattgaaatgttaaagaatcttaaatggctgttttactactcataaatataaaccaaatgaaggactgattattttatctatcatgcctctaagaacatcaatgactgattaaacttatggtcatctttgcctgcagctagtcattaatccttttacaagtattggagagtcatgaaaaacattaagattttactacacataagctacgaggaattaatcaacaccctgaaaaacccatcttgtttaaagatacttttccctaatgagagatacattatttaattccgaagtccaatcagacagaatgttaattagcttttctcccgctttccagtatactgaatccaaagaagtcaatggaattcacgaggaaagtaacccctttgattcaaaaggtaaaactcactcttaaattgcttctgttggttgcacatggtaaatcataagctcaagatctgccataaaagttaatatctgtaagtgaaggaaaactggaggcacagcaagtttaaaccaaatagcatgtagatgcaattgtggccaggtgagagggagtcagtgccagcctggaatgtgtcaagatctctaaacaagctcagcagcctgctcagggctctgggtacctaagccaagggagaacagattttcccagggccagcagcttcctggctatggagtgttggcagaaggatcttcatttaaacacaaaatggtgaggctgcccttcctccctcactgttttaaaaaggaccaatgtgcagggggcagatcctggcagagaaacaccaatggcagcaacagttgagggaaggcacacttgtctgaaaaaagatggcagagtgtccaggctgatgttagagttctcactctctgctttgaccgttcagcaataatctagctactgaatattgtgtgctattctgtagacataccagaaagagttttcaggtccatataagcagaaaagaagctagaaaaagctacaggtcttacaccatgagccagggcctcttgtcgtaggactgtttgttttggtgactttagacatacctgggcagatacattgaacaaagctgatcaaagtctgtgaatctcccgtgattagtatctctgcccttcatttctaataattagaagctggggttggttttattttttcctttatccacatagttttaaaatgagaattgcttatattccttcatgatactaaaatcgaagggatccctgttctgttctgccagtggcccgaatagtagagccaattgatatgacgtctacattgtgaccttgggactctgtgctactcgagggttgtttagttaaaaagtcagcagcagttgttttcactggattgttctttatggtgaactgcttttgttgacgtctcctctagatgcttttcaattcccctttatcatattgtaaaagcgcttggggagaattaactttaggttgattaacctaaacaaaaactgctagttttcatttcttgggggacattatgctttaagaagactgtatgcctctccttgctgtgacggtacgatgctaccgactaaaaataattaatacaagcattggttccttttactaattagaatgtcgtgtagactactcaaacgtgtgtgtctgccttgaaataatctcttctcttcagtggctaccaattttgttatttggaaaataatattgctaaggattggaagaatgacgtggtatttattttcttattttccaactagcatcagaatccatttctttgaaaaatttaaaaaggcgatcacaattttttgaacaaggtaaaccgacaagctaaactattcccgggctctcatgatctcatctctcactccagccttctgtagtctgtgcttccaggcaccagtctctttccatcttgctattcttgtgaccaagcaacgtaacccgtttcccttctttccccaggatggccaggcttttcttacagctcctgggtctacctctgtggtaacgggctttgcgtgtcctttgtctagctttccagctgtttctccccccccccctctcttaaccttgtgaaggaaacaaagcaaaaccacccacgcactgagatgctgctacacacacgtgtttccccaccgggtaacaggaagacttgaggaatttcattttcagcttcctgcttccgtcacttgcacagcttgccattagattacaccaacatatgtttggtagacttcccaaaacagcaaaaacaaacaaacaaacctggctctggtcatgggagataccattcctgaagagcagagttacttgtcgttattggaatgatggagttggaaggcatagaatgatgactctgttgatgtcaaaggcaatgtaaagtaaaggagatttggtggcacctaacacaggagcactgagaagtcatctatgttggtgtagctgcacgaactgcctcgtgaggtgtgatgcatgcggcttctcttcatcctcacatctgtctaaccctctgtctcctgaatgtggtttcaactctgttttgctatgaggaacttaaaagtaatatctaacattttagttgcaacatgacaggagatttactgttgctatctgaaatgttactatttctttaaagattcatgaaacatttcaaaaattgctttatgatacctactgggtttgtgtctgttgtgtttattacctaatattcttcttaaagtagattaagtttcctctcagaccataaatagagtttatcagctgtccttggtgcttttgattcatatatatatatatatatattttttttttttttttactaaacttattgttttctgtggttattcagttgaagtgatatcacacacctaattcaagctggctaaaacaaaataatgccttgtctttattctagttttctctaatttttcttcagtgagctattttagggacaagaattttcctaattcttatgacaacttaaaaaaaatagttatataagtgaataatttatgtgacggtggagatttcagaaaaatttctaaatactgtataatactatactttctgaaatttcacttttctagaattgtacaatgtgttgacacatatttatacaagctccctgatgaaagaaggaataagctaaccgagtgtagtcatacccagctcgaatgccaaggctaggcaggaaaattaaaagttcaagaccatcctggattaaaggggcaggggcatccacacctgaagtcccagcacatggaagttggaggcagacggactcaaagttcacagtcagtgtttgtttgctacattagttgagcttgaggtcagcctgggtttcattctcagaaagcaacaatagagtataataataataataataataataataataataacaataacaacaacaacaacaacactgtgcctgctgggttacacatcaaacttgaatacttgtgtttcaaataacagaagcggtaaagtgggctcggctctgtttctaagagtctgaggtaccagcggtttcctctgttattaaatttgaatttggatgacgagttcccaagagaactgaagggaaaggttaaacagaaggctgatgtcactcctatgctggcagggacagctagtgctgtgaaaagaattactttggagaaatggaaactcacgttgtgcctttcttccttgctcgcaggaagctcggattctgtggcccccgatgtgagtattagacttttgcagttggtcctatgtgagggaagttgggtaggacagggctactacacagtactatttcttgtttagtgttaagatgcatcaatgttgatcagattgtcatgttgtaagctggaaagactgacgctgatctgtgagaccatgtctgcatcattgtggtataagccagcgttgaaatcaatgattgctgagtgtggacgtgtttcagtagatgacttagtgacgtggtgttctgtgtttccattctcctgtgccacaaactggttagcttccagttccaaccctcagtgccccgagtcgctgggcttgggatcaagaggaggagagacggaggcaggagcggtggcagaaagagcaagatcgcctattgcaggtagctccacacagcctgcgggaatccggcgctcggctttcattgggctcttctcacctgtgccacccagtcttgagaagcaagcttgaaaaaaagcagaaccaagatatcgtcctcaccactagctaagactgttgcgtattgcgtgcatattttgcaccgacccttacttttccagtttggtggttttcaaaactatcagacattaacccttatggacccagtgaagagtgacacgcccagactgtgagcacttgtccttgttagcagtagaagagatctggtttgccatcaatcagcctcccttatcctagctggaggccttgatgaatttacatcagcagtaaaggttgggcataggtgcctactctttcttgacacctgtattttagcttaatgcaagaccttttttttttttttttcctctttcttccaggactaaaactctgattggtcacatgaaagagtgacatgaaggtttagagacagcaaaattgttaatggaaaatattctgcttcccatgagaaggcaaccttgattaatcattatgccctatttcctcacaggaaaaataccagcgtgagcaggagaagctgagggaggagtggcagagagcccaacaggaggcggagagagagaattccaagtacctggatgaggtaccatgacgcacgccttgttcttattcttctctataccttgttggagaacctagcggaggacaccacaccccattttcctagacactctcacctctgtattgaattctagtatgttagaaatttgccttgctattttaacttttctcttgtatagcaccaagcagttattccttggaattttggagtagtctttctgctccaacttagacctcagtctttgttttttgtttgttttcttattttttgttttttgttttttttcgaggcagggtttctctgtgtagccctggctgtcctggaactcactctgtagaccaggctggccttgaactcagaaatccgcctgcctctgcctcccaagtgctgggatttttttttttttttttttaaggcactgtgactatctttttggctgcttaccattaatctcctctctgtacgaaatgatagagagacagatggtgacagtgacgtgtttgctttcttttatgggctgcctaggagctgatggtcctaaattccaacagcatttctctgacctcccgggagcctgtggccgccacctgggaagccacgtggagtgaagggtccaagtctctggacagcgaaggcacccgagcgggagaggaggacaggggacagctggaagacgatgctgtgtatgaggaccaaagtcagaagctgcaggaacttgagcaggagaagaaacggaaggagcaagaggctcaggaagaggagcgccgcaagcagcgggaggcccaggcctgggcagaggcagaagctaaggcttgggcggaggcccaggctcgggcagaggcagaagctaaggctcgggcggaggcccaggcccgggcagaggctgaggctcaaaaacgagctgaagctcagaagctccaggcagagagggaacgtgaaacgtccgtcaaaatataccagtaccgaaggtctgtgcccatagctcaaagagttgtcctcaatcaaggagtttcagcaactgtggctttgttttgtctaccctgtacgtcttgtctcctctgccatctttgctttgaccaagtgaaccaaataattcaacagagcctttgaaccacaaataccattgtgtctcttccattccctcagctcttgctggcttcccaacatcaaaactccttgccaaaaccggaaagctcacgcaagctgtcctggtcctttgaaggccttacccttggggctcttcccgggtttactgtctcccttgtttacttgtcttgtgtggaaattacagccctctgccttgggtttcagtatgttctgttacctcggaaaatgatttccctcacatatgtgtggccccccacgtatttgaggtacactgcctgacatcaccagcttagccttccagaatacctacttctgcctcctcaccatttctttctccaccttactagcctgggttattttcctcttggcctgcctaccccaggaagatgtattacaaagcagcaactcttgaaatatatttctgtagctctagattattaccagaacatgttgctcctacccaccccagtgtatacacgcacagtgaatgggtgagtggacgtgagattagcaaatgcctatagctctgttttctacagcagctgattgaaatgtgtttctagatcttaagccataaacgatttacctaaagagaccagaatgctattttgatattcctaaagtcagggaatgtcttaaattttgatattttaataataataataataataataataataaaacctcttgctctttaggcccattgattcctacgacctaccaaagagagaagacgacacttcagggatgcttccaactgacaggtgtggactatttccttttacctgggtggtcctagttggcttcagaggaatgttcgttcctcagttcacttagatgatttgtagagcaactatggccctctgtggactcctggaatattaggaaaccttgaagattgttctttgtattcgtttgtttttgctgtgtaacaattgcctttaaattttagcttcagattttgtgggtcagcattctgagctgagctcattcattaacttctgcccgcacgtctgctgtgagttcccagggagctagctctgctttggggaggtggtggaagtatctggggacatgagagcagcagtcttcagcatcctgtaagccagcgatatcctaatacgtggatggacagagaaggactaggaatgaggatagtctccaagacgccagagaacttacataggttagcagtcgctgagtctcaagatgagaagtctaggagtcagtcccctgtatcgattttcagaattcagactttcacgcctgtctagagtggaggtagtgaaacgttaactaagaaagcaatcaaaccaagacaaaccaaggaaaggacagaattatgattctagtcctctggagtcagaggaaggggcatctctgtacattcaaggctggcttaatctacatctctcttttcaaccttaactgggtttataatgcggtcatatatactatatactatatgataaatattactatatagaatatgaaaattatttatatatatatgtatatatatatatatatacatatatatatattgtagtatatactttagaggcattggggagtgtagcctaacatctggtggcaaatgttttcttgtaataccttgtaaatacaggtgtaactattgacagatctagctgtctggcagttactgcatcatatcatgctttataggtcactgcacagaatgtcgctatacatgatatgtacatctgtgtatgtatatatgtatatatatctgtatatggtatcattactatttctgaagttcacttagtttaggagaatgagaaaatgagcctgtgtacttttatagacctgaaagaaaataccatttttcagagtagcctgcatagttaggcattatgccttactatctgtttggaatgccaggagaacatctgacaaatggatggtgagagatctgtggccttctaatgccttagccactcacatcttgattctgggcagtataggcaaacctaggtctgagatctgtctggagcctgcatgggcagagctgcagggcactctccatcgtcttaggaaagagaggcatgtgaggatgtggagaaagtggaaaaggggctcatgcctttaattctagccctagagaggcagaggcaggaaggcctcggagtttgaggccagcctaggttacaggtctacacagtgaaaccttgtctcaaacaaacaaacaaacaagctaggaaatagcaaacagaaccaaaaccatcttttttgaatgaaaaacaatgttcttaataagacatatttaatatattctgttttaggagtaaatcaagatctactacggaactaaatgaccccctcatagagaaaaatggtaagtgtgatttttgtattcaaacttttctttttaaacacaattattcttttttgtgttgtcatatactatggttggtattttaaaaatatttttattggatattttctttatttacatttcaaatgttattcgctttcccagtttccccacttctatgagggtggtgttcctccacccacccacccactcccacctccacaccctcaattcccctacactggggcatctattgagccttcataggaccaagggcctctcctcccattgatgcctgacaaggccatcctctgctacatatgcagctggagccatgtgtactccttggttggtgacttagtctttgggagctctagggagtctggttggttgatattattggtcttcctatggggttgaaaccccttcaactcattcagtcccttctttaactcctccattgggggccctgtgctcagtccaatggctggctgcaagcattcgtctctgtatttgtaaggttctagctgggcctctcaggagacagctatatcaggctcctttcagcaagcatttcttggcatccacaatattgtcagggtttggtgacactgtataggatgaatccaatttcccttatgaacattgatgcaaaaatactcaataaaagtcttgccaaccaaatccaggaacacatcaaaaccatcattcattatgatcaggtaggcttcatcccagggatgcagggatggttcaatatatggaaatccataaacgtcatgaactacataaactcaaagaaaaaagccacatgatcatttcattagatcctgaaaaagcatttgacaaaattcagcatcccttcacgttaaaagtcttggaaagatcaggaattcaaggcccatacctaaacatagtaaaagcaatatacagcaaaccagtagtcaacatcaaaccaaatggagagaaacttgacgcaatcccacttaaatcagggactagacaaggctgcccactctctccctacctattcaatatagtacttgaagttctagatagagcaattagacaacaaaaggaggccaaagggatacaacttggaaaggaagaagtcagaatatcactatttgcagatgatatgatagtatatattagtgaccccaaaaattccaccagagaactcctaaacctgataaacagcttcaatgaagtagctggatataaaattaactcaaataaatcaatggcctttctctacacaaaggataaatggactgagaaagaaattagggaaacaatacccttcacaatagtcacaaattaataaaataccttggcgtgactctaactaaggaagtgaaagatctgtatgataagaacttcaagtctctgaagaaaaaatcaaagatctcagaagatggaaagatctcccacgctcatggattgtcaggattaatatagtaaaaatgactatcttaccaaaagcaatctacagattcaatgcaatccccatcaaaattccaactcaattcttcatagagttagaaagaacaaacatttggaatgacaaaaaacccagggtaacaaatactattccccaaaataaaagaacttatggttggtatttttaagtgcagggcactttagatacattaagattagatagctatcatgcttttctgagtatctgtgataaaataatgatcttctgtttattttggatttctgtttttgatatatatatatttttaaattttattctatgtgcattggtgtttgcctgcatgcttgtctgtgcatggatgtgggagccactggatctggacttacagacagttgcaaactaccatgtgggtactgggtattgaacccagctcctctggaagggcagccagtgctcttaaccactgagccatccctccagtcctattatagctttctttataatggaaagagttccgtattgggcatttgaataagtaaggaaatgtttgggggacttttcaaagaaaaaggtcatagctttgcatagtcgactttatcttacatctaaggaatgaggatagaaaatagtgtagaaaactttaagattatatataaatttgaaatcatgcatgtaaatggtgaaaggttggacaatctgaagtgatagagattttttattcctcgtttcacaaaaatcatttgaggcttggagcaggatataaaatatgggtctgcttaaaatatgactggaattatacaagtaaggaaaaagccctaagcaataagcatcatttgcacagagtttgcatagcagaatgcataagcaaattattagtttttgtacctgaggaaaggctcaggtggggcttgaggcagacagacaagcttcaacttcagcccatcactgacccacctataaagcaatgctagtctctaatgctagctatttctattttttaaaatgaagaagtgatagtctggatttcatgtgttatctttaaattgctgaggaggaatttttataagaaaggcctgggtagtctggtggcagctggtttgtgtctctggtcaaagctcttagagttagctgccactggggtaggtggcattattctcccctggttagtagactcttcaatggtcttggctctatttaacttgccagcattttggcaccactttccctttaggaaacagagctctaaattatcaggccctctcttaggttcttactcagcagatacttctaacgtggtctcctggtctgtgagtcttctcctatttggatttcctagctctttccccttgaacttggctccagctattgccaaaattacagattaagtacacttgtcctgtgtgacgtacttttagcctgtggtgtttatactctgcccagagtgagacctggttgacagtgcagcaccgtgcctgcctgaaacagctgctcattcttctggttttgtgtctcccctggatagtagttggtatgtgtttactttccttcagtagccccaggttcttgaattagcaaacattagaaattgttacatatttggcaagatgacttggttatgccattaatcaaatgaaactgttttatttaaatgaaaaatatttaatttgagcatgaacacattgatgttattaatatactaagtatgggtgtgtataaaaagttttttgtggctctattctttgcttacttggaggtacctagataagctaaatattatgaaagttgaggtaacaacggtgacttagagaagaaagttagttaaaattgccttatccaggctgaagcaaggatgacacccgcaggctgtatgtgttttacataaataggaaatttagtcaacagaccctggggctgaaagctgacataattatcactaatacacttagtagttatattacagttgtggaaatttcttagagcacaaataaacttgataacattatggatgactcttttcccctcaccagggctatgtcagtgactgaaagatccaatggcgcagtcctgacttattctgtgattcacactgtgaacgcttagccccgtgccaactagagatgtgtgcatttgtcttgtttctcgccacgcttggggctagggcagagaaaatgcatcggaaaattctgtttccctacagactcttcctagccgcgagtgcacttgattgaaagaagatgaacagtttgtagctgagcgtttttggggtctgtagggttttttttgtttgtttttgttttgttttgtttttgcaggcagccttgatggttttcttgtatgcatcccaatgggtgtactggaatttccactggttgctgtctgttctcctgcagacatctccctggagatggatggtgtcagctcatgtgactagtgatgggtctgaagttgcactgtcttgggaggctgatctgctgccatttcttgtatacttacaccgaagcttttggtatgttattcatttaggaagcagcaaatattcagagagaattggggccactagcttttcacataggagttctaagaaggatcaagccccctcagaagcagagttggagagacagcaaatccttcaggaaatgaggaagagaacatctctccacaatgacaacagctggatccgacagcgcagcgccagtgtgaacaaggagcccatctgcctgcctgggatcatgaggaggtgagacagttccccatcgcttcctcttccctgtgacgcaaaggtctcatttgtagggccccctcccttagagagagagagaggctgagagagtctgggagtggggggaggtcattgagtgctattttgtgtgtcataatgagttgttgtgtctaaactgtctcatttaagctgacggcaagcaatgttttcaagtagacacagttactcttgtttttctctgtgaagaaactggttgaggcagagaaaccagctgggcaagatctcattaggaggaggttctaaatccaaatgttgggttttgcaatgggatacagataattgaatacacttttgactcctgcatattaaacttgaagagaatgaaacctacttatattcataatgagattaatggttaggttggaatcatgataattgggttcacaaaattgtatgaaaacataattttgtgactttttagatggtaactgtgtagatatgaattaggtaaggatgggcatttggagaggtctgtcctggcaaacaatcctgcagttactctgttgggtgttctatcagctaagcatggagacttacttgtaacctgtgtcagctacagaactaattgtctcgctatacaaataactcatttaaaacccacaaggcaatcctagtaacttcctctacgtttgtatctacatctgtctgtctctttgtctgtagctaaactgcacaagctgtgtgatagatagttcatgggaaccagaaacaaaaccagtacatacgtaaaaatcatcaccactgtcagacggcagcctgtcttcctgcgtcgaaagtgtgtacagcattaagacattgatttaaactggtgctggcaacgcataagaaaataggaattctcttttccaacagcttcaatcaattttttgtggtgaattaaaccaagtatacacttctttaccagggtgctatcttctggattctgttaaattaagcaagcatacaaagatagaggcaaggacacacactattggcaatggtgaaaaaaaaaaaaaaaaccaaagcagaaaatttaaaccacctcatccacaaaacacaatattattcttaaaggtgcacctagttaatagcggcacagcagttagaatgctgtacaagtattaaaaggtgcacggtgcactgtgtgcagtcagcacctcaggagataaggaagaaagggtccagtactcttgtgctttcgggatggagtgcatgctgtatgttttttcctcatttaggcaagcacaccaaatttaaaataactcctctcccgtgtgtgagggttgtctggtctgttctttgcctggtgttggcttcggcacttgagcagccatggatctggagttggcgattcctttttttcttttaaataaaagagatagtaacggtctggcagcccctccgccatgtattcattgtttctttaatgactctgagcatgtaaaatgcccatgagttccgcatgtcttagcaatggcctttctgaagagatccctcctgggctcagccagggctcttgaattgtaattcccttcccacacagctgctggagctacctcatggtgcagcactaacattcaaagaggaagctttcagaagacagttccagacgtgaaaatgcttatcgctctccatgcatatcacatttgccggtgccctatgctgtaaaatagccacatggtcaaccccagggtcagtgggcgggcactgaacaggagagcagacacacaaaaaaatgaatggttctatgggaagcattggcttacaggctatcacgtgatgaggcttttacggttgtaaaagaataaaaaccatattgttcccattttgaggacttctatagacgcctgtagtaacttacatatgcaaatttgtatgtatgtgtaattatttccttgcatatctgagaaaaacctgtaaggagtcacaattaagggttgctgctttggaggattagggcgaatgtagaaagtaagggaagaaggaacccttgtccacccccagaagacccttgcttgcttcttgacctattccctatggaatttatattgtaatgttgcattacttacaatgttaagtagaaaagaaaagaaggaaagagaagagaagaggaaagaccaaaacaattattatttaagcttctggctggaagaaagatttaaatgcactaataaactcaacagctagagaagcattcatcattcagcttttgtagaaaatctaaatcctgaatgcagggtggcttctgtttcctgtaacgtagacactgaacagttgctgacccattggacttggggtggcgaatgggagtgtccgaagcaggcctgggttgcactggggtcaggggactttggtttgaagccagagcctcatccatacactccaggcttggacaatgtaactcctatgagattaaaaacatccttgtataatgttgtgaagattaagttaaatatgtctgtgaaaatgtatagttcaatacttatgtgcttaaaattttctgattggattttaaaagactgaggcttatatgttgtaactgtttaagggatgagtgactgctagtattagcttttctttaagaagtagttttctccccactttgatacttggtctttttgtctaaggacctctacaatgaaggttaccgaaatatgagatgttacagtacctctggtgcagaacaatttattgttaagggtatacataactggaaccagcttagttgagcctagaaaatgcataaaggaggtcttacattcaccccaatggtgcatctgttaggcaagttccagcagtgtaacgtgactcatgtcactcctgtgacccctgccctgtgtttcagaggggagtctctggacaatctggattcccagcggccgggttcttggaggcagtccccttggcacagccagcctgccggggtctatgcgtcttcctctgtccaggacttcagtcgccccccacctcagctgttgtctacatcaaaccgtgcctacatgcggaacccatcctctgcggtgccacctccagccggctctgtgaagacctccccagggtctccctctccacgcagccattccccttccatgtcacagtcaggctctcagctacggaataggtaaggccccttgtgtggtccctttgtcttaattttaagggtgttccttctttaaaatcatccagtaaagaagaaaagcaagtccttttgagtgcatggaattgggtgttcctgtatcaaagctgttgagaaggctttctcctgcctctgtctgccgcctgcctagtgtttacaaatgtctggtaaaggcactggagat

SEQ ID NO: 538 - DNA, 3807 bp, Mus musculus
acatggaagggatggaggacgccgaggccgattgctctgttgcattcgcagaggctcagagatgggtggaggctgtaactgagaagaattttgaaacaacggattttcgagcctctctagaaaatggtgttctgttgtgcgacttgattaataagctcaaacctggcgtcgttaagaagatcaatagactgtctaccccaatagcaggtttggataacataaatgtttttttgagagcttgtgaacagattggattgaaagaagcccagctttttcatccgggggatctacaggacttatcaaaccgagtcaccgtcaagcaagaagagactgacaggagactgaaaaatgttttgataactttgtactggctgggaagaaaagcacaaagtaacccctactataatggtccctatctcaatttgaaagcttttgagactcttttagggcaagctttgactaaggcacttgaagattccagctgcctgaaaagaagtggccgggacagtggctacggggacatctggtgtcctgacagaggagaatttcctgcccctccaggtagccacagaagggaagattcctttgagagcttggactcgctggggtccagatctctgaccagctgttcctcagacttcactctgagagttgggaaggaaggttgcgaaagtgacatcgattgggaatttacattcaaaatgcaggattacaacaaagatgatatgtcctaccgaaggatttcagccattgagccaaagtcagctctcccgttcaatcgtttcttgccgaacaaaagcaagcagccgtcctatgtgccagcacctttgaggaagaagaggccagacaaacacgaggataacaggaggagctgggcaagcccggtctacacagaaacagacggaacattttcaagtcagtttttattgcttcaggccctccaaacctactctgatgacatcttgtcctcggaaacaagtgtcaaactcgatcctacctctggccccaggctcataactcgcaggaagaatcgctctcccgcaccaggctatcgagcccatgaccttgagctgccagccctagatcccgacttagaaaatgatgatttctttgtcagaaaaacaggggctttccatgcaaatccgtgtgtccttcgagcctttgaagactttagaagtttctcggagccagacgatgccgtggaacgagatataattttgcagtgtcgggaaggtgaactcgtacttccagatttagaaaaggatgatatgattgtccgcaggattccagctcagaagaaagaagtgcccctttctggggccccggataggtaccagccagtccctttccctgaaccctggaccctacctccagaaatccaagcgaagtttctctctgtgctcgaaaggacacgcccacccaaagaacaaagcagcggctgtagagtgttagtcccttcctatcgacagaagaaagacgacatgttggctcgcaagatccagtcttggaagctggggactgctgtacctcccatcagtttcaagcctggcccctgcagcgaggccgacctgcagaagtgggaggccatctgggaggccagcaggcttaggcacaggaagcggctgatggttgagagactctttcaaaagatctatggtgagaatgggagcaagtccatgagcgatgtcagcgcagaggatgttcagaacctgcgtcaggtgcgctacgaggagatgcagaaaataaaatcccagctgaaagaacaagatcagaaatggcaggatgaccttgcaaaatggaaaaaccgccggaagagttacacttcagatctgcagaagaaaaaggaagagagggaagagattgagaagcaggcactggagaagtctgaccgcagctccaagacatttagggaaatgctgcaggacagggaatctcgaggttctacagttacgtcttggaggaggacctattcctctgatgacatcctcgatgatggagtgctccctcctacagtgactctgtcagaaactagttaccagagcgagagactagaagatgaggcaagagcgcatcctgctgagatgcccaaagaagattccacaacatttgcaaatagagaggacagtgtagtagctgagactcagcttgcttctcacagtcctgaagagcaacgtctggccccttctccttctgaggaaccgcgccaggcctctggatcttctgcagaaccgcaccaggccccgttgctgtccacagaaccacgccggacccctttgccttccgaggaaccacaccaggcctctctatcttctacactacagcgtccatcctcactctcttctcagcagtcatggagtacaagagcagagtccactcggatttcagcttctctccctagaagttaccagagaaccgatacagccaggttaacatctgtggtcacagcgagaccttttggcacatcttcaaggggaatctcctcactgcccagatcctacacgatggatgatggctggaaatacaacggagatgttgaagttgtcaagagagagcaactcgatttgggcagagccactggcccgaagcctgactccagccactttatttcgggctcagccagtgagaaggaggtcatagccacagaagatgtggcaagcttgtcctctcccacactcccttcctcatctctctcccacgaccgggcagtctcttccaaagccacgttctcatcaatgtctggtttggattcagtgtctgactctggagaaggaagaggctcaccattgagggaagtttccaggtccctggatcagttcagcgatatgagagtcagcataaaccagacgcccgggaacaaacctgtctttgggtttacgataaaatgggatatttctgggatcttcgtagcatcagtcgaacaaggtagcccagcagaattttctcagctgcaggtagatgatgaaattcttgccatcaataacaccaagttttcatataaggatacaaaaaagtgggaggaagttatggcaaacgcccaagaaactggaaacttagtgatggacgtccggcgttacggaaagtctgactggggcaaagaccaaccttccctgccatttatacggcataaaaccctcaatcttaccagtgtggctaccaaaattataggttcatctgaaacaaagtggatcgatacaacatcaggaatttacaactcagacaagtcttcaagtttatcagtcacaactgatttctctgaaagccttcagagtcctgaaaaataccagcgtgagcaggagaagctgagggaggagtggcagagagcccaacaggaggcggagagagagaattccaagtacctggatgaggagctgatggtcctaaattccaacagcatttctctgacctcccgggagcctgtggccgccacctgggaagccacgtggagtgaagggtccaagtctctggacagcgaaggcacccgagcgggagaggaggacaggggacagctggaagacgatgctgtgtatgaggaccaaagtcagaagctgcaggaacttgagcaggagaagaaacggaaggagcaagaggctcaggaagaggagcgccgcaagcagcgggaggcccaggcctgggcagaggcagaagctaaggcttgggcggaggcccaggctcgggcagaggcagaagctaaggctcgggcggaggcccaggcccgggcagaggctgaggctcaaaaacgagctgaagctcagaagctccaggcagagagggaacgtgaaacgtccgtcaaaatataccagtaccgaa

SEQ ID NO: 539 - protein, 1263 aa, Mus musculus
  VARIANT (1)...(1263): Xaa = Any Amino Acid
MEGMEDAEADCSVAFAEAQRWVEAVTEKNFETTDFRASLENGVLLCDLINKLKPGVVKKINRLSTPIAGLDNINVFLRACEQIGLKEAQLFHPGDLQDLSNRVTVKQEETDRRLKNVLITLYWLGRKAQSNPYYNGPYLNLKAFETLLGQALTKALEDSSCLKRSGRDSGYGDIWCPDRGEFPAPPGSHRREDSFESLDSLGSRSLTSCSSDFTLRVGKEGCESDIDWEFTFKMQDYNKDDMSYRRISAIEPKSALPFNRFLPNKSKQPSYVPAPLRKKRPDKHEDNRRSWDVYTETDGTFSSQFLLLQALQTYSDDILSSETSVKLDPTSGPRLITRRKNRSPAPGYRAHDLELPALDPDLENDDFFVRKTGAFHANPCVLRAFEDFRSFSEPDDAVERDIILQCREGELVLPDLEKDDMIVRRIPAQKKEVPLSGAPDRYQPVPFPEPWTLPPEIQAKFLSVLERWPKEQSSGCRVLVPSYRQKKDDMLARKIQSWKLGTAVPPISFKPGPCSEADLQKWEAIWEASRLRHRKRLMVERLFQKIYGENGSKSMSDVSAEDVQNLRQVRYEEMQKIKSQLKEQDQKWQDDLAKWKNRRKSYTSDLQKKKEEREEIEKQALEKSDRSSKTFREMLQDRESRGSTVTSWRRTYSSDDILDDGVLPPTVTLSETSYQSLEDEARAHPAEMPKEDSTTFANREDSVVAETQLASHSPEEQRLAPSPSEEPRQASGSSAEPHQAPLLSTEPRRTPLPSEEPHQASLSSTLQRPSSLSSQQSWSTRAESTRISASLPRSYQRTDTARLTSVVTARPFGTSSRGISSLPRSYTMDDGWKYNGDVEVVKREQLDLGRATGPKPDSSHFISGSASEKEVIATEDVASLSSPTLPSSSLSHDRAVSSKATFSSMSGLDSVSDSGEGRGSPLREVSRSLDQFSDMRVSINQTPGNKPVFGFTIKWDISGIFVASVEQGSPAEFSQLQVDDEILAINNTKFSYKDTKKWEEVMANAQETGNLVMDVRRYGKSDWGKDQPSLPFIRHKTLNLTSVATKIIGSSETKWIDTTSGIYNSDKSSSLSVTTDFSESLQSPEKYQREQEKLREEWQRAQQEAERENSKYLDEELMVLNSNSISLTSREPVAATWEATWSEGSKSLDSEGTRAGEEDRGQLEDDAVYEDQSQKLQELEQEKKRKEQEAQEEERRKQREAQAWAEAEAKAWAEAQARAEAEAKARAEAQARAEAEAQKRAEAQKLQAERERETSVKIYQYRX

SEQ ID NO: 540 - DNA, 79084 bp, Homo sapiens
cttgctttattgcccaggctggaatgcagtggtgcagtcatggctcactgcagcctcaaactcctgagctcaagctgtactcccacttcagcctcccaagtagctaggactacaggtgcatgccaccgcacctggataataattttattttttttggtagagagacagggtctgactatgttgcccaggctggtctctaactcctggtctcaaggagttgagccctgccttggcctcccaaagtgctgggattagaggcatgaaccaccactggccggggattttcttaaaatgcagagtgtggttcagtaggtctggggtgtagctagagattctgaatttttggcaggctcccaggtgaccctgatgctgatggtctgtggccacgctttgtgtagcaagtgactgggtcagtggtcctccattttgactgtgcatcagttgcatctgagggatggctgtgtgactccctctcatgagtttgactggggtcccatgtctataaatcataatgctaagatatggacttagctgaatttctctgcttcaagtaatagttatctcttgattgctggcacatacttgctaacatttttggcactgtcaattgcagggttagaggaggcagggactttgccagattataaatagaaaggagtcgaggtcacctagtatcttgtctttaggataaattgatcagcatcatcatgtactcagctcttttttcagctctttttttttttttttttttttttttttgagacagagcctcgctctgtcgcccaggctggagttcagcggcgtgatctcggctcactgcaagctccacctcccaggttcacaccattctcctgcctcagcctcccgaatagctgggactacaggtgcctgccaccaggcctggctaattatttgtatttttagtagagacagggtttcaccatgttagttaggatggtttcgatctcctgaccttgtgatctgtcccgctcagcctcccaaagtgcagggattacaggcatgagccaccgcacctgaccagctcttttttaaattgaaaacttgtttaaagtaggcaagaaccctttctgggaataccaggccaaagtaatcatgacaagagtatttggttaattgacagggaacacttccaggtggtgtcgttctgggagccttggtttaagctttgtaaggcctttaggtcacagccctgagaacaacttcactcattttcagaattaggattttgatcttatttaggacttttgtaataaatccttttattaaccttgtctctatttttacactgtttataaaagtgtcttttcacttttgcttataatgacagctcttgaccctgtacactcaggaagtttttgcagtagtgggtctaactggcttgatcttatgagtagacatttctgtattgctacattaaggttccctgatgcagagtattccctttatatttgggaggttgtcatgcttgaaattttatcaaatatatattttttgatccttcaagtaaaagtgaaagtgactttgggtagggtaagagcctagggtgttgtagtacattttcatgaggatttagacttttgcataatgaaatgattcaatgtataagagaaatctggagcataatgacatttatgtaaattagactctctctctatatatgcaacagcacttgttaaagaacattttattttattttattattattttttttgacagagtctccctctgtcacccaggctggagtgcaatggcgtgatcttggctcactgcaacctctgcctcccaagttcagcaattatcctgcctcagcctcccaagtagctggaattacaggcgcccgccactatgcccagctaatttttgtatttttagtagagacggggtttcaccatgagttattcaggctggtctcgaactcctgacctcaggtgatccacccacctcagcctcccacagtgctgggattacaggcatgagccactgcacccggccaaagaacatttaaaaaaatttatattcatggggcacaagtacaattttcctaccttaatatattacactgtggtgaagtaggggccttcagtgcattcatcactggaacattgcacattgtatccaccaagcagcctcccatcatccacccccttcccatccccacaatgctgtgagtccccattgtccatcattcacactctacttccatttgtatacattatttggctcccacttatgagaacatgtagtatttgtctttctgcatctgagttgtttcgcttaagataatggcctccagttccatttgtattagtgcaaaagacatgatttcattttttaatggctgaatagtattccattgtggatgtataccacattttatttatccagtccttcattgatggacacttaggttgattccatatctttgctattgtgaatagtgctgcagaaaacatacaagtgcaggcatctctttgatgtaatgatttctttttccttgggtagatgtcaagtagtgggattgctggatcatatggtagttctatttttagttctttgacagatctccacactgttttccatagagactgcactaatttacattcccaccagcagtgtataagcattcctgtttctctgcattttctccaacatctgtcattttctgtctttttaataatagtcattctgattggagtaaaatgatatagtggttttaatttgcatttctctgactagtaatgttgaacattttttcatatttttgttggccatttgtcttccattgaaaaaggtttattcatatccttggcccactttttaatgggtttagttggacttttgttgttccttataaattctggatatcagtctgctgttggatgtatatagtttgcaaatattttctcccattccacaggtgaccttttcactttgttgattatttcttttgctgtgcagaagccttttagtttaaatcccgtttgtctattcttgtttttgttgcccgtgcttttgaggtctcagtcatacattctttgcctagactagtgatatggtttggctgtgtcctcacccaaatctcatcttgaattgtagttcccataatccccaggtgtcgtgggaaggacctggtgggaggtaattgaatcatgggggttgtttcccccatgctattcttgtgctagtgagtgagttctcacaagatctgatggttttataaggggctcttccccttttgctcagcacttctccttccttctgccatgtgaagaaggaggtgtttgcttccctctccacaatgattttaagtttcctgaggcctctccagtcctgtggaactgtgagtcaattaaacctcttttcttataaattacccagtcttgagcagttctttatagcagcatgagaatgaactaatacaactagacatttatatttttaaacacattaaagaaggcatctttaaaaaataatttgagacaggtacactaaaatcccaggcttcagcactatatagttcacctgtgtaaccaaaaaccacttgtatccctaaagctattgacattaaaaaattaaaaaataatttgaggtgaaattcacataacataaagtattaaaaccattaaaaaccattttaaagtacacaatttagtagcatctattacattcacaatgttgtgcaaccattaaacatttctaatatttcaaagtaaaacctcttaacatcaagtggtttctccccatttcctcctcctccattcagcttctggcaactaccaacctgcatttcgtctctggatttatccattctggatattttatacaaatggaatacgtgacttttgttttctggcttctttcacttactgtaatgttttgtagcacatatcagtacttcattcctttttatggctgagtgctattccattgtatggatagaccacaacatgtttatccatttacctcttagcagacatcagaacggtttgtaccttttgatatgtacatgcacatgcatgtacatgtaatgtacttatttgggaatctttttaattctttgggatatatataggatatatacctgggggaaggcatctttttaatagaaaggaatgggagtgagtgggaatgtgggatgaggaggaaaataattaaaataacaaaataaaatgagagagcccttatactgactgataagagcttgcttaaataggaatgatgaattcaactttgggtcctgacatttcttcccaagcacttacattactgatgaaagagcaaggacatgtgctataatgatatgaaaatatgttacttgataaatgcttttggaaggaaaatgggttgaaaggctctgaaaggtgaggtgttaacaaagtcctgtcttacccttgacaccagtgtgagaatattcatattggccttatgctattctcattaacactcttttcaggatttataatggaaatagagaagagttaagattccattgaagtgtataattgtgtttgttgcaaactcaaaatattgggtggaggtggaatgtaaccctacatttggggtcaagagaataagaatgagcactgcttctctccccaccttttccctcaagggatgaggcattccaacactgaagggtcaggggagtggtagctttggcaggactgataggaggcttgagtaggagacagacttgcagagtgaaagaccaaggaggtctttcagattctgggtggtccctcacctgttgccagcggctggtcttcactgccgcttattatttactcatgagtcttctggagtttttgcccatgaaatgtccactttatttgattttcaaattctttgggtagtttttcttatggcgtcatctgcctctctattcctgaaagaaatctcttgttgttttctctcccttgttttccataatggtattctcttcccttgttttccgtatgctattctcttctgcttttcttctgatttatctggatgccaggtatttttctctcttgactcctctttctttaactgtcctttaaatgctggtggttgactgtgaatccttctttctctttgctatcagggcaaggagggcacattgacatccctaatttcaatgactaccaatgtgtgctagactcccaaaccatattttaaaatcaaatgtttctcatgggctgcaaacctaacttactactagctgggcatctgaaactcaacatttctaaacgtttatttttctattctaaatttttgactggtctgtattctttattattaaaatcttgtggtagccagcttccaaaatggtcccagtgattctcactttgtgatattctcttccttgtacctaggaattctacccaattaactaagtgatctactggggagattccattcttctagtgaggtgacctacagagtgttgaagtgatgcctcgattcttcttgtggattatagtaaaatgtgagaggagaaagtgaagaatagagtgacaaacatgagagaaacaggaattgctgcttttgaaaattgtcagtctctttagtaagtaaatgatgctagaactgagatgtggttttcaggcatagattaaattcagagcatttgcaggaaaataaggcctaaaaaggagttgaggatgtggttgtaaaattctttaagttcttagattcaagacggtaccttgcagatctgtcgagtcaagcaatagggcttctaagcaccttaaggatattgtcctccagtcatctcagcaagagaccaaggtagagaagagctactcttgaagagattgatgggtgcatcttttgtctaatggaatgaaccccaataagattcacagaagatctgtagtatctttgagataattgtatttgcagaaacactgccagctgagactgaaaggaatagagaatcatgaaattaagagacccttaattctctcaattgctatgggtagggtaaagaagtagattgaaaaacctacatagccacaaagataggctacttttcagtgaaaagcaaagatgacttttagggtggcaccaagaatccagagggtgtagccaaaaaccatgaagtattacctggccttgagtcttcatgaaggaactgccaacctgtgtcttgaaggatttcagaatttctgtggaccagtgactcctgtgttgcctttcatttctctactctctgacctagagtgtctatagtgattatcttaacacctgtcactctattgcatgttgggagtgtgggagcaggtaacttgtcttagttcactgacattcaagttgagaggaactttacttaagggccatacttaaggaattacacctgaagagcctcagacactcctggatctgacttagatgatgagattttggactttgagttcaccttgtaaagggatgaatattttggggccttattagggagtaagtgtattttgcacatggttgggacatgaatcactgaggtgggtccagagagtgaaatgtagtagacagtcccccagaaagccctccatgattctcacctcctggtgtttatgttcttttgtacctacatggaatagggctgatctgtgtaaccaacaggatgttgaggaaatgatggaatgtgacttcaaaagctatgtcataagacattgcaacttccatcttgctccttggatcacgggctctatcaagcagccctttggagatgtccatttggtaaagaaccaaggcttcctgttaacaatcagccctgatttgtcagccacatgagtgagccgccttggaaacagctcctccaagctccaggaaagccttgggatgactgtagtcatggctgacatctcaattacaacctaatgaagggtcccccaattcagaactattcagctaaggccactcctgaattaccttcagaaactaaatgaaatcataaacacctattcccttaagctgcttaatttggggataatgtattatgcaccaatagataactaatagggtactacagtgaacaaatacaaaccttgattatcttggtagatctttgtggcttccccatcctacctcagtggtaagaactgctgttcctgatcattaagctctctaagttaccctagcccactccaccccacacctgttatggctgctttataattgattcaaggataaggggtggaagggagattggagacaatatgaaaatcttaaagccatgtgtctgttcttgcctgcctctcaaagggccaattttagaacctttaatttgtagtgtctccctttattcatagtcatagaaaaatttaaagcttaaaggagctattagatacatttagggctcattgtttctgtgtgtgtgtgtgtgtgtgtgtgtgtgtatgttggtttgtctttgagaagccacttttggtcctgaaagtacagggtttacagatgtttagagcaggattttgacatgaagtattttatggaagttgggtaatgaaatatttgtgtgatgggttgggccagggagggttgggctcctcttcttttgcagagaaaaatgattgcccttgataatgggttacagattcacaaactgctcatttcagggatgaggaaaatggggccagaaatgttaactctctttccaaagccacacagttgtttagggacaaagttaacttggagtcctggtgactagtccaattagataagattagttttaatttgtcctttattttcccttttatttttgctaatttcaagtgaaaattatttcattaaacaactaaatacttcccttttaatgtgttgagctgggtgtggcttcttgaagttttaactgtcatgaaaattttattttataattttatatatacccttagggacctctttgcctgcatcctttgaaattgcaaggaataaattaccagtgagctcaaatccagtaggaatgactgagactacattaccaatcttagtacaacctcgtcctgctgcataggccatgtgtgactttgtttacaaagttgtactgtgttaaacttgagcatcgttgaatgatttaaaagatattctgctgttttggttaaaataaagtctttatttaaggctagaatttagccatattaatttgtatcttctcttgaactttgtcttcaactaagtatagtcactttagatgtcaagttctttctctctactttggtggtttttgaggagagtttggctttatttatctatccttatcaatctgtacctatttgtcaactagatgaatgctattatgtttgtatgaaatatgtgaagaatcattttggctctcatttgagtaagtttacttttagtttaaccttattttaatatttttgtaatactttaaacattcagaaccaaatcaaattggttgaattggtgtgaagacttctaatggtttgtttttcctttattgatatgagacttgcatcctgtgtgtattagttcattttcacactgctgtaaagaactgcctgagactgggtaatttacaaagcaaagagatttaaatgactcacagatctgcatggctgggaaggcctcagagagcttacagtcatgggggaaggggaggcagacatgtcttacatggtgacaggtgagagagagcgaagggggaagagctccttataaaaccaccagatctcttgagaactcactcactatcacgagaacagcatgggggaaactgcccccatgatccaatcgcctctctcccttggcatgcagggattacaggtccttcattgacaagtgaggattacaatttcagatgagaattgggtggggacacacagccaaaccatatcattatggaacttggggtattggtacatccaaccatcttttcttgcctgcttctcagagggccaattttaaaaccattaatttgtatcatttgataattacagatagtatactttttagaaactatgggcctaacaaaattatcacattttgctcctcttggaattttgccaataaattgtgtctcctttttccataataagtcaaatgaaaaacaaaataaacacctttcattgagctgttcaacttttgacttgcaagtttctttactctttgacttcatcttatttaaaacgattcgtggatttcatctttcagctaggtagttcgcactgccttttactcacagtagattggaatgaccaggatcctgcctgtacaaatagtgactttttagaatgtctctttccttagtaatcagtggcgcttttctcttgccacacctttccttgtgctttcccggaatccccttactctccaagaacccaagctgtagaatttagccactttatcttaggaaaagagtaattgcctttctccaagtggcagactatcttctggtctgtgaaagtcgcctcttagggagggaggtgaggtttcaaggaggctcacgccatagaggcagcattaccagctgcctcagtggacagatgtgtgttggcatgctgggaggccacccctttaccagcgaactgtaacagttaatatggagaacccgcctgggattgtcacaagttcaaccccataaagtgttttcttttcttcttcttttttttttttagagtagtagagatgaagcctaagttaattctggtaaccaaatgtatgtctctgaaatgtggctggctttaaaatagcatatactgtaatctgtgtttgcacagcagtttacattaacgaagagcactggtttgtgaatggaggatttgggttttgaaattagatatgagggcaaccttggagggaggggataggctttcatatttttggaggcagctcttgaggcaggtgcagggagtgagtaatgtgccacacaaactatgcaatttagccaatgaacactaggtttctcctcagtcctatagtatggtttccctgcctgtcaagagccagctcaacaaccaaacccagattccaggtgtggtattccacagtcgttctgtaatttgtaatcatagaaacagaatgttcctcctcttatttcttccctgccaacagtttctgggtgggtgaatgtcagtagctggagttatttttaaagaggagaggtgaggcttgccgtgcaaagctggaaagagggcgtttgtttgcagagcagagctgacatcaaagtgtagattactgctcagtggctaggcacttgtcctgtaacaggtaatgtttaacgtgccagtcacaaagatcacagaaacagtgtatgcccgggcataagatagcacgactgtgtatgctctggaggactgaaaggctgtacaagccctatgtattttttttcaaatatacatatgcatgggtcttgctgctgcctcttttgctgactgtaattggactttgaagcttcgaagttatatcataaaaatttgtaacctttgtctgagagagagctcagctaagcaatcactttccacttcttttcacaggataatataaacgttttcttgaaagcttgtgaacagattggattgaaagaagcccagcttttccatcctggagatctacaggatttatcaaatcgagtcactgtcaagtaagtttcaacagtttgttagatatatatatatatttaaacttagggcttgtagcttaagtgaaaagaattgctgagagttcatgattacagaaaaattcttctgttctctctgttttcctctgttctcattctaaaagagactgttttaaaaatggcttagggactgtgaaggtgaagctgtttgtaactcataacatagcatagtcttactataaatctctataccgacaaaaatggtagtgttaatattttaatgtgtgtccaacatggtagtgtttggttgctaatgttgaggatactcataaagtgaatttaggggttatattatagcttgcagagtaacaacaatctttaaatttttttatatatttggaattaagacataattattagcataaaaattagataggacagtagtaaaaaagaatctcttaatattgtgaaggcagcagcgcctgggaccaacatgtaatgccaaggaccttgtcagttgtggctgacttttaaaaatgagctgtttttcacgattttaatagtgtggatgagaaagtgaaagtgggggtgagaacacgtatgccagtatctgttagatttttggtgaaaaatggtgtttgtgtgggagtatacagtttcaggaaatctggttttaagctcttatgatatttatttatatttcctataaatctaatttgcttccaggcaatcaataatcatgttactagataaaggtgacaggaaaattatttaattttataataactatctctttgtcatcctgcctcttaaacctaattaacatttttgcaagggagaaaataaacaccttattctatctatagaaataatgaaaatggaaaaatctgtttctaccagttcaaagatttaacttatgtggttaatatccctgtgtaaaacctttaatagttatttttaaaattggatgaccaattattttttctgaagaaaaataaccagctatgtaagtatctttgatagtacacattgtcttccagcagtacacagaacagccccaaatccaggtagacttagtcttccaaagtctaacaatatatgtttttaaatgaacactgttttgaacctgcttctagttctgttgaataagcttttctaaactccatggtaattaaatgtacgtgggagggataaatctgcctgcatttctgactaatcgaaagatagtttagagattctaaatttcatcaccaaagtgaaatgtttgcttctgtagtatgtaggggtcatgtttactttccataaaaattaaatatttgggtgtatttgttttatttttccttatcaacatatttcttcataaggcctatctgatgggcaaagaaactttagactttgaaagtcttttccttaagttgttgatgcttgttaagcgttaacgtgcttccccctaaaataatatactctgttttgaaagtctgtagcctatatttgagtaggctaaagactaggtgaaacatgtttgttggctcccaagtccaagagttcttgcctggagcctgtttcatgagatgttgggcctaaaatgtttcagacaaattagtatctgggctctgccttcagtgaaattactgacaaactgaaactgcgaggtcacgtagttatagctgtagtgagaagcatgcagaacaacttgtttcagtggaaaccacaagttcgtcaaagcaaggtgtgcctaagtagtacctgtgagaatgcctgagtgggaaccttgacttcacttaagaacatttctcctgataattctatctcattggaccaaaaagcaaaggggttgaccctgggtatgctgcagtggaagcactggagcctcccagatgagacacaggaaagtggcaagcaactttttaaaaaatgttgtccaagttcttatgccctgagatagcacttttagtaaaggaagcagatttaaagaaaagcaaataattgctcactaaatagtaatgcattttagctttttaaaaatatataatgtggagactcctttgggtcaaaattcttgtcctgtcattattgtagatcaaaggacttagtgttggttagatcagtggttctcaactgggggcagttttgccaaccaggggatgtttggccacttccggagatacttccagttgtcatagctgggtgagtgtgctacaggcatctaatgggtcagggatgctgctgaatacactttaatgcacgggatagcctccacaacaaagaattttcctactccaaatattaatagtactggagttgagaaactctagctttagatttagaatttcttgtttattccctccctgccagcaaaatagtcatgtggaaatgaaggatactgactatgacacctttgacactctactaaaatataacttttatatacagacataatttatgcatttctgtgttagtatgtttattgtctgtttaaatgggaaggtgcattgtaacttgtctgagagtgtggtaatatgtgtgagtactttgaaattattttgcatatctgtatgcattaaatttaacaaggtgtagcaaatgatttgattatttaaaatgctgtattataactgcccagactgcatctaccggtgcatagacttgttgttggccttgctgcaaactcaatctaatcatgacgcatactgagagcaaataggaaaggacagtcgatatcctctgtgctggcaaatgaggggaacttttttgttagtgggcagtggtgatagttgctgtatggagcccaagcagagttgtgtatgttgaaaatgagtggcaatagcagaagcaagtaaagagctgttgttaatgaatagtttcaataatccaggactccaactgtttttcagttttctagctatctgaagtttacaatttaattcacagtaataacttttcaccaatcagacagagctagagtattctttatatttctgtaaattatcctcttatgtgttctaattttctaataattattttactttgtaggaagcagtagttttaattttttcaagtgtgtttgaattattctatttatttagggactacatgtattcaagcatcaggtgacacctttaattttgatattcctgacttaatgggtaggatccaacctcttttcttctcaaaatgctaataagcaaatttatgatttagtctccatgaatggtagattgagatctaccccgatctgaggccatgaaatcaatcttttgtgtggatgaaaaactggatcatcattcttaaccatttactaaacatccatactgagcacatactctccacaaagaaaacgtggtgaagttcccacagagccatctgtgcaggccttccataaaagggctgtaggagatcaagcataatggccccaccagcctgccacagcacactggagagctcctctggcaagcgtcatggtctttgtggtggcatctggtcattaggagaggtacagatcaatggcttgtagtagaaagcaacttgacagagtagcctagaggtcctgtattggagaacttgaagttggcagaaaggtagggtttaaccattaaaggttttaacttgggcaatttgactcagaaactaagtcttgtatttaaaccattgctctatatatcaaaaattttaagctgagaaattgaacagattgtaaacatgtttcttctttccacccccttaccattccaatccagtttttggcaagtcttcagatacattctgttgataatatcattacagagtggcaatgactttgaacactgcttgtcatgcaaagaaattcttttctagtgtagacttactctattatctagagtattgatattttaagtataaagtataactttaagtaaacattgatattaacggagtttgtttttttaagtcgattaaaatgaaagtacagatattaaaaatctattctctttacacatgctagttgccaaaggaacagtagttggaatgaaaattagtgttaacatattcccatcaggaaaataaaagagtctcaaaatgatattttaaggatgtaactgttcgctaaagcttcacaagagtgcttgattttgtggtagtgctctgaagtcatttcttaggaatcaggttcccagatggcactctgttttaacagtctgccaaattgggcttgaggtatgtaagtgtatatgtgtatttaaggtttattcatataagtaaaatatacctagtttgaattatttaatttctgctttttaaaataatttaaacctagttttactttttttttttttgcaagtacatgtctttcaaatgagtttctcaacatcttcatcttttttttttttttttaagcaagcttaacgatatccaaacttggatctgcaacttgagcatggtgacttccacctgtcaactcatgtgactattttaaaatgtaccctttctgccaactattagaagagcataaaatgaaaaggaagtttattgcattgtatatgtctctatcccattcaaccattctctgttgtgaagtgcttactggaagggatggaacattaattctgggtggctgaggctctgtttaagaccattggcaaaaatgtatggtcaaatttggaaatgctctttaatgacaaagtttgaatatctaagagtcctagctgcagggaacggttgtgggatatgaggcaggtctgatgctgggacaagccattgaataattcaagttttgtctatatctgtttttctccatttctagttcttaatctatttctcagatagccacgtttctgaatgccagtgcttcttcctttgctctctactccctcaaatccaaaaaagccctggggtctgattctgtcttggcctgctggataagccttcatgctgtggacttccctggccagggtctgtatctttaaaacgatcctatcttatgttcattactgcaaagggcctcacttggtggccaatctaaatagcagttgacatgagtcccttcatgggagaatgaaagttgttttgtctcctctgatcagttagcatttgttttacaacaaggacatttgaagggttaaaccaaagagatatttttgttgaagagattcttctttcaaatgattgtctgtagggccgcctatgttgacttaatccaacttttaaaattgctaatactgaaatacctgtagttccctcagtctttttttttttttttttttatgtgagctttaccagtaaccagaagtattaagcattgtttttctgactttcatgtcctattctggcctgatttaagtgattatttgtgtgagggtataggcattgggggtatgtatgcttaaatctatttctggagctacagagtagaaaatggcacttcatccagtaagaggaaattttggttttagggaagtcatgacttgtttgttatataatgagcattgattcagcatcttctatgtggcatatacttacacagacatagataagatggagacctgccctcagtggggttcacattatgactggggagatggccctgtaaattcacaggagatggccctgtaaatttaatacattatgtaaagataaatgcacagatttctctggaaatatagagatgtgcagtcatttcatctttttaatcaggaaactcatctaattggagatgacataggtttctcatctgggctttcaaaggactttttatttcctctacgtctagcttttctagagacttgaaactatttgaggacaggaagtatgtattattccctttatctccttggttcctgttaccatacatctttgcgtgtttatttgaaaactggatttcaattacaaagacttcctggatatcttaaaaccaggctttgaagatggggaaaaacctgtcttaatctttgccaactcatcctctttttattctcattataaaaatgcaaagcaaatctggcaaagcaggcactgaacttttggtttcagttgccttttacttataccagaataatgataatgacatggcatattacaagataatctaaaacttatgcagtttaagaggagcgtgtgtttcatttctgtatgtaataaactaaaatgggagctttggactatgtgcctttcaaggtagttcaaagttttaataaatccttgtgcggatgtgccaataataaatgttaagaatgcttaactgacatttaaataatttttttatataaagtgttagaaacatttcagtgtcttcatatcataatcactgatcactttttatcttgtgaaacaaatctaaagtgtatacttgagactttccggtagaaaaacatggtggttatataggtagttgtaatatcttggtagaagctcaagggcaaagaatagaacattttaaaagcaggaacccattggaaagtaattttttatgagaagtcatcaatattactttaagaaattttacgaacaagtttacagtaagcctcactccttctaaagtcaagttacctgccttagtacactttttacctttgtctagtattaaacatcaaagcctgccctcctcaaaaaaaaagtcacattaactttgactttggcataactagaaaaacactggaaggatctgaacacagagaaacttgaagatttcttcacagtttatttgagatgtttctactaaatcccaggctgagtttgtcactttccaggaaggaacaagcacattgagcagatgtgtatccgtggttgtgaacagaatcatctttgaagagagcagagattttggtattccctgacttgggtttaatcttatcatatcagttaatagctgaatgaccttagacagattacttttcctccctgtaatggatttgcttctccatgagtttaattttatggcaaataattatttattgcttgctctgtgtcaaactgtgtgctaaaccctggtaatagtaaattagacagttgtaattgctctttgcttggaacttggcaaatcatatcatttgggtgatacccctacctcacaaagatgttgtaatgattaaatgaagtcaggtatataaagtatatagtgcctgtatatagtaagtgctccataaatggtattgaattatcattctgatcattttcataatttggcttcccttgttttgactttaagaagatacatgtctcctgtaggaaaacacagaggaaaaaatctggcctctggctgcttaaattttgcttacaaactacaagctctttatttttgagaatttaggccatttaaaacttatcccttttctccattgggagcagatattaaaacaaatgtgtttttctgacatttatggttaatcaaattgttgataaaatcaacaatttatccattttattagaatagcaaagctggagaacagagaacagacagctaagttatttgctcttgcctctgtgtatgtggggccaacacaattgaattaactttttcaagaccaaacttctttctgtattttctaaaatctttgaaatttttaaatctgatttgaatgtttccttagaaagttttatttccctcactttttaaaatctaaactagtcagtgacaccaaatctaacccaaagcttcacattgtttgtgagtttatttttattgtcgttccatttttttcccttcatttctgtgaaaagtgtcattttggtcataaagaggttatcctttagataagaagctattatctgaaaggtttttgtagagcttaggaatatttttctttttggaataggtgttcaaaatcttgtctttactgaattcaaatgtacatcgcagtcacattttcctcttagagaaaacttagctgctccttttggacttctctcatttgctttattcattaaatgctattacactaacaacatgaaaaatcttgattatgttatttgaaatatttgtttttttaccttaggcattaaaaaattataaatagcaataggtactgtttgagatgaaagccatgcttattatttagttccagtgtcacttgtgtacaatgaaatgtcaagaaactgggaagtataatattatgtcaaaatgcattaagataaaactttattttttttctttaaaaaagtagaacctgactatcaaatgttaaatagagtaggcatgaatgttgtttattggctgtttagtgttccttttttagagtttaggttaatggagcagttatgttttaggggtaattgccctggtatggtttctgtcatgctgagcagcagtcctgggtggcattggttgttggtggatttatcctttgtttttcagagacatgcctttcagagtgcccctactaacctgggaggcaggattctgtgtcactttatattttgaagactttggtactagtgcttcagacaccattgaccaaatatgcacagtaaacctaagaaaacatgttcccaaagaattactgtaaaacttttaattaaaaaaaaacgtggtatacttgtacactcagtaactcatactaacattattcttaaatgtaaatgattgatatttttatagtgtaataaaatctcattagattaaaaacacatgttgaatctccacactgtagataagccaatttttcctaagctgttaaaggaaaaagtggggttcttgtgggcttgggagaagcacctgctttgaattaagctgtgtttgtattaaccactgtcaatttaacaagggtttgctctgtgtgctttgagcaatttgagggagaagtccctagatgcttatcaagtattactgtcattactatagttcactgtttcattacattatagtaatactgatggctgtcaattgttttgaaatgcttttttctgtattctatttaatttactgagatatggagaaaatcgtcgaaggaattagtgtatctgggtcaacaatttggctgaccaatcactagacttcttttggcttcatactgagaaataaaaatctctaacccatagttattgtttatctcatgctcaattttgtgtataataggggtatattcacttataaaatgcccaagagtagagcacacgcacacattattaaataagaacatagatttccaaggcctcacagaatgacatgccagatcctgaaggtacctgaatccttgtttgttttggtgatgaatttttttttttttccccaccgaaggggcctggtccatgtcctggaggagaaataggagtagtatcattagatataggtgtttatgccaagttattaagaaatagagctttttgtccagggtagagagaagcagcccaatgttgatggggatgtgggtgggtggtgtggggagtttggctagagcctcacatactctagccttgctattgagtcctctcagttgtggaccttttgtcttgtgccttgtcaatagcatccactgaatatttcatattcactatggacagatcccaaatcttgtgtgtacataagagaaataaaacctactcctttcctaccttgatcttaaagccaaaagtagagaagcagaaaaacatgcttaagtcttaatttttgcttttgggtcttaaggaacagaagtgattgagtgtgcaactctaagggaatgctggatttggagtgatgaatagcaacgaggttaggaaatctctgtattatagcctccagagtatctcagaaatattcctgtcactatgatgcaattaagtttagacaaactggaagataagagctttcgaacactgtcaagtgatttacataaattatttctaaactaataacagcccagccaggtatttctcttttgcttcacatgcctgaattgcaatgaggcagagaagagtaagttgcttagttagatgaccttgggcagtaatgaagctaggtttttcattcctggggtatctttgcctgcatgcttgtgcttctcccagtatgttgtctaaacaaacttatacagactttaaaaatttgctgacgttctttctagggctatgtgacagaaattatcatgagttgctttttaaccaggccagctatacccagaatggatttgtgtacatgattgagaatgccttatttgatatgtggcaaatatcttcacattatgatctaaaattttttttctgagtttgtgaactaagtaactttgagtggatgtattacaatgtgccatcaagtctcagatcatttatttgatttttttaagatctcctaattttaggaatgttaaataagaacatatgtaccttagaatagaagagatgtagtacaaatgtggtcctctaactggctagttgagaaataatggagtatttggattttgattagtgtatgtagatgcctttataggttttatgactttcatgcagatatttatgaatgttccactgtatttgctgtgataatggaacattcttgttaagtgctgaggattgtaaaaccttactaatctaaattgctcgggatcatactatcacactttgacctttatagcactggcctgaaacctttaaaaatagaattagtctttaaaaatagaatttttaaagactttaaaaacagaatttttaaagactttaaaaacagaattagtaagtatattttatttataataatctcttgtttaccaatttttgatgctctattttacttaatcttgttaaaaacaaactaaactgtgtctctctcctccaaacgtccttggctgggaataagtggtctttaaaaaagaaaacataacatgggatattattttgttgtaatttagatgattacatattaaattttatacaaataattaaagattaataatgtgaagttctattccagagaccaaattgtaagcagaaacataaattacagtaaaagtatctattctattggattaaagaagaaaaattacttcagtagcaggattgcccagaatcctgctatcagtgtagctattggagggttaaaaacaggtgataagcatagcacatcaagggtaacaataaatagtgcagtctaattccagtaagatgaaactcttctctggttgcagaaaagagagtgggtgatcaaatagtgactcagaaaagcaaatcccaagaaatgactcaagcacagaaacactttaagaatttctttaccaagatttataataaatgaacttatcatttcttaccaagcctttagaaataattatttctaactttccaaatgattgccatttattaggaggaagaaatattcattaatctttcatttcatgaataagatgctttagattgccaaagacacgtgaaactaatagtagcccaagatatgaatataccaaaagaagacaagcagggataattctcctttaaataactagtagatgggttagatgtgataaacacttgagttttaaagctattaaatgtataagtgaaggaaaaatactgcctttgagtgagtggagaatagaaagaaattgtttgaacgttttgctttcatgccttttctaatcttacaaccactttataagatagggtggttgactgagtttacaggtatggaaactgagatgcaggcttagtgacctgctcaaggtcataggcttagtaaatggtgcaaatggaaaccctcatatgactccaaacccagttctgtttctcttataaaattgtctctatgtccaaatgaaggatatgaagactaaatgaaggaattcttttttttaacaaaagaaaaacatgttaatgtgtatctgtcagacatggtaataaggaagttctggagatatgggggagtttgtaatttttagaagctatgggtaagaatgtactcagactttacagagagttagagtgctttaaacaagtgcttctcaaacttcaatgtgcatggaaaacaaccagggatcttgttcaaatgcagactgattcattaggtctggggcagggctgggattctgtatttttaatgagccttcaggtcttgccagtgaggaccacactgagtaacaagggtttagataataaaaaaaagtgatcacatgatggagtgagagtttaatgaaagtggtggggatgtaagtcttgagtgtggatctaaaggatgggtaggatttaaatgagaagttaaagaccactgcatgtccaagggcacagaggcaagaagtccaaatcaaacatttcacagagtcttctggaggtacagcattgagtaaagatgagttaagtagggtcttagctcttcgggcctacattctgatgggggaagcttaaggcatgagtctttaatggaggtgggcagattggaggcaggatgagaggtaggttgggacaagcttgagtgaggcctgtagtatcctggctaggggatttaaactttatctcacaggtaatgggattatcaccaaaaacttttgagcagataattaaaatgctaaaatcagagacttagaaagatagagtaatgaagtagcctacacaatgaattgaaggagaacaagtatggaggctgagagagaggtaaggtaattacggcagtcaatgagtgtggtgatagggaagccaactgctgaaagcagtgaacaggtagatgaagaaacagatgctaaagatgtttggagtaagacgtgatgaggattgagccaagtgaaggagaaagaagagttagcgtttgagctgtgcaaccattaaaagaaacagaaaaggtagctgatttggaggcaagagatggaaattaattttttgacacattgtgttggatgtgacagtagaacattcaaatggaaatataggcattgtcaatatatttaagtagaaataaacactggctttgtagatttgggaggcatctatgaagcaataatagtcatttgtaggaaaacaaagtccagctctgaggaagtgaaggtggaaagagaagtattcctcattccgtttttaaaaatgagcacttcctggtgttgctttttttttgttttgttttgttttttgcctatgctttcttgctggtgtaaaatgatcactgctgactccaaaaccaagccatactttttctatgctgttttcttctctaggagacacttcttacccatctttgccttttgttttacttttttttccagctttattgtggtatcatttacctataacaaaatttattctattttgtttacagcttgagtttttgtaatgaacagttgagtaaccatcaccataatcaagctatagaaccctagaagttttctcatgtccctaagatcaacctcttacctgaactctagccacagtatagttcattatagtgttgctttttctagaatatcatataagaggagcatacagtatgtagtctgttgtgttttatccctttcaatttgcctacttttttgaaattgattcatgttgagtaattccttattactaagcagtatttccaaatgtagatttgccacagtttgtttatctgttcaccagttgatggacatttgtgtatccaagttttggctattgtggataatactgttacaaatataagttgtcccacattctcctcgacatttaatattatcagtctattgaatttagtcattctacttagtgcatagtggtattttattatgattttagctcacattttcctcatgactagtgatttttgagcatctttccatgtacttaatggctgttttaatatacattattatctgaatgttttaaaatcatttgccaacttcttacaactgagttgtctttatctcattgaattataaaacttccttatatattgtggttagaagccctttgttagatatatcagttatcttctcccagtctgttacttgctgtcttgtttcacagtttgtcttttgaagagcagaagatttgatgaaattaccatttggttattttttcttttatgatccatacttttttgtgttctgcttaagaaatctttgcctaacccaatgttgcaaagagattatctaataaaaaataatgcgaggtgataaggactatgaagaaaaataaagcagggcgaggaagagagaatgtcaggaaggttcttttgggtataatattttaagtatgtttttagaaaaacctcttcagtagacttaaaagcaaataaaactagctgttggaattaatgttgtatgctaacaatatcattaagagttttgataaactttatctgcaaaaactcattgagttgagcctttagtatcttttaaagttctcggcagggaaagggcaccctattcaataaatgttgctgggaaaactggatagccatatgcagaagaatgaaacagaaccacacttctcaccgtatacaaaaattaactcaagatggattaaagacttaaatgtaaggcctgaaactataaaaatcctagaagaaaacctggaaaaactcttctggacattggtccaggcaaagaatttatgacgaagtccttaaaagtaaactcaacaaaacaaaaaatagacaaatgagacttaaatggattaaactaaaaagcttctgcaaagcaaaaataaataaataaaaataatagagtaaatgtataatctaaaaaatgggagaaaatattttcaaactatttgacacagggctaatatccagaatctacaaggaactcaacaagaaaaaacaaccttgtcaaaaagtgggcaaaggacttgaacagacatttttcaagagaagatatgtaagtggctaacaaacacatgaaaaacatgctcaacatcactgatcatcagagaatgcaaattaaaaccacaatgagataccttataccagtcagaatggctattattaaaaagtcaaaaaacccaaaaagatgttggatgttggtgaagatgcagatagaagggaatgctgacacgatgctgttggtgggaatgtaaattagtacaacctctatggaaaacagtgtggagatttttcagagaactaaaaatagaactaccatttgagccagcagtcatctatccagtatctacctaaagggaaagaatatcaaaaagatacctgcagtcatgtttattgcaacactatttgtaagagcaaagatacagaattaacgtaagtgtccatcaatggatgattggataaagaaatgttgtggatatatatatatatatatacatacatacatacatatatatatatatatatgccatgtatatatatcggatatatatatatatatatatatatatatcggatatatatatatatatatatatatatatataacgttaagtcgtagtaagtgattgtgtctaagggccacaagtctttttgaagttagttcattcataaaatcgtgggaattacagaaccaggaaggacttatctcgatcaacatttgaacttctgtatagtcatttcccttgcctccaggtgcattgttcattgttctcttccttgtctcccactcctaagtcaataatttgacaatctcgtgtttgatccctttttatactctattgaaactgtaagaagaaagttggaattatatgatttgaaagctttttaaaaaacttcttggaatagcttttatgaatgactttgataacatacccattttttgctaccaataacttcgattgtgatttcaaaagaattttaatttctgaagactttaaaaaattgacataggttaggaggagataaatatagtgtaaaaaagttattagccttcaacagctctggagcacgttatcccacaattctaatcgaggtaatacatgggaacatctaatattagttcagagtgcttcatcatgcatgtcatacagttgatgtgagtgttcactgttttatttgaacttaccagaaagcctctgagagagagcctctctagggacactagtaaagctctaggttgattttcctatcaatttaaaaattgtagtgtgaattgttaatttgagaaatgtgcacttttaagaaatgttcctttgttaagaggtaaaaatcagaataccagagctggaaggtactaaggacataatctcattcagggcagtccttttgcatgtgagaaaagtgtcccagatgaggtgaggtggcgtttgcaatgtcagccagtgagctaagatggagatgtggatggaagtgccacatccgctgtccaggtgtagttattttcactgcatctcatcgccagctcagctggcaatggacttgaatgagggcactgttttatttcttttttttcttcctcccccagtgttcactcatttcagtgaaactgtctatatgaatggtactttgtttacattttgctttattattatagttcggatttaggaatctgtataaaataaggctagccttaaattttaaagacaacttacctgctttaaccagcaaaccagaatatgttcatgctattccacatttaagaatataaagaagaaagtttaccaatggcaattaaatttttcttcccagccacggtatatttttcttcattcatgttgcatacctattttcagagtgttggtctgttttcctgttttaaatctggtgccttaactctatttacacatcactacttttgtggaaaatactttggtattataattctctgtaggatttggaaggtggccttaaattcatgttcatttaatgtttcatcacattcagataaattatttgaatgttatttacttctgattttcttttcttgtttttttttttttttttgagacagagtctcgctctgtcacccaggctggagtgcagtggggcgatcccggctcactgcaagctccgcctcccgggttcatgccatttccctgcctcagcctcccgagtagctgggactacaggcgcctgccacgacgcccgcctaattttttgtgtttttagtagagacggggtttcaccgtgttagccaggatggtctcgatctcctgacctcgtgatccgcccgcctcggcctcccaaagtgctgggattacaggcgtaagccaccgtgcctggccacttctgattttcttaactgggaaaaacaaattagagattaggcaatacaaaaatatctctagcctggtttctcactgattacccttcttcagagactacgacaagaatgcatggtattatgaggacattttaaaaccaatgcaaggtaacttattttaaccttctaaataggattcctttaaagctgtctgtggttgacttttcagacatcttatgaaagtaatttcttcggtgctacttgaaacattttgttctgtggactcaagatctgtggtttttatttatttatttatttatatttttttgagatggagtcttgctctgtctcccaggctggagtgcagtggtgcgatctcagctcactgcaacctccgcctcccaggttcaagccattctctcgcctcagcctcccgagtagctgggactacaggcgcctgccaccatgcctggctaattttttgtatttttagtagagatggggtttcaccatgttagccaggatggtctcgatgtcctgacctcgtgatccacccgcctcggcctcccaaaatgctgggattacaggcgtgagccactgcgcccggccaatcgagtgccttttaacaatgcgcccttaagcagatgtaagcaccgtaaggcatattgagtttttttgaagtcaacacttgaaaatcattggcagtcgttccaggcgtttcacttaacttcgagtttctttgtgctttttattgtttgtttttaattctagttgggtaaggctagaggacttatgtttcaactgaactttttttcagggtagtagctaaactcgttgaagctgtagtttcagttcagacgtaattttaactttggtatattgctagggcaagggctttcaatcattagcatgcatcagaattacctgcagggctcattaaaacatgtattactatacccccaactctcccaatattttaggaaggtcctggaggcatctctgtggaggaggagaagggtataaggcaagactggaggctggcaggaagtgaatgtcatctgaggaagaagaatgaattcaagagatatttaggagctcgaattgatgggatttggtgatgagagttttcaggaaagggagttgtttggcttaggcctcagcttctgatgctgaaagttggaggctcctcacccaagtgcatgcatcattaatcctcaagcctgtacaaccaggacagagcatgtggaaaggtgtgcaggcttgaggattaggtgatgcatgcacttaagaacttatcaaactttaaattctgggcagagataatgacagtggcattctaaaggacacagctgagaagtttcctgggaagtattagcataattgggttggaactaaatatggtgaacaggagatggggatggggggagaactcattcaattcattagttttgggaaggttttgcaagatattcaaacataaaatgggaacgttgaaattgattgcaatcaatgtaaactaatctgaaagacatctgattgaatgtatattgaacttgaaagttaactgaatgtcaggattatattaacctgaatttgaaagctagttatattattcatttgaagcctgtcacttctttctcaatgatttatacaggatgattggtgatactctaatattctgaaattccaagtgttatatggaaggctaaataggaagtgcatgtgcgtgcatgtgcatgcatttgtgtatatatatcaaatcaaggatagctatgtaaatggaaaaattgacataacgcatcccattgactttctgaagacaagtagctttatacaagttatcagaaacaaaatatttagttaaaaacagacattatgatttatgtttttattgggggaaccagcccccaatatttcaatgtaggttcttttctattttccctaagtgtcagccagtctaagaaataaagggaaagagtacaaaagagataaattttaaagctggatgtccgggggagacatcacatgttggcaggttccgtgatgccccctgagccgcaaaaccagcaagtttttgttatggatttcaaaaggggaggagtatacaaatagggtatgggtcacagagatcacatgcttcaagggcaataaaatatcacaaggcaaatgggcagggcaaggtcacaaggccagggtgaaattagaattactgatgaggttccctgtcccactgtgcatgcattgtcattgataaacatcttaacaggaaacagggttcaagagcagagaactggtctgactagaatttcgccaggctggaatttcccaatcctaacaagcctgggggtgctgcaggagaccagggcgtatttcatcccaactgcataagacagacactcccagagtggctattttagaggcctccccctgggagtgcattcttttcccagggctgttccttgctgagaaaaagaattcagcaatatttctcttattcgttttggaagaagagaaatatgactctgttccgcccggccctgcaggcagtcagactttatggttatctcccttgttccctgaacatcgctgttatcctattccttttctaggtgcccagattttatgttgttcaaacacacatgctctacaatttgtgcagataacacaatcatcacaggatcaagaggcgacatacatcctcagcttaagaagatgacgggattaagagattaaagacagtcataggaaattataagattattgactggggaagtgataaatgtccatgaaatcttcacaatttatgttcagagattgcagtaaagacaggtgtaagaaattataaaagtattcatttggggaactaataaatgtctatgaatcttcacaatttatgttcttctgccgtggcttcagctggtcccttcgtttgggttccctgacttcctgcaacaattttttggacaattactattgctcaattcctccaactttattcatgaaataggttggatttgcttttattagtcttgggaagtttgaaaatgtatttgcacagaagaaatttctcattcctttttctaatggcacctgtactttaaaaaatacatttataattatctaatggaaaagatgatgtcttgggagtatttttttaaccttactctattttcctttttttttttttttttttttttgctttttttttttcttttattattatactttaagttttagggtacatgtgcacattgtgcaggttagctacatatgtatacatgtgccaggctggtgtgctgcacccactaactcgtcatctagcattaggtatatctcccaatgctatccctcccccctccccccaccccacaacagtccccagagtgtgatgttccccttcctgtgtccatgtgatctcattgttcaattcccacctatgagtgagaatatgtggtgtttggttttttgttcttgcgatagtttactgagaatgatgatttccaatttcatccatgtccctacaaaggacatgaactcatcattttttatggctgcatagtattccatggtgtatatgtgacacattttcttaatccagtccatcattgttggacatttgggttggttccaagtctttgctattgtgaatagtgccgcaataaacatacatgtgcatgtgtctttatagcagcatgatttataatcctttgggtatatacccagtaatgggatggttgggtcaaatggtatttctagttctagatccctgaggaatcgccacactgacttccacaatggttgaactagtttacagtcccatcaacagtgtaaaagtgttcctatttctccacatcctctccagcacctgtagtttcctgactttttatgattgccattctaactggtgtgagatggtatctcattgtggttttgatttgcatttctctgatggccagtgatgatgagcattttttcatgtgttttttggctgcataaatatcttcttttgagaagtgtctgttcatatcctttgcccactttttgatggggttgtttgtttttttcttgtaaatttgtttgagttcattgtagattctggatattagccctttgtcagatgagtaggttgcaaaaattttctcccattttgcaagttgcctgtttactctgatggtagtttcttttgctgtacagaagctctttagtttaattagatcccatttgtcaactttgtcttaaactaattagaattaaaaagtttcatgtgaaaatttggtaacaaaattcagctgtgaactatgagcttcactgtcataaactgttggcattgattagctgtagatgaggattaaaagggagaattaggagtaggtgtttcattttcttcagccaaatgatcctcatatgctgtgaatagacttttaggtcagatcaactggggcttgaattataacaatataataaaggtgacttctggaaaattgcttaatctcattaagcttcagtctcacctctgtaaaatgtgaataacactgaatatagaactgcattggtgataaaattaagctgcatatgaaatgtgtagggcaatgctgtatagtacttgtgtttattttctgttgccgctataacaaatgaccacaaatgtagtgacttaaaacaacacaaacttactctcctacatgtctctagatgtcatgtctaaaatgagtcttaaggggctaaaaacaaggcatcagcagggttggtttcttcttgcagctccaggggagaatccacttctttctgtctcttctagggatagccaagcattccttggctcctggctgcatcactgctccaatctctgcctctgtggtcacaatcccttctcctctacaacagtcgagtctccctcttcctccctctcataaggacacttgtgattatgtttaggacccactgggataatccaggatgtctccccatctgaagatctttaatcacatttgtaaagtcctttttgccatgtagggtaacattcacaggttctagggattaggaagtagaccttggtggggagtggggtcattattcaacctcccactgaactcaataaattttcagtattttaaagtgtggagtaggaacaaagaattcaaaatggaatctttttctgtagctaagaaaaccatttgtgatggcataacatggattattcacatacagtatattttatgcacagatgtattttacagcatatacataaccattttggaatgcataaaaatggcatctaaaatgtgtaatattaggtaattgcttaaataaggcccagctgagggagcagggtcatctaagttggttacacttgctagaaatattttgcaatatcattgtaatggataaaatgaagatctgatatgttccttttttttgacacagagtctcgctctgttgcctaggctgaagcatgcagtggtgcgattttggctcactgcaaactcctgcctcctgggttcaattgatcctcccacctcagcctcctgagtagctaggactacaggcctcaccaccatgcccagctaatttttgtatttttggaagagaaggggtttcatcatgttggccaggctggtctggaactcctgacctcaagtgattaccccacctcatcctctcaaagtactaggaatactggcatgagccaacctaccgggccagatacatcatttcctgccactttgtatctgaaagacaagagagcttgaatgagtttttcttccaaggtggcaagaatgttgagctcttggctctactaaattgtaattcttcctgcatttactatatatgtttactgagtatctattaatggtttaggcactgaggtaggtcttgccctttggtctgatggtatgtttttcattaacttcttaggtgtgtattccttgcttgtctgtttgctttgcttatatatttaataccttttctaggttacagtctttaaatgagcctttcagctaattttagacccctgggaacctcaagtctgctttatctgattagtggagttagctaaattctgagatccaccgaaacagtggttctcaaccatgggaaattttgtaccccccttcccttggccccatgacatttgacaatatctggagacatttctgattttcatgcctggggccagggagtggcagtggtatctagtgggtagaggtcaggcatgccacttaacatccacaatgcatagtacagtttccccccgaagcagagaattatgaggttcaaaatgttaatattgccgaggttgagaaaccttggtctaaaattatattatctcgattaacctttggcataaatcaaattgtgaaaaatttagtgtgttgtatcttgggattgtgccagtaaacatgagataaagaggcttttgtggagcaggcaatatttaggactagagtgatttatgacataaaacttgagggtttggaatctcatttggggagggtactaattttcctcatggttgaaaattaaaattttgaaacctcccacttataggcagggtagaataatttatttttaagtaatatgtagacttctgaatgtgttgcatgcatacatagtttggcatgcattattttgaccagggttcatatcacacagcacatttaatatatattaaatcacagctaaggaataggtgcagtgataacttataaacaacaatttacatcagcttatgctttacagagaacttccatgtacatcagaaaggaaacaagtatttatgtgctaggcattttaaatgtgtttaatttccacaaaacctaaagatggatattatctttattttttaagataataaaatgtaacttcaggaaattgacagatttttctatttaatcttgtacatgcttgctttgtaatcttgtttattttcagttgatagatatttgttttacagaaatcttacttataaggacccagcagtggtaaaatacaggaaatgaatactgttgatctctcagtatgagaattgatggtatttcatttacttataagtcttttaaaaagtgctttggcaatatttcatttgtgaaattctgtagtgtgttgtatatacaggatagtggaaaatatctaaattttgtcagaaaaaatggcagtggggaacttctaccattgtctttgggtgacagatttaggaaagaaattattggcaacagggtttgaatcaatactttgagaaaaaaatgagttatagttcaggatatgatgaagataactttttgggattaagaaagaagtaatttattttaaaaatatagtaaggtagaaaatatttgtgattaccctcatactattaataaaacagggtcttgggaaagcctatgaatcacatcaaaccttaatagttttgtaaccttggcaaagtttcttaagcttttggagttgcagtttcctaatgtcaaaatcattgcattgttgtgtggattaaaggagataatgtacaatactcaacataatgattgatataaagtgattaataaaggcaattattacaattattatattacataattaagtataaaggaggacttaaacagatcacaactagaaaacacttcattaatactagtgtccttaagatttttaaactgttctgccaaaaaaataaatttttcaaagtttaagtaaaataggtctttgttataggacttctcataatttcaatttgctagtatgtgtattcaagaggacagcatagaattagtacttttaaaaatgttttgaccttcagacctattaaaatgttgccagtttctcctgtttcatggtacagtttgcaaaacacttggatgaaaacatataatcaggcaactttatttttattccaatatcatgatcctaaagactaaaagatttatattatcaagttttatattggttttgagcatgggatcaagtctggaaggacacctgaaatgtctagtttagtattcttttaagttgtgtcttcaggaatatcagtggtttggagaaaatttttgttgatgttaatactcatctctactctttgtcctcctttgaagagaagtcactagtaatttagtaattgtgtgtgtggcgtgaatgtgtgtgagatgtagagatgggtaagaagatgacccactagttcatcctcacccctcatctgctccacctctcgatagtactgttggctctgcctaatctcaacatcattacattgtcatatgggttaaaggacacaatgtagaatagtccacataatgattgatataaagtgtctgtgtcttgcttgcctgcactgcagtggccactcctgccacactgggtgtcccttctgttggtcttgctggtttctcctctacttcttaacccttaagtgttgggtttgtgagggttcaatccctggaccacttctctctctacttattttcttctttttttttttttttgagatggagtctcgctctgttgctcaggctggagtgcagtggcgcaatctcggctcattgcaagctccacctcccaagttcacgccactctcctgcctcagcctcccgagtagctgggactacaggcaccagccaccacgcctggctaatttttttttgtttgtttgtatttttagtagagatggggtttcaccgtgttagccaggatggtcttgatctcctgacctcatgatctgcccgcctcggcctcccaaagtgcttggattacaggcgtgagccaccgcgcccggcctctctctacttattttctaggtgattccattcagtcttatgaggttctatttcatctctgtgctgacaactccactaattacatctctagtctaagtttctaccttgatcatcttattcgaatgtctaattaccaatttacctactcaacatttttacgttaagtgtttgacacttaacatgtctaaaaccaaagcctactattttcattgctgcagttacctagcattatcaccttttaaactgtttggaagatcagtttaaaaatcttaaggacatagtatcagtgaagtgttttctggttgggatctgtttaagtcctactttatacttaattatgtaatataataattgcctttgttaatcacaggagaaaaatcatgtgtgagtttatttgcttgacatctactctctccctcaacacattttatataaccgaatgtcataactccatttaataaacagatcatacatagtggatactaaattctgtattcagtagtcaccttaatatgcactctgtttgtggtttaccgtctaatggggagacacacgtctcagttgtgaagttagctttacgtaataacaagcattttacaaaaagtagaaaagaagcattataagtctctggttgagagggttagggattaaacccacctttcggctcctgcagcagcactcctctgctgtgttacttaagtgggaatgtgtgccggtgtctttgaatgcgtgtgtgtgtggtttgtttctctttaagtgaaactatgctattcttagtagtgtgtgggagagctgtgaaatttaataacaaattatttttaacaagagggtacttattcacttatcaagattggaataagcattatgttgctagggcaaagtgttgaatttctaagtttttttctcaattaagtaagtacagaaatcgtcaggttcatatatttgggttcactaattgtctccagggatgatcttattttctcaagtgtcactttaatagtttccacaatgattatggcatgtttgtagcaatggcagattaaaaccaatgagtcacacgcctctaacgtcactgggaggttgtcaaatggaatgcagcttcatttttaggaatgaaggtgggagggaaggaggtagattctgtttcttagttttctttttaatgcagcttactttttttgagagaaggaaagaagtgaagtattctaagaattcatcttcaacttgttttattcacatatctcttgtttgacatagtgatgagagaatggtgattgcacttttctctattttaaatagtgcgatggatgagcttccattcatagaacaatagaacttcatttagtggaacaagaagccagtacctgatatattcctaaattcctattttgattcctaggttttgaagagcaatagccccttcccttagagacagtggtattaaaaatgattttctcattattctcttaaaatttcacttagtacatttagggtttcttatgacacctacacttttctcctgtttgcagatagactggcttgttgcatatataaaaatgaggtcaggagtttgagaccagcctggccaacatggtgaaaccccatctctactaaaaatacaaaaaattagccgagcgtgttggcgggctaatcccagctacttgggaggctgaggcaggagaatcacttgaacctgggaggtggaggttgcaatgagccgagattgtgccattgtaccagcctgggcaaaaagagcaaaactctgcctcaaaaaaaaaaaaaaaaaaaaaagccactgctctgtcctcagaagaacttctgctttgaattttccctactgtctcccactgccacacatgcctccgctcttgccccagacatatcttacatatttaaaccagatgcagtccatatactttttcttcctgtgactgctcatgaaatcatgattcacggcctcatttcttgatttttttttaaagttgtgaacaggtggccaagctgcataagcaacaactggagagcagagattacttagtggcttggagagggaccaagtatcttgtgagcccagctcttctaatatcagtccagtttcccaagaggcaactcccaggtcagctggtgccacccagggcagggcagggctggaactgacttttgaagggtggggtctgtaggaagaatccatgcattgctctgggaagtggcctcaggaagtagagggctggggacagaatcactcatgagttgcagttgttctgggcaacaaagcaaggcggatacttattctggtagcagggtggagtttgaactgggcagttacctctgctcaagccccttgaagaatttcagattccctgttaaccatggaggcatgggctggaagctgggtgtgggggcaggtgagttcaaacttcttaccttttctattaggatatggataaatcttcccccggggattctttggacaaaagcattcccattctgtcaaaaattccagtgtgaggtttttatcatacatgtttccctgtataatgattcagtcagataactgtatttgatcttaaacaagattggcttggacaggataggggctgggatttggggagaagagatgattttggagcataaagaattcaactcctaggaggttatgttatttaggcaaagcatggggagatcaggccttccagcgttgcaaatgagaatgctggtaccttgagaaagagaggtactaagacatgtgagaggaacacagagaagtgggattctgtggcaaattctatgaagctttactcccacgtggggaaaaatttcctgtctgtcttggccccgatctgcggagctggttctgtgagtggctttgatagctcatatatgaacatttaaatgcttggctgttcttagctaggcctttgatggactctggtatgcaaccatgtggccagtgtggctccagctccctgctgtctgggcccacacgcagactccttagagcatagtatgctctaaacataccctggggaaggcggtgctgggtgcatgtgcatgggcccagagttagctccttggataaacagaaggcatttagaaatatttttgatgcagccctagccctagaacataattggctggtgcactgcggtaaaactataatctcatccattagcaccttattccaaacccgatcataaatgaagatagattttggctgtgtaggcacattttccctcagattttggaaaatttaagggtatttggccaaggcaggccctggtaaaccaaggatgtgtggggagggctggcttggggccaacatggaagtttggacaatgctaataataccacgccagtgtgctttgcccttggtttgaccttctagaaattatttcttatccttctttaaagccttccatggcaaaagggcaaggaaagtataacatcgaagagtgccttgaattattcttcacagaaatgtctcttctgaggaagaaaactgtgttgggggtggagggggcggagttgactgtcctccagccactgccctgtcccctagtagtttggctgagatggataattaaggaatagccttgaattgtctcacttacttgtcctgctttgattaagcattttttaaatctctcactaaagcccagtgaggctggtactgttgttcccattttacaggtgaggctttggagacagtgaagtgatgcaatcaagttctcacagctagtgaaagtggagccagaatttacacactggaggtctgaaccccaaagtcccgcactcaaccaagcttcctcctcagggaacgacccggcctgggatccctgaagacccacagcatctatgtagacttttttacccactggtcctttggttagaaatgatatttcttgattgacttggtactagtattttaaaacctttgagtaaagaaaagaggatcagacctagagcttcctggttctaagttaacatagtagcagttaggataagatgattagagctgcatgagtccacttgagagcttggggctcccttgttcttactctctggcagaaagctcagatgtccatgatgggcatatagtttctggccctttgccagaaagcaaaggaattatcagagctattccattaatagagtggaagattgtgtctatgctgtatttgctatttcttgaatattaaacatgtaaaagttaatgtatgatccaagtatagagtaagggctatcaacatacccaagataggtattttttttgcaactattaatatttcatatctaccccttttttttttttggatggagtctcgctctgtcgcccaggctggagtgcagtggcatgatctcggctcactgcaaactctgcctcctgcatatctacccatttttaatgcagatttggatttcagtgcaagtatggattctttgggctctgtctttcagagctctgttaggaagctttttcatcacataggccaccatgtaagctttgtattcagtcctttgaagtttgtacaaagcactttggtctttgtttctgtatctgttttttggagggattattgatttgattctaaagaattctattttattgcaatttaaagataacaggttagtaagaagtataattatgagtatcaatacaatttgagttgaaattggacatatttgaagtaggttaatgcaatttaattgttctctgacattgtatgagtattgtctcctgagcttttatcatttcaggctttttattgctaatttacatttctataggttaaataaatgtatttaaccagaatttgagagcatctgtttgccatgtactgtgcgaggcatttttaatcaaatatttttatgtgcttgccaagtggtagaccctgtcttaaggcagttggaatatagcagtgaacaaaatcacaaaagtccttttggattcaggtagaggagagaaaaaaatgcctatagtagatggttataaatacaaaaataaagcacggatgagagattgggtgtgtcaggtgggctagttgcagttctaaatattggggtccactgatgggccttgccatcacatggcttacagccttgtaataattctttgttcacagagttgttgttctttgatcatagtgtagagtaagggctatcatcatacccaagataggtatttttttaaactattaacattttatctgtacccatttttattgcagacttgggtttcaatgcaggtatgggttctttgttctcttctctctcccctctcccctcttctcttccttttcttgagagagggtctcgctttgtcacccagcctggagtgcagtggtgtggtcataggtcactgcagccttgaattccggcattcaagagatccttctgccctcagcctcccaagtagctggaactataagcatgtgctactgtgcctagctaatttttacattgtttaagaggcagggtcttgctatgttttccaggcttattttaagcttctggactcaagcgatcctcccatcttggtgttccaaagtgctgggattacaggaatgagccactgtgcctggtctgtttcttgatgaacacttcaccattagaaggaaatttccttctaatctactgaaacagagggcattatccctactttgtccagaaggaaatcaaagctttgagagtcaagtaaattaccaaatgaacacagtgagacccagatctgactccaaagcgcaggcacttaaacatggtatcagaccatgtcaactttggacatatttgttgtggaaaaattatccaactttggagctaaggctgtcttatatttcattctgaggtgtcgtgcagtaagtaggctggttcatggagtgtgtgtgtgttacctgtgttactgtgagcttccccttcaccattgcagtagttctattttaaaggactttgggttatgccctgtggccacatgacaggcaaaggagctgcttggttaccgacttccatgcagtggaatgcatttgtatgtgagagagtgaactctgtttactccagcaaatcattgactacttgaattcctggcattgcatttcagagataggacactaatttggctggcctatgtatcatgtccaagagcatgttataaatgctcatatttagaagggaatgtaaagtgagtaaaaggtaataatgcgaaggtcactgcttatggtgtttatcacagaataggacatcccttgtatttccaatgattgttttatcatgataaaaagtgaaaacaaatgagtatgttggattagaaacctttttgaggactgtggaaatgaggtcaggggttcaagagagctctgtttttccttctgccttgagtgtgcttatgatcaaagtgggaggatgttcagcccagtgcattctttgtcctgtgcattgatgattcttttgtgctttggctaatttaatgtttgacatgtgtatgttggttattagtccaaaaaaggggctatatgtttgcaactctgctgttttttgttgtcagtttctagtgacttttcccacttaccacttctaagttaaagtgctgggtttttgtttgtttgtttgttttttgagacggagtcttgctcttgtcgcccagactggaatgcagtggcgcaatctcagctcactgcaacctccgcctcccgggttcaagctgttctcctgcctcagcctcctgagtagctgggattacaggcgcccaccaccacgcctggctaatttttgtcctttcagtagagacggggtttccccgtgttggccaggctggtcttgaactcctgaccttaggggatgcaccctcctcagcctcccaaagtgctgggattacaggcatgagccattgcacccggccattgctgtggatttttataagataattttctttttactcaagagttaagctatggtttgagcacatgggctgtggaatttattctacttgtttacttttttgaaggataatatacagaaaagtatacatattacaaatgtacaacttaaatactttttggaaactgagcacacctgagtagccagcttccagatcgaagcacaaacaattgtcatcctagtgccccatcctcttctaatctcttctgtcattctcttcccacaagggtaaccactaccctgacttctaacagcatttttttattcagcctgtctttgtactttatatgaatggaataatacagcctgtactcttttgcttttggcttctttttctttccattatttgagaggttgaacttgtggttgaatatagttgaaggttattttcattgccatatgatatttcattacgtggatatgccataatttatccattataatgttaaggacatctacgctgcttctagtttttgttgcgatgaatagtgctgtgataaacattcttgtatataactttttgttaacatatataagcgtttatgttggatgtatacctaggaatggaattattaggtcatagaatatcaatgtatttagcttgaatagatattaccaagtgacttaagagtttaagtagttgtaccaatttacatttccatcagtagtgtgagagttcatgaatttcattgttgagatgtttttttgggaggtgggtaagaggtgcatgctcttcttaggttcatttcagtacaagtttgttttctggaaaggaatggtcttagttgccttgttgattctttgaaagctaagttaaaaattagtctctgtgtactcacattctctttttactttttctctgtatatatgaatatatatgtgttttatgttgatgtcttctacatgcatatatagatgtgtgtatattttatcttaaagtatactactgtgctgttagactggacaggccaattagaagctttcttaatcaggcttctacaagtctctgaattcacaccgatcctgcttaagtgtctctaatgaggggaagtgctttctttttaggatgacccatccctttgtgaagtagcatattgttgcttcttcaacactgtggtgccatctgcctctttttaacttctcccataagtatcatgccctttcatatgtgagcaaaaaacccatgattcttataatacagtgaagtttcttcaggcagaggttcatggctgttttttaaactgccacttttcaacatttgcagggtcaaagtctctgagcagtttgctctggggaacttggatgaaaaaccttatggatgatgaaaaaaaaaccccatcagtgcaaaaaacccctcgcttttatttttcattgtgtttttaaggtttttttccccccatttcccagttcttttttcatgaacacactgatcccccctcattgggtttaaaccttgtttaagaaggaaatacaaaaaatgcacataatgtatttaaaaattagactgaaatgaataaaatgaaaaaacagcactgctttttatagaaaactgacaattatattaatgcatatcaatgaatacagaaaatcaatgcattatacttttgtcaaatcaatgaatatggaaaaattcttctgatggagataatatgagctctaagagatttggacttccatgtgatattaatattcatagaattttagaataaaaatgagtttttttctagctataattaataatttaaggttcacggatattacctaatagatattttctttctttacaggcaagaagagactgacaggagagtgaaaaatgtaagatacatttaccttaatggagcattataagtggctttcactttcatgttctgtaagaaggcagtgaatctaaaagtatactctacatctcttttctaattaattttttgctacaaaccaatcagttacaaacagtaaatatgtttaaatatatgcattacaatatatggttaggttgttcagctcccacttataagggagaacgtgtggtatttggttttctgttcctgcattagtttgctgaggataatggcttccaactctgaccatgtccctgcaaaggacatgatcttgtttcttttaatggctgcatagtattctagagatgaacaatgagaacgcatggacacagggaggggaacaacacacattggggcctgtcaggtgatggagggaaggagagtcttaggttaaatagctaatgcatgtgggacttaatagccaggtgatgccttgataggggcagcaaaccacaatggcacacgtttacctacataacaaacctgcacatcctgcacatatatcccagaacttaaaataaaattaaatttaaaaacatattgttagagtggtataagaggataggttagatttaggaagctgtttgttatgtgttagcaatacgctaaaggcaagtaaacacattttaagatttttataggagtaaataggaaactaccaatttagactttaaggaaaagcactgactgtttaaggactctgggtaattcatcaatgtagactcatatgtcttacaatattttatggaaattgcaagaatatctaaaaatgttgcagctttattaaaaagtttaacatccttattaaggaagctgagaattattgatgtttaggtgatcattctgtaagttcgatgaaaaaacattgattgctttaaaagtttcatttgtgttttctcttatttttttccctcttcgtatatactagtagagtatatgaatgactaccttttggagtctggacttttggtctaagaacttgctcagagacaggaaaatttagcaagaaaagttaagatttttaatgacttttacctttcccataaacttaaaagaaagtctacttttcacttacagagtaatatgtgctatcatttatctacagtactcacctatatttgagcttgcaattggttgctaatcgactgatcttgttgttcatggatttttttttttttaaggttttgataacattgtactggctgggaagaaaagcacaaagcaacccgtactataatggtccccatcttaatttgaaagcgtttgagaatcttttaggacaagcactgacgaaggtaagtaaactacatctgtgtgagattactgctgtaatacagtatcactgctttcccttcctcctctcttctttttcttctccttctcctctataacaaatatggcaactccgactctctttgtcctactatcaattgggctgagtaaagaggaatgttactcatttactggctttatatgccaccaccaaggagtcagttgggtctattccagagcaatttccaaggtagagaaacttgcttaccttttaattctacataatttgatgacacatgcattggcttccttccttacacactttatgtagcttaagtattgctatactcatcgtaaactcaacctgtagtagagaggtgcttcctggactgttcacgcgcatggaatttactcaatttctttgtagtaatatgttcttgtcatagatgatagtctttaatgcccacactttcatatccccacaattctaccatgccgcctctgtttcctaaagagtaggacatggtgttaactggaacttgatgtaaggtttttaatttagaatcttttgttttatacacatttctagtcattcatattttgcaatcaatgtgacagccttttgaatgcttgaggatcatttgcagagagccaagtgccaggactgaccgtagttctgccaaatcttcatttataagatccacatgggaaaaacgaatttctctgggtagggatatttattcagggaaatttgtaggactcagaagagcccttttgtgtagtcacaatggtgtttcatcatctaattagtagtcattgtttcatgggtttctctaatggttaaatgataccacaccagtaaggcatttagcattagcctctagcacattgtaaggttgcaataaatattagttgctgtgattggaagaaattttaggccaggatgaacatgataaccttggcttgcacctaccctgatctttaaataattttgcctgagcccagccacatgtattatagcaagaggtgggattatagagcctagaagatacaggtattcctgttcacccccaaaatgtaaggagtcaataacgctgtattcaaattccttgaataagttaattcaggaaatagctgagatattaacatgcatacacatagtactaagtgttaggaaaacactcatgagagactacgtaacctcataaagcacaattgtctaagataggtgagcatattggtcactgcaatgaagaatggtgaggctttagtggaggaatttcagggggctttgagcacagggagagccttgatttacagttatttcagctaacaaaacttttgattaaaacctatgtggggggctgggcacagtggctcatgcctgtaatcccagcactttgggaggctgagacaggcggatcacctgaagttgtgagttcgagaccagcctgaccaacatggagaaacctcatctctactaaaaatacaaaattagctgtgtgtggtgatacatgcctgtaatcccagctactcgggaggccgaggcaggagagtcgcttgaacctgggaggcagaggttgtggtgagccaagcctgggcaacaagagcaaaactccgtctcaaaaacaaacaaacaaacaaaaaaccatgtgggactttggcttatgtactagggctgtctttgtagcctttggtccttttaatgacagtctgactcaggttgaataatcctagtacagtgtctatgccaggaatgctttatcaaaggctgtttcctgttaccagtttcaaaaccagaggaggtagttgaagaccttatggtgtataaaactaaggttgtggttccattccattataataaactgggggtagctgttagaggtatgtgactatatcacatgttttgtatcagttctattaaaatcaaaaccaatgtgttcatcaggcatttcccatttaaccagataatgcttaaaagctaacataaaataccaattaaacaatcgttggtggaagttgtagcacctcagtcagtcatcttggaagttggaggtgactcattttaattgacttgtcagcgtgcctccttaaaagccaggcaccagggccaaaggttattttataactgaagtggctgtcatcaataactttaacatttatgaggtcaaaaatccatcttgagtgttgaactctaaggccttaacaaatacgtgtttgagaaacctgacagatctaaacgcttaaatttaaaaaaatctttctgtattttgagaagcattttggcagcaccagcgctaggcctggcttccccatctgcttggaagtagcaggatgtaaggtaggcacttgcattttcatgacaggatgtcaactctaatgccagggtgtcggcatctaaagcacatgaaatctccttgaaatctactagactttattggtgctccagacacttgtcaaacaattgaatcatgaattgacggtattagatcaaaagtatgcctgagacagctgctaattattcactgcaaactcttcagctttttcataagttgaaaatatttataattaaaagttgaaagaagagtacaacaaatacccagatatgcaccgtctggttcaattattacaattttccatactggctttatctacatatgtgtttatccatccatctatgtttttacttaaccattttaatataaactgcagatgtatttctcccccaaatactcagtatgcatctcctaagaatatgaatattcttctatgtagctacagtgtttattatacttaagaaaattcagatattccccattatctaatattcagttgacattaaaactttcatgcttgtctccagctacttttcacagcactttttattttgaatcatgacttaatcaaggttcacatatgtttgattgttagtaattactaggttctttaaattgtctctgtattagtaagctcatctgaaagtaacatttctggtttttactatgacaaaattatcttcaccatattaaaaaattatagttacgagatattcatgattactataagtcaggactacaccatgggctttgtaaattttactcacatcctaatgtttaaaaagccaggttatattttgtcactaacattcacagaagaatgttagttaaaagtgcttatcttgagtaagttctatataattcacaaacctacagttaacatcatttgtgatgttcctgtgtgtcctttatatgagccaaacaaatattttatttaggtccatagaaaataagttatatatgtcagcaaacaagtatgcttcccttgattcaacaagaaggataagccagctgccaggaccttagaactaggttgtgtaattagtaaaagtgaatgaattctgtgaaatttgtgcccacttgctcctttttatttttctggggggagagttaactaacttcagttgttaaggttttatgttatataagccatcacaaatatttcctggagatagagtgaatataatcttgctgatttatctccttttggatgactaagttaaggttagtttttctttttgactcttttcacatttattgctagagaactgtaataactgagtttagcatttcaatgttactctatgaactttcattaaactagtaattttccttatttttaaatagaacatatgtactagtttattaaataatattgaatatctccttattattactttgaatattgaatacccccttattgtatcagttgtgggcaaacaattacaaatttattttctgtttttcatcagctttttgctgtgtccgacagagaaacctcatgccttacatgtcaaataaaacccaacttaaattaggcaaacaagcaagtaataaccgattgattatattttttggaagtttatttaacttactattctttaaaaaacgttttctttaggcactcgaagactccagcttcctgaaaagaagtggcagggacagtggctacggtgacatctggtgtcctgaacgtggagaatttcttgctcctccaaggcaccataagagagaagattcctttgaaagcttggactctttgggctcgaggtcattgacaagctgctcctctgatatcacgttgagaggggggcgtgaaggtgtgttgtgttttggctgtcagtttatttgttcacatattaagggagaactgggaacaggagagaatagaaaaatggagcaaaaactaggcaaaaatttcacttagaagtggattttcatagagactggagtataattgggggttttgttatttttttctccttcatgatggtgatagtttcatttttgaaaaatttcatttctggaaaggactgagaggtgacagttaattgtggcctgttttatcagtgataatctatcctggctcttctctctccagattcaggcttaatttgtgttcaagagttctataaactgatatatctaaacatagaaaggaatataagattctgcaaaaaaaaaaaaaaatcttctagtttctgagtaactttcatccttggcttttttcaaaagattaaaaaaactctcttaagcaaaaaaagaaaaatatttttacaattatttctatagatgagaagaaatgattgctatctatcatgatagaatattatgttaaactttgtagattgagtaatataccaccacctaacatgcaggtagaaatcctcttttggtcctttcagagtcagagctaacccaggacagagcaagtgtgaaaggaacatgttagagacattctgttgcgggaaggaaccttctttcaaaatcccaagcttatggtcagttcagttatttcaatgcacatcttattcctgtggctactgggtatagcgtcagcaatttctgagtgtacatctccagctattcagatttgactagattgaaaccacaagtgaagttttttttttgaaatatttctgtgcttctatcgacatcaatgtgaaaacattgagttctggctgtgatttgtgcttaattgttagggattttacattgcttgtgtatttggaatattacttttctatttctagatatttttcctagcatatctatgacaaaaatgtcaaaaatcagcaaacttaaaataattgtacagcgaacacacatgtattcgctgcctaattccaccatgatgttttactatgcatgctttatcttatactcatctctctctcctctctctctctttctctttctccctccctcctttctctattataatttagtcatcttattttttgaggcatttcagaatatatcacacttgtcctaaatacttcagtatgaacatcattaactagaatttattctttgttttacttctgatgtgaaacttatataaatacaacatgctatgaatttgttttccaaaaaaccaatcaacaatttattaagcatggtaacaaaaaacctgaaggctttatcttttagagtagtagtttttaaaaataaaaaatgtgaaacgctatttcagcattaacctttataattactgccacacgtattggctgtttgctgtcaaggtgtgacattttcatagcccagatgacgattccaatacgtttaaggaaatgaatctgagtatgtgattcatctgagtggttaaagctgtaaaagcagaggctgaaattctgaacccgctgtatttcttttcccttactgaagaacctactccatgtaatgacagaatttatatctagtcaaggaataaaaggggaagggatagagggcatgtgggaatatgcaggcttcagtcagttcagatgcagtggcccacccagcggtgtggaatctaagtcgtcttctcagatccttgttggaatgggcacctgtccatgtaaccaaaagcagaaggccactgtcacatccctttctgatcttggaaatggggctgcagaccttgtttaaagagtgcgtaagtgaagtcttggaaattacaactaagcggggaaaaaaagcctgggatggaggcaccaggccgataaagctcttttgtgatcagtgtgttaaaattctactgctactctctagattgtagtcctaaattgatgagcactataatgtagggtaatatttttaggataacagaattgcaatgtcacattctctagttttacgtgaaaactcatatcaagaatgatactttgggggaaaaaattctctgcaggacaccgtactgggctaaaaaatactttttcttaaaagttaaaaagtaaaatagtctctttatgactttaaaattccacatgtatggatttcggcaggagtaattgatatacttattggaaatgagaaataaatgtctgattttttagaaggtggtaaaaagaaagcaccagtttattgactactactcctcatggtcacagctgcgtttactttccctcttttgccaagactctactctccttttactctgtccctgtctcatagctgtatgttaagcgacttcctgtagactgttctcagtgttatttactgtagcttcctgccaggcaggagggaggggaagagactgcatttaactcaggttaaccctgcaggtgctctacctgctgagagcttgtagctgtcaggcactgtgcacagccaggcctggagagaaccctggtgagaagcaagtaacatttccaaacctttacaagtgcacaggaggcaggaagagaagggtgtgaaagagggacagcttggcttggatctgtagtgttgttctccccccttttcttcctttgtctttaaaagagtagattcattcttcttcttttaagaaagcagattactatttgtatctatctgaccttgaggagtatcaaagggtgttcttttgaatttgtgtttaaatgattttgaatcataatacagcgttcccaatataatttccatggccactctgaagaaactgtgagttctgtgctctcatttgggcataagacttcagattcctttggaactttagaagtcatccagtccagcctcatatctaatgtgtgattctggtttatagaatctatccagaccctttacaagcttgtttttttttttcttctctttctacatccttcctgatctctctcctcacatatattatagatagctgcatgccttattttaaattactgagttctcccagaattatttttgcatgttgttttaagtatctgtgactccattgctagattttatttctatgtattacatcaacaaatcttatggaaaatcatggaggaagagattgagaaaaaaggggctcactagtaaaataggacttattcttcttagagcctacagcagcaaaagaatgtactgcatgtgcctccagtatgcaaagcaagttcctcctaatggatcttatcacaacttcgtgacaaatttctaaaaatattccctgcagttagcagtggcagcactgggtttctaagggaaagacaaagcaggcgcgctgtgtgggtttcagttaggcgaataatctggagagtaaagcaaattcttgtgccttctttataggttttgaaagtgacacagattcggaatttacatttaagatgcaggattataataaagatgatatgtcgtatcgaaggatttcggctgttgagccaaagactgcgttacccttcaatcgttttttacccaacaaaagtagacagccatcctatgtaccagcacctctgagaaagaaaaagccagacaaacatgaggataacagaagaagttgggcaagcccggtttatacagaagcagatggaacattttcaaggtactgagatgggtgtgattattgagtttcgtatgcttttcgaatatggtaggatgttaaatgtggtaaaaagaatggctcttaaatgtgtttcatagatcatatattaagcttgactagtgagaatatttttcatccctctatttttagttatacatatcttgaagccatttcttctgttttagaatgtcagcatatgatttgctaggtctttttttagatgcatgacttcagtttattggtatttttcagcttaccagataatttgtattgttcatgatgagccatgccatgtaatgtttttccttttttgattgatcttagtggacatgaaaagaatcctttaatttctcagcaaattagcagaacagagtgtggttttgcaaatccagcttcctctcatggggaggcgtacggttttgaaagtggttcggactctgaggatgaacgaaggtttcctgacatagttttggatgacttagccaaccgtagattccaagtgaaaaagaggccccagaatttcatctcgaaaatcacctatcctaattcttgtccgcaaatattttctcctgctgatatgtttgccatggggctatatggactgacgaggtcagaaatacttgtcctggatctggctgtctattatgctgctgattttaattcagaaagtaacaccccaaattgtttgttatgtgcctcttccttttaacacagcttctaatgaagtatctttggcccgtgtgtatctagctatccttgagttaaaatgagatgctgttataataactttgtcctaggagctgtggtggtgatgagaatggaaactaatttgctttgttcacagtggtgtaaactttgtgaaccagaaagcatgccatttgtgttctgtgtcacaaatgctcatacagtgtcttaaccggttggatgttttgaacagtaatcagaggaggatttggggcaccaatgtggagaactggccaactgtacaaggaacttcaaagtcctcttgttatttggaagaggaaaaagcaaagacaagaagcatacccaacattgtaaaggatgatctttatgtgcgcaagctcagtccagtcatgccaaacccagggaatgcttttgatcagtttcttcccaaatgttggaccccagaagatgtgaactggaaaagaataaaaagggaaacttataagccatggtataaagaatttcagggattcaggtttgtcgttgtgcatgtttctgtcacaccagtgttcattcagtaccccagctggggttctatgtgcatgttttttataataataagagagacagagaaagtctaattagttctctagtatctgcggaacctatataatggaaatgaatttctgtttaaatttaaacctgaggatctagatcttaaaaagccctgttctatacatagtcatagcacggcattatttttagtagttctgtttttctccaattctttgtctcattccctcttcccttcttttcttcatgtcactcacagtagaaggaattcagactctgaggatgaggactcaggttctgacagaagcgccaccgtttttagtagagcacaaaaagcagagcataggctagacggcaactgccaaagaccttcactcttgctggaattagctaccaaacgggctgtaaaatcaccggactcccatgcagccaggagaagcagtagtgcttcggatgagcccaggtgcccctgtctgcatgagcctgcctgctgcgggtctggcctcagacaaccctctgcctgcttctgctgctccattagcctgggacctgattgcactgaatcaggaaacctgactcacttagtggacttagtacaaaagcgtaatgtataacacgctgctttctgtgcaactacatcagcttggaagtctgtaggattcaacattcttctttagcacaataatgtgtgagacaggatatatttacatgtggcagttcttttgaaaagccggttcaaaaaggcttgttagaaagtttacctaatttcacggttttgttgtgtgtggagatgtggaaaaaggaaataactttcaggtggagactgggaagggcaagtctagggaaaatgcaaagggaagattccttgagctcttttataaaacttcagagcaatttattttccctttttcctgctgattacatatacctattgcataaagtgcatgatgcacaacttgtgaaactttcaaagattattccttcttcttcaggggacacttaggccactgtggcaaatggaatgagaaagggataccaggggccaggcggggtggctcacgcctgtaatcccagcactttgggaggccagggcaggtggatcacttgaggtcaggagtttgagaccagcttggctaaaatggtgaaaccttatctctactaaatatacaaaaattagccaggcatgatagggggcccctgtaatcccagctactcggaaggctgagggagatgaattgcttgaacccaggaggcggaggttgcagtgagcagagatggcgccactgcactcagcctgggcgacagagtgagactctgtctcagaacaaacaaacaaacaaacaaacaaaaaacagggtaccagggagtggcttttgtgtgtgcctgggaggggtacctagtccatgctccagccccatccgtggcctccatggtgcccaactttcctgagaagtatgctctgctcttatttctttagggattatccaggaaagtcatgggtgttggattaaatgctagtctgttttcctagcaagagtccccacaatggtcctctaaaatgatttaccctcagtaactggctagttggtctgctaatcacctttggctagtcgatctgctaattaccttttctccctaagcttaataagattctctttcctttttcctctctgtgcatcagtcagtttttactgcttcaggccctccaaacatactctgatgacatcttgtcttctgaaacacataccaaaattgatcccacttctggcccaaggctcataacccgcaggaagaatctctcttatgcaccaggctatagaagagatgacctcgagatggcagccctggatcctgacttagagaatgatgatttctttgtcagaaagactggggctttccatgcaaatccatatgttctccgagcttttgaagactttagaaagttctctgagcaagatgattctgtagagcgagatataattttacagtgtagagaaggtgaacttgtacttccggatttggaaaaagatgatatgattgttcgccgaattccagcacagaagaaagaagtgccgctgtctggggccccagatagataccacccagtcccttttcccgaaccctggactcttcctccagaaattcaagcaaaatttctctgtgtacttgaaaggacatgcccatccaaagaaaaaagtaatagctgtagaatattagttccttcatatcggcagaagaaagatgacatgctgacacgtaagattcagtcctggaaactgggaactaccgtgcctcccatcagtttcacccctggcccctgcagtgaggctgacttgaagagatgggaggccatccgggaggccagcagacttaggcacaagaaaaggctgatggtggagaggtcagagtgtgtttctgcaaggattttgcttgtaatggatggtcttgtgtaacttttctcatgcgagaaagcagctcatcgtgttgctcaactctgcatgtcgcgtgccattttgaagcatcccgtaaaatttaatttgctttgaaaaaccctcagtcgttttgtacaaaaagtgcaattccatatttgcatatctctaaataacttatttaggcctgtttaagactgtatatacataaaccttgcctttgacttaagcagtactgtggtactatccaccaatatgaagtttctggacttctcatgttcaggcatttttgtaacagtctggttatagtttggttttatgtgttgctcacattttagagtgtctgatttttttgggggggtgaaattttcccttaaaatatggcattgcaaatttcatttaacttaatttttggttttggcctaggtttcttggactatcatttgtaacttatttttatttatgaagttcagagtaaacgttgatgttaaaatgcatgaatggtatttgttgtctgctgaattttatgtgtatgtaatcatggccattttgatagtttgtattatgcaacttgcctttttgatgaatgttcagtttgtggaacttagagatggacaaatctgattaggttgaataaaattagaggatccaaatctaacttaacagttcctgacaatgggaagccttttcatatggatttgttagctcagagtaaattgaggaaattcttcattttgcttaatctgaatttcctgagataggaaattgatgagaacttgagacatgatcaagaatgtgatggaagaagtgaccttttgagatttgtccgtctccagttagattcttaagtggaagacattgaacgtttagaaactaatatgactgggaaaaatgactttttaatttttggttttctggtttcttagactctttcaaaagatttatggtgagaatgggtaagttgtgtggttcacagtaaaaaatctgtgcgtgttgtttgttctttgtataacttactgtatttctggcatggcatgtcactaaatggggttgttgtgtgctgtgcatgatattttttaagtgggaaatgtttatcttgcaacctaatggtaatatttctgtgtcttggtgcccagtgcaagataaaattatttgttttattaaaaatttaaacttcagcttcatcccttcttttttcctttttaaaaatttaatgagttgattaaaagtcacaaaagcacttgcctaagattaggtatatgtattttggtatttggttgctacatagactaaaattctgatttatggatgctaaagcccaaattactacattttagaaaatctgtgatggaaaaagaatattagcatttacttcaagtttagaatacacccagttgacattatcctataatcggccaactgggagcttcgttagtagggatgcattaaacttccctaggtggtatttggaagtattatattttcaagattcctgattaggaaaaaaaagttataacatggctatatttatagtgcaaaatagaccttcaaaaactgcaaaaatatttttaatttctaatatcactgttgcaaaaactacatttttttttttttttttttttgagatggagtctcgctctgtcgcccaggctggagtgaagtggcgcaatcttggctcacagcaacttccacctcccaggttcaagcaattctcctgtctcagcctcctgagtagctgggactacagttgcatgccaccacactctgctaatttttgtatttttagtagagacggggtttcaccagattggtccggctggtctcaaactcctgacctcaggtggtccatccacctcagcctcccaaagtgctgggattacaggcaaaaactacatttacagtaaatcatttattcattcttagtacaaaatcacaaggtggctatatcttaatattttccaccaaactttctgtaactttgtgaatctaagggctaatagtgtttgagcaagaggaagagagttaaaggatgacagatgttttaatctgctcaagcctcagtagctaagtatcttcccttacgaggatttacttcatctataagaatctctagttttgatagctttttataactttgataattcagaaatgttggaagctactaaatgtaaagcagtataaccattctagatgccaaaggtgtaactgagccacaggcaacaaattgcaagtacttgttagccactgattttaaaaaccagggtccctgcatgctttccgtgtgccatgcaaaggcacattatccgctttccagctcatctgcatgatgcttaaacatttgctactctcaagtcataggaaagctgttttaacttgattaaaaatctctttgcagctttaagcatgttgaattgtaactttcagaaaaattttcatttgtaaattaaatataactttataatgtaagcagctctcagaaatagttgcttttcttaaaggaaataaaagtacccagagtacaagtatgtggtggaaatgtcaacatgtacaaccatttcagtggctggatgtgttccctgtagtgaggggtaaattatatgactgagttagagaagaagacagaaacctaaaaccaaagcttgaaaagctaaagatttttctggattagagctaacagcagcaaatgttttctatcccaagatagttgtttcggatagtacaatatttgttttaaaggctgttgtgcatgcagttcaatgccaaggtaactacacaaataaagcaagattgtctgtaaattgagactgaataatatatgacatgtcaaacagtgggaagtattataatatgaatgtgtcctcagaaaattcaagtgtgttttggaccacttgaagtcaaataagtcaaatttataacaaaggatttctctctagtctgtcagttaccactactttttctttttctttctttttttctttctctctttttttttttttttttaagagatggagtcttgctatgttgcccaggctggtcttgagctcctgggccgaagcattcctcctgccttggcctcccaaagtgttaggattacagatgtgagccatcatgccctgcctaccggtgcttttcttaagtagatctgctgcagtgaaaagaaaatagaaatttaaattggattaagtgtaggcttttaatctagaacttgtttcatatttatgctgggtgatatttctctgaacataatgtacgttgtcaagcttggcatacttacctggaaaagcattattgctcaacatgctgtcattgaaaaataactgcctataacatgaatgctttcttttttgtaaggactgggttaaagagaaatgtgcagtatcttttgaagtctgagactgttaatttctggcttgctctttgtttggcgtttaacacctgtcagtttgtctgtttatttttaagacgctttgtatgtggtagtcgtttcttctatgtgctttcgtcttgcatggatttatgtctgtatggtttcatgaaacttgaaaatttggtcatgtgttttggcagaagcaatttatgacaaatttttttgtaagaatatatagaaataatcttgtatgtgattaagctgttgaatctgttgccagtattaataggaaatgaacactgatttcacatgaagttgtaataaaagacaattaagtcacccacagttcacttatgggtttggccaaaagattctgtagaattataaaggcttatgacagcaaaaaagaaagggaaaaaaagccaatttcggttatttctagggatttccctccacccccaggagacatttggcaatgtctggaggcattttttattgtctcattgggtgggtgggggtgtgtgcgctactggcaactagtgccttcatagccagagatactgctaatgtcctacagtacacaggagtgccctacaacaaatagttttctggccccaaaatgtcagcagtggtgctactgaggaaccctcattgagactataaatctataaatgaaaaatctacatcacattgcctttttattatagtgtatggtaattccaaagcctcttgcccaagttttagcattgattgctcttcagagaattcctatagtacctgatggaaatatacttagaggtacataaatcagtatgttcctatctccctctgaaagttggggagccttaaccctagtatcatggaatttctgtttgccgtataaggctatccatgattttatatttgagaaaatttgccacatgctggttcttttcgatccttactccttagatagtcacctataaagttcctgaaagtgagttctaaaaggaaatgccttaaaactagccaaaaagtgacaggagcatagtaggcaatctgcatagtgggagaagagagtaagactttagcaaccttgttttatgattgacaccttcttccttaaagttcctctttttccttctaaatgttatttttaaaaaattctattcaacagaaaggcaagatgctagatctgtattttttggaaaaaatccagttgcagttctaaattggagcctttccaaataaggaaatacaaatgaagcaggacttgtaagagacatacgatgtgatttgccagctaatcatccttcattcaacacaacatactagagctgtgcaatccttcatagttttcccaaacaattttcctgatgctatctttggtacttatctcaaatctgtgaggccgacagatagggatgtggagatagagaaacaaatattgccgctttcccaaggacatgtggcttgtgagtggtagaaccagactagggcttcgcctctgagataattcacgtagactgcttggcgaggttgctggcacacagtaagcactcagaagctgaatattatgccattaatgctgataagggagggaagaattctttgtgatctggctgagagactccttcctctactacaaaagttctggattttatcactgtggtccggggtgacctctctgatttgaagcagcttggagagttagcttttgggagatcccaaacaatcatgtttgctttaatgagaattagtatatggcccagacggttttaaaaatgctacccacacagccaaatccagttctcataacaatcccttcctcacttagcaggtgagaaatgggggctcggaagtgatctgatgtgtgttagggtggggtgaaaactggcaccatggctgggcctgcagccctcccttcctggcttgttgcagtgcctggctccagctgctgtacagtgtgtgcaggcttgatgtgggtaactttttgtaccctagggagtgaactgtgctcatgttcctgccttacacagggacttgtctactccagagtgtatttggttcactttgttcacatgaaggaccacctgtgtgccaggctgtgctccgtgttgggggcacccaggaggaggatgcagcctctgtcttgagaagcacatttcatgggaagacaccttagcattgcatggtgtaggaggattagggccaaaggagagcacccctgggagatgctgggctttctagccttcctcccatcaaaagattattaaaatattagcatccttttttgtttttgttctggagtttatgtaatctcatgtgttgagtgtctagatacccctcatacctggttcttgaaaaatttttcctgcctcttcttagtgagtctgtcatagtattagttcaaatagcctcattcttcatagtatgacttacgtgaatctatattctcaaattcacacaaatcagctttataagtagtcatacctagttagatatattacattaatagatccatctatattcatatatgtcctcatatattctctcaatataatttattccttaatagtccttaataaatcctataaaactttcttcatagaactgtggatagccataataatcttacaaaaagaattagaaacattttaagtatagcaaattttgctggattaaatgtgagaaaacctacctcattcttaccgtagacattgaatgagtatatcctgcctgccttgtgctgctaatatgttttcctcctaagcaacacgtgacttgtgaggaagagaatccaaacatgcacatgcacacacagacacacatgcactgtaacagacataaggctgagggttcagtactatgaaaaaggtatagctgaagcagtagagggattgagaggagggacagagcagctttgatatggatgagctgggaagacttcatcaaagtgctgaatattatctagatcattaatttaacacatttatcgggcacctactgcaggctgggctccccttcaggtacaggtgatgtaccagcaaacaaatcagaaaattcctgctttataatcttacagggcaaggcaagtgataggtaaataaatgtacatgatggtgagaaatgctttgaaggagaaaggactagggtgggtcaggggagaggggcatttattatttctggtaaggtggtcagagaaggaaacacagagggcacatttaagcagatgcctggaagtgagagagaagctatgtggatatctgggtgaagagcattccaggcagattgaatagtagggggaaaagcaggaggtgtgagcagggcagggaagccagttggctggagcagagggagtgggggcatggtactgatgagcacagagaaggaggtaggaaccagggatggcggacctcttagattttggaagaacctgtctttaactctaatgaaatgggaagaaagtagtgggtgctgagtagaggtataccatgatctgagtgcagtctgaaaggaactctctggctgctgttgggtaggaaggggtggaagcagggagactgttgtaatctaggtgggtgatgtgatgtgattattataataattgtaataatctgggtaggagatgatgtgataattgttataatccaggtagcagatgtgattactgtgataattgtgatcatccaggtaggagtcacttggatcagggtgtaatggtgcaggtggtaagaagtggttatgttctagatatatttagaaggcagagggacaggatttactgacgggaccagttatggtatatgagagaaagagaagaatctgggatggctccaagatgtgtgacccaatgttgtgaaggatagaggtgacctttactgatataaggagagtgagagctgagcaggttgtgaagaggacaatcagttttttatctatgacaaacttgagacgcctattagacttccaagtggagaatgaacaggaagttggaaatacctgtccaggggtcctgaggtatgaatggcatttaagaagttatgtatactggtaaagggcttttgaatcagaggaaatagtttaggaaagatgtttgttgaaactggaggttgggtattaatttaagaagccattttggaagtctaggtgagttgactgtactctgatctagggtgttggcaatagagatggaaagaaagagacactgaatgaaagggcttgataactaatggaaagtggggagaagggagaaacaaaggtgaaaagtggttgttaggtttcagatgtggatgattggagggcaggtagcaacattagtaaccacaagaggaaaagcaggtttggggacaagattgagtttggtcacatcaacaataaccatgcatttagtgagttacagtttacaaaatcccttctagatattattttaatctgtcctttggcaattgaagtgcctaggggatatccatgcagaaagatttattcaagaagcaagtggaaatgagtcaaaggacggactggttccttaattatggcactgggaatagtttagaaattacaattccatgagctagctaagctaggaattcctgaactagctaagagcaaacatgctttaaaagaaataatgatggcaacatcttggaaggcaaaatttagatgcccaggcaagaggtgtacagttacttaaagtcaggagagcagtataaaaggtcagtaggaaagagcttcaaaggctcttgctctcattcctacttctcctcagtgtttagatctgacctctccctttccttgagaccacccttaatctctctttcccctctggtatagtttacctggctcttttatgtgcatgtagagagcacacatgtgcctgtgcccaacaccccactctgttcattggtttctgttgtggattgagctcttccaaagcttaacctcagtccatccttgtgttacaagttgaaagcatgcaagctgccctaataaaagaagagggttatagaggtagtataaaggactattagaaactacctgtggtgcgttgagaacaagtctagtgcagtggtagggcggatcttataggatcttttagaatcaacagcacatttattcatggtattgaacttgagaaaaatatcaggtaaacattaaattattaatcagtgcccagaaaaggcagccaaacctcaacagattatctttgaaggagatagaaaataaagagagataattctagtgactattttttcctaaagtaatcctttcatgcattgacctctttaaatatgaaccttgggtttttgtttgtttgcttgttttttgtttttttgtttgtttgttttttttgagacttgtatagggctaatctagccattttgtgaaaaaattcacactcgagtgctcttgtttctgagttttggaaaaacaccatttatctctgtagtgctacttctgtgacactatcactgaagcgtctaggtagaaatttaggtggaatttccaaatttaactccaacctcagtttaacccctaagtctggtcatgtgaacttccgtagtaaccatgagtctttttgttgtaggagtaagtccatgagtgatgtcagcgcagaagatgttcaaaacttgcgtcagctgcgttacgaggagatgcagaaaataaaatcacaattaaaagaacaagatcagaaatggcaggatgtgagtattttggggattggaggggagagagtgtatttgtctaacttttctttgcttctcttaaagtcaatatactcaagaccattttccttgctattacagaattcagttctgtataaaatgtgaccaactttctttacaaagatttttaaacctttttttttctattattattgcatattttaaaggccattgtgaaaaatatacctggatgtttattttctaacattctctgagttctcaaaaatgtgagttgcttccttgcagtatagtgaacttacttacttgttttggtggttgaatttgggatatgcacattaactatactctaatgggaaagacctggccaaaatttagggagagaagaggaacagggttctggcagagaccttggcatcagtaaggaaagatgaaaagggttagtaattaagagttaattaaggagaattggggagaaataagtaatataactcagagcaatattttggctgaagaagtcaataatatgaaccaaaatgaaatgtttttgcagagttgacatatatccaggtgtttacatagatatagacttactctttagttttgatcctgaagaaaaaagcttgaccattttttttaatagagtaattgtcataaactgaagaaatgcaaagaaatacagtagacaaactatcagagcaaacccaaaggaatttgaggacaactttatggtaagagttgagcaaaagcatgagcaaaggagtcagagtaaatcttaattttcaaaggaattaatagtctctgaaatgaagaaacccctgctctggctacccttctaaattccagtgcctcttttaattgggaactcaatttaattgtcaagaaacagtaattcaatatcactttgccaaaatacatggttaattttctggtgtgaaagtaagtattacgggcttatctattaggttaaatcagataaaaattcatgccagttatgctataggactaaatgcgcattgcttttgttctttctgcaaggagttcatattggtctcaggctgttttaaagcaggagtggctctgtgggcttgcaaggggtataaatcaaacgtactttgcatgccctgggggtgaaattcggttttgtctgagaccttgaatgtgcttctgtttggactggaatgccactaacagttcttagcagttctctattttggagacatggaaaactttataccttgtaaaatgtcttaaccccctgggtgtcagaaccagcctaggtttctgggggggattgaaaagctgaattaggttgattgtccctggggtcacccagcaaggttaggcttaacgttcctggggatatgggggacaggtgttggtttgttcctgccacgtgttccttattgcgctgacctaggtggacttaacccttctgaaattgcatactcaagtctcaccttcccagttaaagcctttccaaagccttcccttccggaggtggaaccggacccatggtcttcttaggaccccactgtctcatgcaatcctgtcacacttgttactgaacttttgtttatatgtctgtctctcccctgtagactgagagtttcttgaggggaacagtgccctatgcatgtgtgtattaatagttcctacacttgggcctgcctcaaagtagggattgaactctgtttgtgaaatgaaagagactatgcatctgcgcgtaaccatcacaatcgtgtttctgttttggccttaccagtgaaacatgtttcgcagaacagccaggtttttggagtgagatgaaaacgaactggaaacagttcctgatctatctaactgtcacctaattacaagcatttagcattctttatgaagtgtgcaatgaggcagatactttctgggaaaacaaaaatggggtctatcttattaggtcaggtttttgagacagacacatgagataaaggcttggtacagaaacgctggctataaaaagcaaaattagggcaccttggcatccagttggagtgaatagtttcagtgatgtaataagatactctggcacattctgtctgctagaaagggtgtatagaaattcaggtgtgcccctgctgatgtgatttttctgtcaggaccttgcaaaatggaaagatcgtcgaaaaagttacacttcagatctgcagaagaaaaaagaagagagagaagaaattgaaaagcaggcacttgagaagtctaagagaagctctaagacgtttaaggaaatgctgcaggacaggtaataatgctgaatgcacctcggttgtaacagggttggagatgccagtgttataaatagatattttatgtaagtgtagtgtgacataggtgtccaccaatattcaactttagtcaaatatgcaaagaaacgtttaagattttggtctgcggtgaaaaaacaaagcattgttgaaatagtgacttagagtaatagtaacaaaataaatgaggacttaaaataggtgttcattatttcttcttacattgtgcattcacatgcagaattggatggtgttggctgtgtctgatgcaggaaatacactgctttttactcttaagtgaattaaggaatgagatggtccaataaaatcagctcactcttttaactaaattgtgtaaaatataacgaagttctttttcatgtttaatggtgcaattcattatattttaaagaaagtttttatgaacataaatgtgtgtgttttacttactctttgcattgcatcttaacagtataaaggtcaaatttaaactttaatgtaaagcattcattactgtgtgaaacatcaggatatttacagatcaaggagaaggaaaatacgcttttagaataatgtccaaaaggaaatatgctgtcaggtgaaatgaaacaaagccactttctgccctaaaagccaaagataagcagtttcattcacttaaatgcaattcagttattttgggaggtaggtattcctttctagatgtgagagatgagggtgttttatgaacctttctataaatatgaatggtgacttttaatccctgataaatgttcatgcaagttctgtcaagctatgtgaaatcatacaccagtttgatctccacaaaagcctgagtcttttgtaatcttttatttttactaaattactgtaaatttttgcaggaagaaaatcctcacaagactgtcaattaatccacgactttggaaggttcaaattggttgtcaatcatgatatttatagtgttttaattttaaaagttataagcttgtggataaaattttgtgaataatcctttattaaaatttccttgtttcattaaaatctctttacaattaataatatcccagtgaagtatttgagaaccattttaattaaagaagtcaagttattattctttcttagttgggacattaaagataattttatacatcttgctgggcatggtggctcatgcctgtaatcccagcactttgggaggccaaggtgggcagatcacaaggtcaggagttcgagatcagcttggccaatatgttgaaacctcatctctactaaaaattaaaagaaaaattagctgggtgtggtggcgcatgcccgtaatcccagctactcgggaggctgagtcaggagaattgcttgaatgcgggaggcggaggttgcaggtgagctgagatcgtgccactgcactccagcctggacgacagagcgagattcggtctcaaaaaaaaaaaaaaaagataattgtatacatctttatgctctgtaagtgttgtattgattcttgtgtgaagttagcatcattttattcccagtccgtttcatgcgttgattactctctcaccacctctgtgtgtcaaatgtgtgtctttgtggtgatggtgcatttctctccgctaagggaatcccaaaatcaaaagtctacagttccgtcaagaaggagaatgtattcttttgatgatgtgctggaggaaggaaagcgaccccctacaatgactgtgtcagaagcaagttaccagagtgagagagtagaagagaagggagcaacttatccttcagaaattcccaaagaagattctaccacttttgcaaaaagagaggaccgtgtaacaactgaaattcagcttccttctcaaagtcctgtggaagaacaaagcccagcctctttgtcttctctgcgttcacggagcacacaaatggaatcaactcgtgtttcagcttctctccccagaagttaccggaaaactgatacagtcaggttaacatctgtggtcacaccaagaccctttggctctcagacaaggggaatctcatcactccccagatcttacacggtaaaaaatgttctcggttcatttagtctgttctgaagagcaaaatgttggtgaacttgtgcagaggttggggttacatcaacttgatgtgtaaactgtacataacatatataaggacattttattttatgccagtttagatgcaatggaaacttaatgcttaagatatatcaatgatacagaatttattaaactttaaattctgtgaaagtagggctgatacattttaaagaatgaataagatatattctaaggcagagtattattttataatgtcttttttttagatgtaccttttgtaaagttttaggttgaaaaatatgaagttgtcagtatgattgttcttcttgacctataaaacagcaattcatatggtttagcctagagattttcaggtgcttatgtacacatttctgcttttttcagatttctcactttatcagtttgaatgtaattattagaatatatcttacgtttatatatatgtgtttctactagtgtcaggattttgaaggggttagaatattgcagcattttttctgagaatgaagtggtaccatatccgacaatgagtgtgttaatctgaattatgtgaaaggaagcaacacagtcctaagattaatgttcaaattctttttagctctgctaatgtacaatcctaaactctaaaagggtataaaaaattggatatttggggtgagagaagcttacctaagctaattgggaaactcctgatcattatataaaggaaaatgtagacatatttgacattataagaatttcatggcagacccccttaatgtagtcaaaagacaatatatagactcagaaaaatattatcaaaatgcattttagggttaatatctctaagacagaaaatgtttctacaaattggtaagcaaatacactagcaaaatgaatatagaaaagtagtggccaattcaagggagaggggattcaaatgtctggtaacaaagcacaaagaagtatgttcagcttccctggagcaagaatgaggcatataactttttacccatcagagtgaaatagacttaaaaacatcgaaaatatctagtgttggcaaggatgctgagaaacagatgttcctcatacattacttcggcagtgtgttgctacaattatttttagaaactatatatatatatatatatatatatatatatatagtttctaaaaattatatatatataataaaatatatatatatatatataaaacttttgctccagcaagcctacttttggaaatctgtgctataaaaataaaagttccaattataaagagttatagatatttgttgcagtagttttggaagtgacagaacatttcaaacaactttaaatgcacatcaaatgaataaattgttgatgtccatactatggaacattcagcaagtaaagggactggtttagagttctatctgttgacctggagtgatcaatagatagaacaccaagaccttttggctctcagttaaggggaatctcatcactccccagatcttacatggtaaaacatgttctcagttcatttagtctgttctgaaaagcaaaatgttggtgaacttgtttagaggttagagttacaccatcttgatatgtaaactgtacataacacatgtatatatggcaatttcattttacgccagtttagattcagtggaaatttaatgcttaagatgtttgcttggagtaaacaagcaaagcaaatttcggaagtttgtatgtgatatgaatgcttttgctaaaacaattttccctcactacgtgtttatctgttggtgtgaaagaactcagcccaagcttttagcaatagttatgttactgtgggaggtatgttattttagttttaaaatattaatttaataaacaacttttaaaaacagaaataaaggtaacagaatatcaagtttaaaatgatgttttcttatttagatggatgatgcttggaagtataatggagatgttgaagacattaagagaactccaaacaatgtggtcagcacccctgcaccaagcccggacgcaagccaactggcttcaagcttatctagccagaaagaggtagcagcaacagaagaagatgtgacaaggctgccctctcctacatcccccttctcatctctttcccaagaccaggctgccacttctaaagccacattgtcttccacatctggtcttgatttaatgtctgaatctggagaaggggaaatctccccacaaagagaagtctcaagatcccaggtgagtttggaaaagttctttatcatctgtggctcagacacttacacatttaaatctggaaaccatgtctcaaatgtcacacctctaggtgttaatctgggctgaaaatgtgcaaaatgatattctggtttactttgaacagatcttggaggaagtaggtctctttccactctgagtgcatagatccagataacacttgtgatatgagtgtatggagactttgtgcaccagtctccttgggatttggctggtgttttctctatattccatgtttcagtagtggttgccttatactgctagtgctatagtcccaggtttcaggtacagcagtcactttaaaggttttacatgcagatctagtgtatatttgggtgacagaagccctttcccagggaactcaactggccgcaaggaaaaacatgataggtgctggagtctagggacatggcatttctttttcgataattttaaccttctagtgacttttaatactattttgtactttagaacgtctataattttcgatggtcccttgtctctaaatgggactattgaggcttggttataatatgacaattgtattccacaacatttggagtccaaacaaaatataccatcagatgaagaatgactgggggcatgtgtagtttttcctacttaaatttctaatagatgacttctaagagaatgattaggtaataaatgttttttgtagcctacctgtaaaacatactgaaagcatttggggaacagaaagtgtctctctcttagaaagattctttctaagcattttgatagttgtatgaaccccttagcatggaagagcttttgtggtcctttggcttggtttagtattccctgttgccctgcaaaacattaagtgtgtattatatacattaagtatgtgtatatatatgacttgtcctaagttatattagtattagagtgtgtgtgtgtatatatatttatatatatgacttgtcctaagttatattaataaaatatgtgaaataatttggcattgcatatttattattattgagtttttatttgtatgggaaaacttaaaaaatttaaactttcttttctggttgtaaggtactatgtgcttgagaaaatttggaaatgcaggaaagtataaataatttaaattgctgataattccatcatttagagataatcactgttaacatctaggtatatttcttttgtttttttttcccatgcatatttacatatatctaaaaacagtttcttcagcttgctgaaataattagttgtaaattatcattacatttttaaggaattggaaatatataattaacatgctaagtctcagtggagaagaacaatagcctgtgttatacttgggcaacataaggtaccagtagatgaataataaaagcagaagcgaagtgccttttgtttcacagatttgcatgtttgcctttacctttttcaaatagcaaattcaacaaagcagcctgaatcatgtgctgcacgctgggtgttggtacctccctcagggtggcagctgactaactgcaactgtggattaaggaaaagaggctaagtgtggtgcgtggttgtgtctcaggttatcgcaactcagaggagcttcaattaatgtggcactgtttcagatttcctcattaatggatttatacttctttgttcccaaacttgagagggtattccaccaagaaaaattaggcttgatttgacaagtgaagccattggaattctttaatgtggatataattcatgtggtgacttacgtatctctgatgcttggtgtgtccttttctgtgccactagggcagtagcttctatagcatccccttgcctttgtctcagaaggagcttactgacttgagagaaggatgtgaatgtgtgtgacagctgctgagcaatatgtaaagggcctgtgcaacactccctgaaactctattcagatgttataactctaggtgttcagaggacagcaaaatcaagagtagcatgtggctgatcatctaaatgtttcggtagctttgtgaaagaatgttcttcaggtcatttttctctttcataccttggacttttgctggcactgtcctttcatctcttcctccagactcccccttgatgttattcttttctttttctttctttttttaaaaattaattaattaattgatttttttagatagggtcttgctctgttgcccaggctgtagtgcagtggcatgatcatggctcattgcagcctcaacctcctggactgaagcaatcctcccaccttagcctcttgagtagctgggactgcaagcacatgccaccacgcctggctaattttcgtatttttttgtagagacgggcttttgccacattacccatactgctctcaaactcctgggctcaaacgatccatccatcttggcctccaaaagtgctgggattacaggtgtgagccaccacacccagctgatgttactcttttctatcctggcttccactatgctaattcaggcccttttcctatcagtgcaaatagtcacaggtgttagtgcatgctacacaagactggcatcagattaacttgcctgatgccaggttggactcaataatttctctgctctaaagcctctagtggcactgtgtggtttgctgaatggagttcgtggcgctcagggaagcagtgatatctctcactccctttgtagcgcagtcacagctgaagttagtgtgcttactatgtgccaaccaggcttctcagggcagtatcttagttaatcctcacagcagccctgtgaggtaatcaacaatccgaatgtggactatcatgattatacctgttttagaaacataaaaattgaggcatggcatgggcatgttacttgtccaaggccgtgcagggtaccaagtggagtcaggatttgaacccaggcagtctgactcaagatttagtatcatgttatgctatcatgctatgtcctgggaaagagacacgattcacctgcataccactgcttgctttttcttggacacatcacgtactttttggagcacatcactgctcccccatttgaagatgcttatttcccacatctctgccttttgaggtccaattatttctcaaaagcccaggaggaccccttcgttcatgaatcatgatgtcacccctcccccattggaatcaaacttcttacccttgaaaagtttcactcactgaactcttccttgtcccatagtgttacgtgttcctctttcactgatattctttgtacattcttacacataattgacacttaagttttacggacttgaactgcattcaaggccttaattactaggctgaagtatgaacttgatctggcaggtaatttaaagtccttattggtgctttagtgtgtgggaattttaagattaagggctgttttaggaatgtaagcactatggtgttccctagagttattttacgaaagctaagtctggaagcagagactggttaggagcctatcacagcattgcactaataaggtggtgtgtgccataaagtagaacaatcataatgaagggaagaacttaatatggtcttatttaaaatctgccgataggaatttccttttcatcctcatagctgagctgggggttttgtctcttgctgttctttttgcaccctttcttttgtggttttgcttttttctctacctttctggacaatctaggctgccaagctcattctagaggtgacccaaggcaaggaagagggagtgtgactcctggagtccttcatcccccctccgtctgccatgcagatgtggttttcatgattttccccaaaattggtcttgcctacaggtttctgttttttctgccctttcagagctctatgtttttaaaccctctacaaatccactttccagaacctctgctccagattttttaaagcagtaacccccaaacgggatgacacgtgtggaaggaaggaaggaagctttctgcatgtccatttcctgatctcatccccatgattactgccccttgggatatagtagtcagagcttcccttatcatagcttcatactgtgcattttgcttgcttctcaccttcactaggacctgctctctgtaagggtggaacacaatcctacatttctcactgtcagcgcagtgtctgcatctgtacatgttcactgaatgctgaccaaattttcttgactttagagctaagtatgtgagaattaaatgggattttctttaattgatccagaaactgcttagccggcacttgtattatgtttaacatttgcttccattggaaaaagaaggcaattactgggcatcagtcatgtgtgccttgacaccttttaaatgtttcatttaattatctcaataactctgcaaagtaggtgtattatccccgtttttaccaatgaagtacttgagatttgaaagttatgtaacttgccccaggctggtgaaatgcctgcgccacaactgcaatttatctgatgttaaagttttttgaaatatgacaggctcacgtttgaggactgccttatgtatagttaagagaccacatgttgacttatttggactttgctgtgtctttagaattttagagccactggggacagaaatgtcttttggtccataaagataaaatcatccttgaaaccattttgaggaaaggtggtattatatgtttattgaaacttaccagaactgaaatgtagagtttgaaatcttccaagtagggcagtaaggagctaccagcaatttaaaaatggagtgtgatataatagcatgttctataactaaagttctggcaactgtgtggacaatgaacaaaataagggctggaggcaagagagtaacttaggaggggtaaccacaggagtttaggggagatcatggcctgaaccaagatgataacccaagggagggtggcaaagatggggtgattcaagatggattatggacttgatagaactttgtaaaatgcaagtgtgtagggtggagagtaggggtacagggattgttgtgtggcattcgagtggggaacagttaggggaaagaaggagaaagaggcctcgaaggaatccagtgtttctaacgtgggcacctgatgaactattgatgcaattaaccaaaatatgaaaaacaagaggtggaagaacaggtttgggcggaagataatgaattcagttttcgaattgttggacttaggcatcggagacatggcaatgaatgaggttgctcacaaaagcatgtagtcagagaggctggagactaaggaacaaacaacacaatgaaaagagaagagaaaaaagaggaacatgctaatgaaactgagaagtggcaagagacatgggaaaaaaggctggagaaagtgagataataggtgactttagaagattgtttcccagaaagcaagaatagtgggcagtgcctggagggatgaagactcaagatgtatttggtaggtagaagataatcttggaatgggatgaggacagtggtgggtgtattatagaaacactacctgccacagtgggatgaaggaaggagagatggatcaggatttaga

SEQ ID NO: 541 - DNA, 1717 bp, Homo sapiens
gtcacaaagatcacagaaacagtgtatgcccgggcataagatagcacgactgtgtatgctctggaggactgaaaggctgtacaagccctatgtattttttttcaaatatacatatgcatgggtcttgctgctgcctcttttgctgactgtaattggactttgaagcttcgaagttatatcataaaaatttgtaacctttgtctgagagagagctcagctaagcaatcactttccacttcttttcacaggataatataaacgttttcttgaaagcttgtgaacagattggattgaaagaagcccagcttttccatcctggagatctacaggatttatcaaatcgagtcactgtcaagcaagaagagactgacaggagagtgaaaaatgttttgataacattgtactggctgggaagaaaagcacaaagcaacccgtactataatggtccccatcttaatttgaaagcgtttgagaatcttttaggacaagcactgacgaaggcactcgaagactccagcttcctgaaaagaagtggcagggacagtggctacggtgacatctggtgtcctgaacgtggagaatttcttgctcctccaaggcaccataagagagaagattcctttgaaagcttggactctttgggctcgaggtcattgacaagctgctcctctgatatcacgttgagaggggggcgtgaaggttttgaaagtgacacagattcggaatttacatttaagatgcaggattataataaagatgatatgtcgtatcgaaggatttcggctgttgagccaaagactgcgttacccttcaatcgttttttacccaacaaaagtagacagccatcctatgtaccagcacctctgagaaagaaaaagccagacaaacatgaggataacagaagaagttgggcaagcccggtttatacagaagcagatggaacattttcaaggcagccctggatcctgacttagagaatgatgatttctttgtcagaaagactggggctttccatgcaaatccatatgttctccgagcttttgaagactttagaaagttctctgagcaagatgattctgtagagcgagatataattttacagtgtagagaaggtgaacttgtacttccggatttggaaaaagatgatatgattgttcgccgaattccagcacagaagaaagaagtgccgctgtctggggccccagatagataccacccagtcccttttcccgaaccctggactcttcctccagaaattcaagcaaaatttctctgtgtacttgaaaggacatgcccatccaaagaaaaaagtaatagctgtagaatattagttccttcatatcggcagaagaaagatgacatgctgacacgtaagattcagtcctggaaactgggaactaccgtgcctcccatcagtttcacccctggcccctgcagtgaggctgacttgaagagatgggaggccatccgggaggccagcagacttaggcacaagaaaaggctgatggtggagagactctttcaaaagatttatggtgagaatgggagtaagtccatgagtgatgtcagcgcagaagatgttcaaaacttgcgtcagctgcgttacgaggagatgcagaaaataaaatcacaattaaaagaacaagatcagaaatggcaggatgaccttgcaaaatggaaagatcgtcgaaaaagttacacttcagatctgcagaag

SEQ ID NO: 542 - protein, 271 aa, Homo sapiens
QKKLGKPGRSRWNIFKAALDPDLENDDFFVRKTGAFHANPYVLRAFEDFRKFSEQDDSVERDIILQCREGELVLPDLEKDDMIVRRIPAQKKEVPLSGAPDRYHPVPFPEPWTLPPEIQAKFLCVLERTCPSKEKSNSCRILVPSYRQKKDDMLTRKIQSWKLGTTVPPISFTPGPCSEADLKRWEAIREASRLRHKKRLMVERLFQKIYGENGSKSMSDVSAEDVQNLRQLRYEEMQKIKSQLKEQDQKWQDDLAKWKDRRKSYTSDLQK

SEQ ID NO: 543 - DNA, 1663 bp, Homo sapiens
acagtcgttctgtaatttgtaatcatagaaacagaatgttcctcctcttatttcttccctgccaacagtttctgggtgggtgaatgtcagtagctggagttatttttaaagaggagaggtgaggcttgccgtgcaaagctggaaagagggcgtttgtttgcagagcagagctgacatcaaagtgtagattactgctcagtggctaggcacttgtcctgtaacaggataatataaacgttttcttgaaagcttgtgaacagattggattgaaagaagcccagcttttccatcctggagatctacaggatttatcaaatcgagtcactgtcaagcaagaagagactgacaggagagtgaaaaatgttttgataacattgtactggctgggaagaaaagcacaaagcaacccgtactataatggtccccatcttaatttgaaagcgtttgagaatcttttaggacaagcactgacgaaggcactcgaagactccagcttcctgaaaagaagtggcagggacagtggctacggtgacatctggtgtcctgaacgtggagaatttcttgctcctccaaggcaccataagagagaagattcctttgaaagcttggactctttgggctcgaggtcattgacaagctgctcctctgatatcacgttgagaggggggcgtgaaggttttgaaagtgacacagattcggaatttacatttaagatgcaggattataataaagatgatatgtcgtatcgaaggatttcggctgttgagccaaagactgcgttacccttcaatcgttttttacccaacaaaagtagacagccatcctatgtaccagcacctctgagaaagaaaaagccagacaaacatgaggataacagaagaagttgggcaagcccggtttatacagaagcagatggaacattttcaaggcagccctggatcctgacttagagaatgatgatttctttgtcagaaagactggggctttccatgcaaatccatatgttctccgagcttttgaagactttagaaagttctctgagcaagatgattctgtagagcgagatataattttacagtgtagagaaggtgaacttgtacttccggatttggaaaaagatgatatgattgttcgccgaattccagcacagaagaaagaagtgccgctgtctggggccccagatagataccacccagtcccttttcccgaaccctggactcttcctccagaaattcaagcaaaatttctctgtgtacttgaaaggacatgcccatccaaagaaaaaagtaatagctgtagaatattagttccttcatatcggcagaagaaagatgacatgctgacacgtaagattcagtcctggaaactgggaactaccgtgcctcccatcagtttcacccctggcccctgcagtgaggctgacttgaagagatgggaggccatccgggaggccagcagacttaggcacaagaaaaggctgatggtggagaggagtaagtccatgagtgatgtcagcgcagaagatgttcaaaacttgcgtcagctgcgttacgaggagatgcagaaaataaaatcacaattaaaagaacaagatcagaaatggcaggatgaccttgcaaaatggaaagatcgtcgaaaaagttacacttcagatctgcagaag

SEQ ID NO: 544 - protein, 261 aa, Homo sapiens
QKKLGKPGRSRWNIFKAALDPDLENDDFFVRKTGAFHANPYVLRAFEDFRKFSEQDDSVERDIILQCREGELVLPDLEKDDMIVRRIPAQKKEVPLSGAPDRYHPVPFPEPWTLPPEIQAKFLCVLERTCPSKEKSNSCRILVPSYRQKKDDMLTRKIQSWKLGTTVPPISFTPGPCSEADLKRWEAIREASRLRHKKRLMVERSKSMSDVSAEDVQNLRQLRYEEMQKIKSQLKEQDQKWQDDLAKWKDRRKSYTSDLQK

SEQ ID NO: 545 - DNA, 1577 bp, Homo sapiens
gacttttgaagggtggggtctgtaggaagaatccatgcattgctctgggaagtggcctcaggaagtagagggctggggacagaatcactcatgagttgcagttgttctgggcaacaaagcaaggcggatacttattctggtagcagggtggagtttgaactgggcagttacctctgctcaagccccttgaagaatttcagattccctgttaaccatggaggcatgggctggaagctgggtgtgggggcaggcaagaagagactgacaggagagtgaaaaatgttttgataacattgtactggctgggaagaaaagcacaaagcaacccgtactataatggtccccatcttaatttgaaagcgtttgagaatcttttaggacaagcactgacgaaggcactcgaagactccagcttcctgaaaagaagtggcagggacagtggctacggtgacatctggtgtcctgaacgtggagaatttcttgctcctccaaggcaccataagagagaagattcctttgaaagcttggactctttgggctcgaggtcattgacaagctgctcctctgatatcacgttgagaggggggcgtgaaggttttgaaagtgacacagattcggaatttacatttaagatgcaggattataataaagatgatatgtcgtatcgaaggatttcggctgttgagccaaagactgcgttacccttcaatcgttttttacccaacaaaagtagacagccatcctatgtaccagcacctctgagaaagaaaaagccagacaaacatgaggataacagaagaagttgggcaagcccggtttatacagaagcagatggaacattttcaaggcagccctggatcctgacttagagaatgatgatttctttgtcagaaagactggggctttccatgcaaatccatatgttctccgagcttttgaagactttagaaagttctctgagcaagatgattctgtagagcgagatataattttacagtgtagagaaggtgaacttgtacttccggatttggaaaaagatgatatgattgttcgccgaattccagcacagaagaaagaagtgccgctgtctggggccccagatagataccacccagtcccttttcccgaaccctggactcttcctccagaaattcaagcaaaatttctctgtgtacttgaaaggacatgcccatccaaagaaaaaagtaatagctgtagaatattagttccttcatatcggcagaagaaagatgacatgctgacacgtaagattcagtcctggaaactgggaactaccgtgcctcccatcagtttcacccctggcccctgcagtgaggctgacttgaagagatgggaggccatccgggaggccagcagacttaggcacaagaaaaggctgatggtggagaggagtaagtccatgagtgatgtcagcgcagaagatgttcaaaacttgcgtcagctgcgttacgaggagatgcagaaaataaaatcacaattaaaagaacaagatcagaaatggcaggatgaccttgcaaaatggaaagatcgtcgaaaaagttacacttcagatctgc

SEQ ID NO: 546 - protein, 242 aa, Homo sapiens
  VARIANT (1)...(242): Xaa = Any Amino Acid
LDPDLENDDFFVRKTGAFHANPYVLRAFEDFRKFSEQDDSVERDIILQCREGELVLPDLEKDDMIVRRIPAQKKEVPLSGAPDRYHPVPFPEPWTLPPEIQAKFLCVLERTCPSKEKSNSCRILVPSYRQKKDDMLTRKIQSWKLGTTVPPISFTPGPCSEADLKRWEAIREASRLRHKKRLMVERSKSMSDVSAEDVQNLRQLRYEEMQKIKSQLKEQDQKWQDDLAKWKDRRKSYTSDLX

SEQ ID NO: 547 - DNA, 1149 bp, Homo sapiens
gtcacaaagatcacagaaacagtgtatgcccgggcataagatagcacgactgtgtatgctctggaggactgaaaggctgtacaagccctatgtattttttttcaaatatacatatgcatgggtcttgctgctgcctcttttgctgactgtaattggactttgaagcttcgaagttatatcataaaaatttgtaacctttgtctgagagagagctcagctaagcaatcactttccacttcttttcacaggataatataaacgttttcttgaaagcttgtgaacagattggattgaaagaagcccagcttttccatcctggagatctacaggatttatcaaatcgagtcactgtcaagcaagaagagactgacaggagagtgaaaaatgttttgataacattgtactggctgggaagaaaagcacaaagcaacccgtactataatggtccccatcttaatttgaaagcgtttgagaatcttttaggacaagcactgacgaaggcactcgaagactccagcttcctgaaaagaagtggcagggacagtggctacggtgacatctggtgtcctgaacgtggagaatttcttgctcctccaaggcaccataagagagaagattcctttgaaagcttggactctttgggctcgaggtcattgacaagctgctcctctgatatcacgttgagaggggggcgtgaaggttttgaaagtgacacagattcggaatttacatttaagatgcaggattataataaagatgatatgtcgtatcgaaggatttcggctgttgagccaaagactgcgttacccttcaatcgttttttacccaacaaaagtagacagccatcctatgtaccagcacctctgagaaagaaaaagccagacaaacatgaggataacagaagaagttgggcaagcccggtttatacagaagcagatggaacattttcaagactctttcaaaagatttatggtgagaatgggagtaagtccatgagtgatgtcagcgcagaagatgttcaaaacttgcgtcagctgcgttacgaggagatgcagaaaataaaatcacaattaaaagaacaagatcagaaatggcaggatgaccttgcaaaatggaaagatcgtcgaaaaagttacacttcagatctgc

SEQ ID NO: 548 - protein, 308 aa, Homo sapiens
  VARIANT (1)...(308): Xaa = Any Amino Acid
AITFHFFSQDNINVFLKACEQIGLKEAQLFHPGDLQDLSNRVTVKQEETDRRVKNVLITLYWLGRKAQSNPYYNGPHLNLKAFENLLGQALTKALEDSSFLKRSGRDSGYGDIWCPERGEFLAPPRHHKREDSFESLDSLGSRSLTSCSSDITLRGGREGFESDTDSEFTFKMQDYNKDDMSYRRISAVEPKTALPFNRFLPNKSRQPSYVPAPLRKKKPDKHEDNRRSWDVYTEADGTFSRLFQKIYGENGSKSMSDVSAEDVQNLRQLRYEEMQKIKSQLKEQDQKWQDDLAKWKDRRKSYTSDLX

SEQ ID NO: 549 - DNA, 1125 bp, Homo sapiens
gtcacaaagatcacagaaacagtgtatgcccgggcataagatagcacgactgtgtatgctctggaggactgaaaggctgtacaagccctatgtattttttttcaaatatacatatgcatgggtcttgctgctgcctcttttgctgactgtaattggactttgaagcttcgaagttatatcataaaaatttgtaacctttgtctgagagagagctcagctaagcaatcactttccacttcttttcacaggataatataaacgttttcttgaaagcttgtgaacagattggattgaaagaagcccagcttttccatcctggagatctacaggatttatcaaatcgagtcactgtcaagcaagaagagactgacaggagagtgaaaaatgttttgataacattgtactggctgggaagaaaagcacaaagcaacccgtactataatggtccccatcttaatttgaaagcgtttgagaatcttttaggacaagcactgacgaaggcactcgaagactccagcttcctgaaaagaagtggcagggacagtggctacggtgacatctggtgtcctgaacgtggagaatttcttgctcctccaaggcaccataagagagaagattcctttgaaagcttggactctttgggctcgaggtcattgacaagctgctcctctgatatcacgttgagaggggggcgtgaaggttttgaaagtgacacagattcggaatttacatttaagatgcaggattataataaagatgatatgtcgtatcgaaggatttcggctgttgagccaaagactgcgttacccttcaatcgttttttacccaacaaaagtagacagccatcctatgtaccagcacctctgagaaagaaaaagccagacaaacatgaggataacagaagaagttgggcaagcccggtttatacagaagcagatggaacattttcaaggagtaagtccatgagtgatgtcagcgcagaagatgttcaaaacttgcgtcagctgcgttacgaggagatgcagaaaataaaatcacaattaaaagaacaagatcagaaatggcaggatgaccttgcaaaatggaaagatcgtcgaaaaagttacacttcagatctgcagaaga

SEQ ID NO: 550 - protein, 300 aa, Homo sapiens
  VARIANT (1)...(300): Xaa = Any Amino Acid
AITFHFFSQDNINVFLKACEQIGLKEAQLFHPGDLQDLSNRVTVKQEETDRRVKNVLITLYWLGRKAQSNPYYNGPHLNLKAFENLLGQALTKALEDSSFLKRSGRDSGYGDIWCPERGEFLAPPRHHKREDSFESLDSLGSRSLTSCSSDITLRGGREGFESDTDSEFTFKMQDYNKDDMSYRRISAVEPKTALPFNRFLPNKSRQPSYVPAPLRKKKPDKHEDNRRSWDVYTEADGTFSRSKSMSDVSAEDVQNLRQLRYEEMQKIKSQLKEQDQKWQDDLAKWKDRRKSYTSDLQKX

SEQ ID NO: 551 - DNA, 62444 bp, Mus musculus
  misc_feature (1)...(62444): n = A,T,C or G
tgaaggaggcagaggcaggaggatcacaagtttgaggccagcctgggctacacaattttggggactggagagatggctcagcagttaagagccctgactgctcttccaaaggtcctgagttcaaatcccaacaaccacatagtggttcacaaccatccgtaatgagatctaacgccctcttctgatgtgtctgaagacaactacagtatacatacatataataataaataaatctaagaagaagaagaagggggaggaggagaagaaggagaaagaaggagaaggaggaggaggaggagaagaagaagaagaaaagaaagaaaagttgaagtttccatttttcttggaacaccttggttgatctatgacctggacacagcacttgataggttcttttcttccagctcctgtgtgacaagccagacagagtgtgtgttgcagtttgaagaggcctcataactaatacttctccccctgacatctccttttccatccctgccctgagacatggccctaaggctgtactgctgataaggctgccatggggaattcgtgcaaagggacagcctcgaactgaatggcagagcagatgagggttcctcctacacagcggcagcctccatctcctgcgttgcctggccagatatggcagagggctggcgctatggcaggtaaggcttggggccaagcagtgctggaaggggctaagttggtgctggctcctacgggtgcctggtgagtcctccatatagcatcaggagaggtccagcatgctgtcctggtaggtttttttcacagtaaacagttcatgtctctgacaggagtgaggtctccctcaactacagggtcttctctgttgtgagttctgggagatgataaccaggctatagaaactttggaaagactcaaggctgtcagagcttgagagtcccaggacccagtctgcccacattcctataggcttctccacctatcaattgcacaggtcctgtctatgtccagaaggcagaacagtaggatatttggggaaaccattctgagatgtaaaatagccttttgattgtgagtgagtggctctttctttttaaatatgcacatatatcatatctacatatatatcactcataaacatatatgagagtaagcaatttctttctttctctctttctctctctcttcctttctttcctttttttttacttaagcagtctttaatgaaagctgtgtatgagatgtctctgctcctgcatcttctcgatcgatcatttcttccttgtatttgcccttctcctttcctgtttgtcaggacttggctttcctctccaggatcttcttgtccagctttagcctggtgatgcccaccttgctggggtggatgcccacatggacagttgtgccattagccttctctcgctggactcgttcaatgtagatgatgtatctctttttgtacacctagaccaccttgccaatctgctggcccttgtagtgtctgcgaacaccctaaactacatcatcctctctttctcttctttctttctttctttctttctttctttctttctttctttctttctttctttctttctttctttcttctttctttctttctttctttctttctttctttctttctttctttctttccttctctctctctttctttctgtttttttcaagacagtgtttctctgtgctagccctggctgtcctggaactcactctgtagatcactagactggcctcgaactcaaaaatcagcctgtctctgcctcccaagtgctgggattaaaggtgtgtgccaccactgcctggcttcatcatcctttcaaatgggcatagactgaacattatacttctgtctcagctctttggaaagaagggaagatatgatcttcctctgaatgtgaaaaggtgcattgaaatactgtttgtggttcttgcttcagtcagaagtcatgaggggattgaacttcattttggctgctgtaatccagccattcccacagaaggaaagagcaatatgtatatgtgtgtgtatatatgtatatatgtatatatgtgatatatgtgtatatgtgtatatgtgtatatgtgtatatgtgtatatgtgtatatgtgtatatgtgtatatgtgtatatgtatgtacatatatatgtatatatgtatgcatgtgtgcatgtatatatgtatgcatgtatatatgtgtatatgtatatatgtatacacacacacacacatatatatatatatttcactcattcactcattcatatatggtgtctagtatgtgcaccacatgcatgccacaagtatgcatggtgagaaggtgtcaggtcccctggaaccacagttacaggtagttgtaagctaccatgtgggtacttggaaccagaacctgggtcctctgcaagagcaacaagtactctcaaccactgagccatctctccagccccaacttttatctttaaaacaaacaaaacaaaacaattttcaaaatgaaagccagtctctggaaatgtatacctatgggccccagactgctttgggtgggtctagaaggaaaacatgcaggctctaaaaagccttgagaggaagcaagccgccccagtgtggtggaggccctgccatcaagctggcgtactgggcaatcattccatcattctgttggctctctgagcaggtttcttcactctgcaatgagacagatgggtgggatgtgcagcagacacgggaacaatacccactgctgccagtcggaggataccgatctatctgttggcaaggtactcttccttttgtagagcaaatgaggtgtttgggctgacagccaaggtggaacctgctaggttggaagacccatgggcaacaattcaggctactgtagatcacagatgaggggaaattccgtccgtggatatccctggttctaaggcctagaattaccaacagtctttattcatgcagagaacggagagtctgtgtggacaggcctgcagccagcctgtcgtagccctacctccccaagccccatgaggaacagcccctgctactggtgttgcctgggagtaccaagcgtgccctgagagacaaatgttggacccaattcatacaacagatgctaaatctgggctatggagcataaggcaaaggatgtacatgcacatggtctgtgcgcatgtttcatctggcctgaagagcatcgtgatggaaaaacaaaaccaaacaagaaggctcaattcattgccaatatttaacaattgagagatttcatatataaaaaaattataatttggggctttttgacttgggttatcatcagcaagacagggtccacattccagctggaccacagccctcccagttatcctgcttgcccaagtcccaagggccttcagtctgccacatccttgtctgtcactaggccagggtctgaagtgactgccaacactcacagttaatgctggggcaagggccagccccagttcctggactctttgggctccaccacccactgttctgcattcctgaataaggtccccagggtcacctgagggcccagtctgaggaattggtttggaaatagaaatcagccaagtgactgagccaatttcttagatgtcatgaagatggagtcatggcacactcagtacatgcctcagaattctatttgctggcgtgtcaaaaagatttcatttaaaatttttttttttttaaaaatggaaactggaaaatctccaagtctatatgtatatctcaggatccagacagctacagggttaatgagccatcatcactgccaggaagaacactcacggttctgtgtttggttcatataacagatctttactatgctctatctcatacgaggctccatcctaggcattgagaaaccagggcttggatggccttaccttgggggtagggcagacagacagaggagactcatgatttataaatgcttaatgtttttgtttgcaactaaacaataaataacttttaaaaaatctggcaaatagtttcacataaacagatttcctcacataaatcgtgaatctgcacagtaaagacatgacatctttagaatattaatcgtctttgtgagggctaaataggctttatctagactgccccttttcttaaaatctgaagaaaatgggatgaaagattaatgatcgttaaacctaaagtagtgggtacctatctgttgactgactttcctcctgaaaatttaaaacatcaaacagggtttctatgtatagccctggctgtcctggaactcacactgtagaccaggctggctttgaactcagaaatctgcctgcctctgcctcccaagtgctgggattaaaggcgtgcgctaccactgcccagcaaaacatcaaaatcttgaaatggcagaataggggctagagctatggctcagcagttaaagtgctgggtgcttttctggaggctctgggtttgatccctaacgctgtgtataactccagcccctggagatccaacgtcttcttctgacctccaagggccctgcctgcacacagagtacgaataccacccatgcacacaacaacaaaaatagaaaaaatatctttaaaggtgaaggaatacattttcagagagggtctatacctttgtcctgggatgtcaccgctgtgactgttgatctagtcccaaactgtgctgcaagccccaaggagctcctgaggaatgggctgtgcatatgagcccaggcactgttttcttaattggtatgtgctctgcatcaacctctgcctcttcatgaccagctgtcctgccttttacctggtcttctagtctgttgtgcctcggggaaagcagagcaccaagcctattagaactcagtgatggggctgggactgtagttaagttggtcgagtccttggctagtacgcctgaagccctgggtttaatctctagcacttcataaaaccaggtatggtggcagaagcctgcagtcttagcacctgagatggggggtaggtgggctggacaatcaaaaactcaaagtcaatctcagctgtacagcgagattaagggcagcctgagcctcaaaacaacagcaaaacagacaaaacacaaaataaggatggggaggaggtggcttaatgggtaaagcacttgcatggatgtacaaaggcctgggtttggatcctcagaacccgtgtagaactggacagagtcacacacatctatgaccgcagtgcttcatggaaagatgagatgcagagaggggagccccggaagctcacaggccagccagcctggcacaggcagtggtgaacagccagcctgacataggataggccagccagcctggcacaggcagtggtgaacaaggtgaggcccaacctctgatagaggttgtctttccttcttcatgtgtgaaacatggcacaggagaacacaaaaccacatacatgttcacacacaagggcacaaaaaagaagcaaagaactcaatgagaattgtgacacgtggactttaaggggaacctagaaaacctcgaaacacacacgtaaattactgttaatattttggtttggggcgatgccttgggaagtcaaggtggttaagggaaaagacttctaggtaaaccatgccatgactagttgtcttcctagcagacagacaggatggggcaaggtctgggaacccagctttggcagtgtctgctcatttgcttatgatacattgcccgaacatctacagagccccaggcgctgccctagctagcaaaccagacagacaggagggctggcctttgtggggctggagcaaataggagcgagtaagcaaagcaacttctaagcaactgtgggctggaagggggcactgtggatgggaagctggctaggaaatgctcccaatatccaggcctttggatgaaaacctaggggaccgaacacacagggctgctagatatggctgtttgctgagaaggggtgggggaaggcctgaggaaagaggacccctttgaaacaatcaagaggggacgtaacactgaggaaaccaagctcagagctggagatgtggctgaaggcctgggaacggaggagatgacctaggaaggcaacgtactcagataagaacctgatctgggtacactgagctgggaaaggctgtgtgtgtgtgtgtgtgtgtgtgtgtgtgtgtgtgtgtgtgtgtgtgtttggggctcaaatgtgtccagggtgaggtagggaagtgtgtcccctggaatcagcaagccagaagtaaatggcagtcttgacaagagaaatctgctagaggaatgagcagtttttgtccaatggctccagcttgccttcttgtaaaccgagggtatccaaacaggtacaacttgggactccttccttcttctaattgacccacaggttgaaaagctagaagtgtttctttaagacaaggggacaatgattaaaagacaaaaaaatttaatattggaagatatgctatctgggagttattagccattatcaatactcttttacataaaagatatttatgtaaactgttaaaacagctatgcgcaacgttcttcttagcgagtggtgctgtcaaaactaaccccaatgcgccttggctctctgtcctggagaactccttaccgagctttttagatgtcacacacacttggacagagtcgaggggcacccaccctctcacccaattgtttagaatggacctgtcacccttccagaggcatggaagaaaatcccaatgctatcaggaatttaagagcagttcaggggactctataagacttgtttctccatggcacatgttagctaatgaaacattatgtttgaaagaaatatttcagtcctagagaggaggcaataaaaaggcctggggtaggccaccttgacaaagttttaacaatgttggatttccctaaatgcctcatctccttatccccagagtccccgtcctgaatttttatccacggttaaccaaggttggccaagggcactctataggactttgtttctcaattgcttattgactgtcctttcaaagctagagattgccatactctttgatgacttggtttaattggttgagataacctggcacctgtgtgcagacaggctctcaagggggttgatagactagaggaaatgactttctcaaactgcctgtggccagggcagtccctgtctgctttgggtttaaccttgtcccaagaactccgagcaaggtgtgaagagcctggttcctgaggaagacacgtgatcactctccccagcctgaaaagcagacaacctaagatatggattcagctagagtaaatgaccagacaaatagctactgggacagtatccgtgagtcctggccacactgctttctctttgccttcagaggtacctgttatcctgttatcaaaacagtgctttcagatacaaaaggtaaagagacatacaaggtaagtaatgctcatcagggtccttctactaatctatcctcagtcagaggttctcagacttacatgtgtatcacaatcacctggaatgggggtatgggatggcatgtcaagggcacagatttccaggccgctgtcctatgacagtctcatagactgccttggaattcagactcctgaaagtgctgagttgagggggactaggtcagattaaaaaaagatgacacagactggagagatggctcagcagttaagagcattgactgctcttccagaggtcctgagttcaattcccagcaaccacatggtggctcacaaccgtctataatggggtccgatgtactcttctggtgtgtgtctgaaaacagctacagtgtactcatctaaataaaaataaataaatctttaaaaaaatgacacttcccctctcctgaaaaatccttctaaaatacttttaggtgtaatatctgtggctttattggaaagaggttttaccctgcacagtaacatctaagtgtaagttttagggtttatagtaatgggaaaagtacatatatggctttgtaatgttaatttatgcaacaaataatatacatatgatgaatatgcacaagtgttctgcaagttactccagggagaagatggcagccgggattgtatggctcagccagtaaccagctgggaagtggtggcgacggaatgcagcttttgtctaaaccctgtcatctttttattttttactacaccacacaggctatttttcaaaaattcctttggaaggtaaggttcaggaaaggaaggccccaggccactgctatttcaaacatccactcaaggagacagtgtactgtaaacggagctcagcgctggacggagcgaggtcagcgctggatctgacacatggaattctccaggcatctgaggaatacggcagcccaggcagggtatgctcagagtatgtccagtgtgggatgctcttgctgtaggtgatgtgaacctcttccataatttccttcctatccactatatagtttattttaataaaaaaagaagttgtatctttcaagggaatagactctgctgatgagaggtcacttcagccatggcctttgccaggtccttaaagcacctagacaagcagactggaaccacgtgacccacagcaggctgggttagtatttacctagcacggcactaatttcacgtgtgtattcattgaagtctacatctgtgtagatgttgctccttggatccctattctacaaattaggattaccgggtcccaaaggaacttttcccattctggaatggatatactcagccccggaacggagttgtgcacatgtcacattcaatacatctaatcctcattacaactcacggaacagatgtcttacgatggggcaattttgcaaataagaaaactaaggaatcaacccttccagtgcagtaccccaatagaaattcaggagcagctcgtatctcaaccctcacccaacttcaaccacctgaaactttcatccccaggtggggctttgaacccggctttgagaaccaagactttaattataccccaacagattccaccagtgctacaggaaaacattggactattccgcggggcgggggaggacttttagagttagtttttaggcagacttcagagaccactacctgtggagccttttgctacaaattagttcttttaactaaggcatcccgggcaagggtcttccacgcgcatgcctgtttcagaggctgcccaggccacgtgcacggagacccggggccgtgaccagggtgagacccggcagccccacccacgaacctgcccggtggccgccgctccagcacgtgggagtagcatttcggcgactccgctccgtgcagcgcggggcctgctgcagcaccggactccaaggagtcctgagctagggctcgcggaaggagagaggtcctgggtcccgtccgctctgggtcccgcggagccgcggccatcttggcgggctcacctcgcgggtcgtgcgctcgggctgggacagggtggggccccgggaccccannnnnnnnnnnnnnnnnnnnatcgggggcgggggacacgccaccggaggagtgctccgtgtgccgtcacgtgcgctccaaggaggagagtgatggatggggcgaccgcctgtgcgcggacttgggagtccccacgcgtgggggacagtggagctgagcctccagtgcagctcgagccgctgcgtgaccctccgtcccggggtggggcacccttcccgaagccaaggccgagcgcgggctgcgcggacgcgcgccccccttccggccgatcccagtttgtgaagaaaaggggcaaaaagaagtgttaaaagatcccggaattgcggtttggctctggggcaacggttgctacacgaagtgaaacctgcggagcgctcgggcgcgcgcgccgcgccccgccccgatcgggcgtgactcatcttgggaccgcccggccggttcttatactcgggactgcggagcgcgcgcagggcttccctccgcctgcaggtcccgacgcgtctccgccgtcgccgtcgccgtcgccgtccgccgtacagccgaatagccgaggacccacgcagagccaccaaccagccaagatgcccaagccagtaagttgtccctgtttcggagcggctgtgcgccaggccgggtgtccccagggaatcaccttgcactggctgctgggcagcttctgtagaacccagttttctggtgaagggcctcttgttacctgtagacgcctttgtggcactctctagtcccctttgtgggtggttctttttcggttgctaacgaaccccctaccaggtttccggactgctttaaaagtgcttagtgcaacctccaagtttcttaactggtgcaagtagcactgaagctttggtggcttctcacacgaccgacacctgttcgcccagttccttcgagcgaccgaaaccacttgcagcccacaccttcctgggcggtttgaagggcatttgggagaagagaggctttgtgcctgggatagcctggtctcagcccctttctaggcggctggagaggcgcggccggtctaaacagggtttttttgctggttgcagcaggatccctatctcggggagggttagccgtggacttgaattgcagatgaggcagtcccagaggcttgataaggaggctcactgggcactggtcgtgaacttgggctaattaacgcgttgcgagctcgcctctctgttcttgaatctgattctgttgagattgctggcgggacagagttgggggtgagagcgactactacgcaggtcctcactatatatattccacccgcctttacaatgtggaggggtttgatgattaggtggagggagaaactgtgatgtcttgtttaatttttaagtagagatggagaaaacaagactaataaaactacaaagagttttcttaataaactacagagttcacgtctagtccttagagcatatatctgtttttactacttttacgttttttgtgttctctgaaaggacgttcttctctagaaattgtatttctgtttctatcggtcttaagcctattttctgacaggtcaaagaacttactctaaaaacgataatagacccagacatcagtacggtttttggcctaagttattcatgggagggtattttgacctcacacaaatgcatttcaaactcaaaagtggttcctggttccactatgcctgtggtataaaactggcccaggatgtgttacggtggcgctgcagcagatgctgggggtggtcagtacattagttccgggtgtgggttttttttttattattattattaaaatattccgaggtggtggtgaggtgctggcactgtcttcagttgctccttgtttctcctctctttacaaactgtaacttctttattcttagttttttccaatatcactattctacactgattctcagtactcatacagcacaaatctgtttccctagaccctggtggtgaccatactcatcttctgtatattgagtagggacctcacgaggacagaatctgggtatttgttccttccggtttccactagtataaagtgttctaatcacagacactccactccactatgtcaaaattacctcagttttaaggctaacccccccccccccccccatggctggtatgtttcgatttcctcctgttttaagtcttctgtggtaagaactttgttaggaaaaagtgaagaactgttcaggtgttaggaaagagggtagccatggtctgtgtgcctgtcagcttcagtaacagagtaacttttttgaagtccgttctacaatagccagagttaacaatttccagactttgcagagaggactcctcttaggcgcaaggtgcatacctgcagaaggaaatccccagcttgcccctctgccggtgggaggagtgagaggtggcctgctagagtgagcactggaaatagccatattggccacctctaccactgttacttggaaactgaatttgtttgttgttgttgttgtgtgtgtggtttttttttgggggggggtacctaattggggtttgtttattccctgcctggataaatgttaaatgaagcatccaccagcaaacttcttaggtatgtcttttaaacaaaaggttattgattctatttaagcctaaagtgagaatttccttgtggtctgagtgggtgaggcttcactgggttaaggggcaatcccagttaaccacagatacacctagattttggcgtttgtttgtttgtttgttttggcctttcacgtggtggttggtttcttctccgggcccagttagatgactttgttcataagacagcaggtagaaatgacgtgacatttagaccctgagtattaaatgttggatgtttttcattcagcaagcagagtgcctgatgcagaggggcaatatggttatttccccgtggagactcacagtctggttcttcaaccaagacacggagcttagcacattaatgtgccttcaaagaagaaaatgtctcccagaaagagcagaggttaagagagcacctgggtgtggtgtggtggtagggaaactggttggtggccctctggagaagcctaaattttgtcttaatcgtgctggaaggaattggggtggggggtgtctgtcacctgaggagggacagcggtggcctgtgactgctcttgatttccgtggtcactttggcactccatctgataggagtgatggacttccaaggaagacatgggtcctctggagggcaccttggcctctgctcatatggtgcccggattgggggcctccttggggacactggtggggttagcacgaggagctggtgcaggaagcaattgcacaatcctttcaggcaaggtagcccgggagctcctctccccctcccttccccctgctctcctgaacctgctatcctggtctggtgggaagctgcaggcaagccttaagagagaagggtgttacctttcaagccactgtgatctcagatgtctcccagcttcagcagagaactgcctgtctgccgcatacatacatgcacgcacgctcacacaaagatgccttaactaggctcacgtccaaagtggtgcactgggaactaaaacttttcattttgccctgctaaggactggacttgaggctctgtgcatgctaggcaagtgagtcaagttaatttctgagacaacctttgggaattctctttgggaatattgcctttcactagagattttaacagggacagattttaataaatatacccataggtattatttattaagtgcacacacgcacgcaccccttcattgagaagaacgcgtggacatactgctcccctccccctttcacccaggggcagatggtgaattaggtggctaagggtttgtctcatggcagcgagaaatgctggctagggttaccgacgggccatcgtcacacaataaggcatgatgaatatagctcatcccggagttcagcagacttttgcttgagttcctgtgagaggtgttgaggcgccggatggtagacagagaagtagcccctggcgttaggattcccagactggttcagggcagacagtaatcgcagtaaatgctgagctgtggctctggctgttgtgggaaggagtgctgagcagtcaggaattcagagcggtaggaagggggaggttccagttggagcctgctcggctgtggaggcaatcaggatgctgtgccgagtcagccacgctctggcattttaggcttaactcgggttttgacctggaaggagcaacaggatggtaaaagtggggaaagaaatcccccaacccctccctggtgatagattggacacactgggcgccaagggctgggtcaggtggccttccggtttctgcctgcatgaacgggtgctgcagagcagtgatgggggcgagggcggtgcctgagaacctgtacatgttaataaagttgaaaagcagttcttatttttttttttttttaatagtctgacctcagccttactttgccattttggactctggcttgtaaccaaggtgggaaaggaggctagtaggaagagactcttaactccaggaagacgacgctagcccagcatggctgcagagcagcaccagcgatggcttttctctgcgtggggttcaggggctgagcttaatttgttagtggctcttggttttcagaggcggggaaagcccttcgccctgtgaaacttttctctggctatttcttcttccgcttctgtctgttgccaccctaaacagtaacattgtgatttcttaacaaagtgcggactaacttgactaatgatgttcagacccagagggaggaaaacagcaccacctagcgaattgtaacaccttttcttcattttttttttttttttttgagatggaaacttctgtgactctttgaccttttagagagagacttttcttcctttttaacattagttacgagacagattcttgactcttcgtttttaacttacactatcacttttgaaataagaaccgcttatggaagagaccggaagtttgtagcatacttcctaacgtgcttactctcctttacttttgacttccggagtaaagattactgctacgtcagtcagataatgatggagagtcctcttgtagcccaggctgcctcactgtgtagcagaagacaaccttgaatttttgctcttcctacctccagctcccaggaattggggtttcaggttggtgccagcgcatccagtttgtgatgtgctggggaccaaacccagaattctgtgattggtaggcaagcactctaccaattaagcttcatccccagtgtttgtttgaagaaccaagcggtagtgctggcggtggatggtaccttggtttaaagcacttgctgctcctggggagcacctggagatctttcccagcatccaccacggcagctcaagtcttcattgtctccacttacaggaaatgtgaccctccccctcttccggacccctccagtattgtatgatatgcaggcaaaacactcatttatataaaataaagttacaggaccaaataaaaccattgttataatgtgacttagaaactttgactaagatagttgttatattttttaataaaactgcagagaaccacagcagtctcgtgatgtatactgcttgctgttagagaagccatttagtacctgtggacctcagtttgtcatccagaccggaaaaagtgcaaaagatgctacctggggtaaactgaggcaaggctttgtgacatgcagacagctaatcttaacataccataagccttgttaatcctgtgtgcacttctccgtgtaaaccgtcagcagtacacccctgaccctcgtggggaaagagccacagaaaatgtccggttgtctcccacatctgccgttgtcagaatcccctgggaattctgtttcctgtctgtgtagtgagtgggcctggtgctggggtgtgcctgggaggagttctgttggagaaggtgagtataggcaaaggtcacagtgaggtaggacagtgatcaggagccagcggggccagggcagttccccatgttggctgcttgctagggggaaggctaggagcagttctggccacaggctggttccatttttattttatttcattttttcattcactaaggaccttttatttcctacggatagatggcaatgctgtttcagaggagaggaaaactctaggaacactttacccttttatttaatatatctgagagaacaaagtttaaaggcggaacaaaaattctaacttcagcttcaactctctctgatgcaaataagggtggggtggggtgtcacccaagagggggcacacggctcagtttgggcttagcttattctctctttttgtgaacttgaggtccctttcctcagacaacttctttctgttgttggtttttttttccttttgcttgggagaaggtactgcaacggtactggggaggtgggggtggggctatgcttgtcccggaggatggtggaggcctttctttgtttgtaaggaagggacaggtttcttcctacggtctcccagctgagaatttttttaaggtttttgaagccttgttttaagacaccaaataaggcccttaatgcctgagctatttaccctccagccctttacagaaagaagggccaggcccttgcttccaggataaaggtaactattgtgagggtctggttagacttgtgtggattttatgactcggccaatatttggaaggcgaaccactcctttggttctagtttttacaaaaccattctcgtaaaacaaagaaactgttcctggtcggttcattctaagtccatcctgtgccctgagcagaaactcctaatgggaaaagtgtcacagggcgcaagcagggttgaggttcaacaaggctggtgccagcggctgccctttgtttcctagggaaagtggcagtatcttgtgtcacctcctaagccattgtctaatggcagatctttggcacacactgagagcaatttgtacctgatatttgagttggaaagagactgtctataaattagttgctttttttaatcattgaaaatttaaaaattaaacctagcaggagtgacccccgacccctcaccctcctcattatatttcacagaccttggctatccctttttgatgtttgataaactgtgtctttgtgcctttcctggctctacagtgaggtcacacggttcaaacatcaacaacaaaacacccaaaacatcatctgcttccagaaagacctttaaatgcttgcagtattagctgattcatagagggtggtagaaggtacaaagttgcctctctgggtgattctactctctctgtgcctttaaacaagatcgtgcctcctacttgtaagggctgaagagatagagaagtacgtgtctgtgtgagtgtgtgtgtgtgtgtgtgtgtgtgtnnnnnnnnnnnnnnnnnnnntgtgtgtgtgtgtgtgtgtgtgtgtgtgtgtgtgtgtgtatgtgtgtgtgcatgtgtgtgtttatgttttcacatgctcgtccttgtgcctgaccctggttggtgggatctacttgcaactacaaaattctcatctaattgaaagttttcccatcccatgatggtcttttttttttttcccccgtctgatttagacagcctgatgaactagaaagcaaatcatgttcgctgtttggctctcatggtgaatactgctcacacccctccaacatacagtgctggggtttcaggtcctgggaacacgctggctgacaacagagggccttctaagattggatggttgttgcctccatggttgtcatggttaccacatcatggccgaccggtttccatttgatgtgcaaactctcatttcctgaatgtgcccccaccaacccttagtggccaaagtctgaggaaagttagcacagccgaaaacagccttctgtaaggaggtcacgggagcagtggctcccgctgctcctccctagggagcacctactgctcttaagagttgatacgttgggggttggagggacagagatgtggaaaagcagacagttggccattgcatataatcaagcattgccaaggggtagagttaactttttttttctttttccccccgagacagagtttctccgtgtagccctggctgtcctggaactcacttttgtagaccaggctggcctccaactcagaaatccgcctgcctctgcctcccgagtgctgggattaaaggcatgggccaccacgcctggcttagagttaacttttattattagtttcttcttgggtgaagagttaaatcgtggggcagaaggagcagagtgggcgaggtgtggtaggctcatgctgtcaatgagcccttacagaaagaaccctgtcttgattgacatgcctctaaaacttggtcttcacatagatttggtggtgagtgtgtgtcagtatcttcctggcccgctgagacatggccatcatttctcaagtgctttaggtcagggatgttagttgagaaatgtttgcctgtgtctccatgatggtgtctgcagatatcttcagtgtgtcttggcacaggatccagccttcttcgtctttatgtttgtgaagagaaaactgatctagaggagacatggtcagcactgtttagcttggtctgtctttatggaacaggatgctgttagcgatctcactgagatgctgaggtgttgggcgtgcatactgcatcgcttttggatgagcctcctcaggggccttagccagggagggaaggttgggaccactgtgtgccttcctaagaagtgggctggagaggaagcagtgagtagcaaaatgtattagatggatttggacagaccaaccataaaaggacctgtggggctatgtgctgaagtttataggtagatgggctttgagatccttaaaatatacgaagttcatatcctctctctctctctctctctgtgtgtctctctctgtctctttctgtctctgtctctcattctttttcattctctcattcatagtctctcccctccccctccccaatagataaggcattccagggagtaagtggtgttaaaataggagggaagtgtgctcagagtctctgtgtagcttcccttctttctattgtgtgactgtgcctattggaaaagtttagttcctgtgggaagggagtcaatggcttggtgtgtaaaggagctttaccatcgagtctgaggatctgcattgagttccatccccagagctcctgtggtggaaggagaggatgccctcggatggccatatccaaagcacacacatgtgcacgcacatgcatgcacgcagacacatgtgcccacactggcatacaatataaaatgtattacaggagggtgtgggaaaggggagagtgattcattccccctgtctcctcgcaggctgtatgcaaagtccagttggaaaccaggtgaagccctggcctgcccagagtcttagtatgctgagggaggggttctccacgaggccccgaagtggtgtcacagtgccgtaggtcacctgtttatggccgatgaaatgaacagttgatggcattgcagctgggcctccgccctcccctcagcacacctgcttttaaggcactccacatggaaacctacaaacaaactcttggttcccgaaagctagcccatacatacgggatttggggtggggaggaggtgttgtggcccaggacggtatctcactagcaagtctgtcggccttgacaattggaaaggaacacaataaaataggaggtatcttctgagtgcagatcttatgcagccattttaggaggtttgtgtcctggtgctgttggcggggtgggcaggaaaggggcggggaacacagctgacaggggttgggaggagtggttagctgaaaagtacctcctatcttcttacccccagttaaatacttgtgtacagagtttggtttaacctaatagaacctcaaaaacagagacattttaaaaacagaaggcttttgttttttgtttttttaacgtatgcttattcaaacagtttataaacatgccgattgtttgtttgtttgtttgtttggaggaaagttaaacttgggctggagagatggctcaaaggataagagtgctagctgctctttcagagctccccggttaaattcccagcacccatgtggtagctcacaaccatctataattataatactatgagatctaatgctctcttccggtgtgcatacttacatgcagacaaaacacccatattaactaaataagttaaacaacaaacaaaagcaaaaactgttggaggtcagactgtaattgctgaaggcaaaaggaaagactttatcggctaagattaaagatctcgtatctaagtctctcataggaaaatgttccttaaactgcagaatagtcctgcttgtaatggccttagctatgggcagctttgtctcagaagtcagtgtgtctgtattagaggcgcgtccctagaacaaggcggtctgacattctcctcccattcctagctcctcctcctcctcccctccgttggaaaaaggaataacttcacagacttctaattttacaaagaaaataaagcagtccaggtgggtttagtctacaggcctttcatttcttacgtgctgtgagctgagaaccaaaaaccagtgtagcgtgtagcagccatcttggctgtctctacctcagtctttatggggatctcctcggtgtgtgtaattaggcaggtatttcagggagctatatcctatctgaagtgtgtgcgacacagctactgaaaccaaaagccaatgtctccatttccagactccactaaagagaaagtgaccttgaataagaagttgtttatttagtctgccttggtggactgaggggtgtatgctgggttatctgtgtttctccttagcaacaggtaaactcctttggctttttctctcccctagtctgtgtgaagtagtctctgagaattcttgtttgatttctttggaaatcccggactgaaagaaatgggtaccaccgtacaagcacacacacaaagtgtgagaagttacaggtccaggcaccgggagcagcggcctacgactgttagcagcctgtgcccttcccttctgtgggttctgcccacaggccctcctgctctggtatgggccgggggagcagtctctctgctacccaaaggtctgtgggaagggctcagcacaccctgttcccagccaggtttggaagagagaggttcagaacggaccctcttcttaacgctccgtaagttcccttctgttttaaggtcagattttccccccctgatcataatgagtacaaacaggactggtttgtccactctttgtgtgtgttaagtagccttgctctgacaggaagtgggtctgggggcaggaagtagcttactttctgaggcagaaaagagctattgagaagaacttgagacttcattgcgtgtcctcaaagttacggggaagcgttagcccttccaagcccttagccattctctgggatttactaatgggcttttccgtccattgacgtagatccagccgtagaaatcaaacacaagggttatacagagagaagagcgtcagaagttgagagagttgcctaaggcatctgggtctcactgccctcagtcactaaaaagatttaactctcaatccaggaaggagatgcctgcctgctgcccaggacgctgaggcaggtggattgggacttcaaggctgaactaggtacttaaatagactattttctcaaatgaagagacaggtggagcagtgcatgcagatgcagagatacatgcaagtgatcatgcacgtgcatggggtgggggtgggctgacacatgcacgtgtgcacacacacgcgcactcgcacacgcgcgcgcacgcacacacacacacacacacacacacacacacacacacgaaggctaggaatgcccaggcaggaagcagtagccagttacagtcacctatagagtaattaaccttgtctctgtgatagtgaaaacatacacattatgttacagggattaaaactgtcttggaatagttaacaggtagttttcaggcccagcatctgtgccagtatattaagaatttagtgtttatatttagtctggtggcggtggtgtcatagtgaggacagtttggcaagaagctcaaagagaatgttgtactaactttcgtaattaaagatacccaccgagttccttcagagtgcacctgccatctataaagtgaggtgaacgcccaccatgttcctgggaagccagatcagcctggctgtgcgcagccgggcacacgtgtacaagatggtttattatgctttaaaatattgggggtcagccgggcggtggtggcgcacacctctaatcccagcactcaggaaggaaaaggcaggcagatttctgagttcgaggccagcctggtctacagagtgagttccaggacagccagggctatacagagaaaccctgtctcgaaaaaacaaaacaacaacaaaatatatatattgggggttggagggtgcccatcctacttaataaaccataaatatccaagtatcccagagtgaaggtataaggtgttttatagatagccatgaatgtgaacattagcagacatgaatcatgaaaaaaaacccttaaatttgacaacttccattcagccagacctgcttgcaattaaaagtcaaaacgatgactttatactcttatttgatttaaaatttatggtcaacattttctggacaccgaggaaggcagggcatagcgtgaactgggatcccacaggaagaactgcttgctttttcatggagtcaaactggctcctttggctttgacctctgaggtcacctccttgctcttcattagtggttgatgctggggcagactcttaacaggactggctgcactaagacagagagaggcaggagcatggtggtgttggtcttaattcatgttgccatcaggagttcttctcacagccttgctacttgacctttttggtggtgagccacaactgtccccaagaacagagtcttcatcggaatagctgatgttggcctgtgctccaaacattgctaccaggtctccttatatgatcagtggtgtgactggcacgcgtcgttcctgggagagctgaagagagaatagagctgcagagcaacacttagggctctggagctgctctctgcttgtgtgacaaatggattcttgtcagctctgacattattatttacaacaactactactacttaggcagtaagagacacatgtcctagtattgtgccatcatgtggaaactttattattttgagaccatgcatcctagccagacacctttataggcttgctgtagagcccatgatgagcagattttactgcttgcctgactgacagttttgtggtaatggacctacagctgagtgagcttccttttacgtctggcagtcttcctactcgtgctgatcaagctgctctgaacactgttaagcaagcagtacgctggtgaccagatctgacttagagctccagggagcctggtgtccatgaccaggccagctgtgtgtgtttatcatcatcctcgagctgggggttcttctcagggctagttcatccctattgtgtgcttatcctgctatttccaccttctccacacatcagcaagaatgttccggaagcctggcagcaagggcttgtgcttagatgtatgccatcctgcctttgaatgcccagggacagctgtagctgtggttgggagctctaggggagaacctcatttgctaatgctggagtgacaggccttatgtgaatattataactgataagttcaggaaataaaggagcccttggcatggcacttctctctgagatacccttaatattttggttaactctggtttagcatagacttcgactgcttagactactgcttgctttggccctcttcaggaggagggatagtttggtaatttttttttttttaaagagtcactacaaatgaatgctttttagaaacagtgacagtataaaacatggtcctgggagttggccttgcagcgattttctagactttatgagtatataaacggtagtcagccccagtgcagatgtaggcagtcatcttgttacaaatggaggctttggggcgtggggtcccaggttaggggccagaggtggctcagcaggtctagaggtgcttgtccacaagcttggctgtttaagatcacactctaaaacctccataaaggtgggtagggagagccagtgtcagcgtcctgtgacactgtgctgggtccaagcacatagatgcacacagtttaaaaaaaaaaattgaaaaaaattgaaaaaatttaaattttagttagcttttgctgcgacagcttccaaaggggcagaaagaccttcagaagaacaatccagcagacaccaaagccacagacgccattcaccttctgcgagctgcctttgcccaccttagctgagttccagagtcagccttttcaggcagggtggttaaagtttgctaagttactggaactattttacagagttcagttattcgttagctagcatttgtgcagagtggccactgtgtcttagcagatgctacaagatgacagttattggcagtcagtggtttgtgtcagagattagaagggaccaggattcctaggcctagactgtgggcccctctgttactcccagggccagtgctttccaagcaggtcatgattagcaggcgctttagttccagttaaaggatttgtggccttcactgttgggctctttccaatggtcacgtgttgtcattgacttcacccctgagcttggcagagtaaatttacacatagccctgctatatctggagcctgggaagcaagtgccttacttattgggctaacacaggctacaatgtggtttacatcccagaggaacaccacagtgttgaggtgtagctggccataggaaaggttagaccgttaggaaggttatagttcctcttgaggtcagatagcataaagcgtgtatttctgacatctccttcagcaggaacaggcccttagggtcgaggatctgttaatgtgagagagcgtttcagaataggactgaattcctgcttctgtctaggggaaaccagaacccagggagagcctggtcctccttctgccccagggctgcagaccacagcttaacagctcggagctcagcagtcaaccctgttctgccacatagggtaaaaccaggtcgtggtggagtgacctcacacattgtcacggtcaggccaggctgtgtgacagctagagccctgccttcccaaggacatggaatattttcatttaaaactcaaaacaaaaaaagtaggcttagttacatgttgagttcttgaaaattagtctcctttaatctttgtcccatcaagctgaccatacatagtgggtttgagtgacattgcttcttagctgccctgtttgagatcatccaagcaacatcgaaccaactgacaaaatgtttacccaataattccagtggattaaggaagcggtggtatttggcactaggaaaggatgaagtgctgatacaggtaaaacagatgatttgaaaatgtgctaactggcagacagatttcttttctctgatacgcccagaataggaaatcatagagcctacaacgtaggttgtgggtcatcaaggcttgggagtttaagaacgggggtgatgctgaccggcacagtggttttcctgtaggtggttgagaacattctaaagctagtgcatgcctggaacccttgactaagacaggaggattgtaaattgaagccgactgggctatgtagcaatattgctctatctcagaaaggaaaacaaaaatctaaaacttgacggcaatgtttgttgtgtaattctgcgaatgatagaaatcccaatttgcacattacaaatgggtgaatcttacagcatgtaaattatatctccttaaaactcctaaaacacagactcaacatgagaatgaaggtaaatacttgtctcagttttccaggcccgacacagcaggcgagtgtttgtcatttgtcattgtgaagtccccgtcctcgctctgagggagaatggtaatatgtccactccctatttctagcatttcctagcctttcaaaggtcatccccagtatttgaaggttgttagaagttgctgatgggtcaccctcagcagggctgttggcaaacagcacctacatttgccttgataaggggagctgggctctcagcacaatcctgggcccagattgagctttgagcccaggcaggtgtgataaccaggcacaatcttatcactgcatcccctgcctgaaatccaaacattccagtgccactgtttgtatttcctcttcattcctgatacatgaatatagaagaaaaatcaccagagatgtttgacccacagtggctactgtgtgtgtgtaaggctcagtctagaatgcattcctctatcagaagttccattgatatttgcgctaactctaataagagtgagtgagcgtagacatgaatgttgcacattgagactacgcgtgctacacaaccttaatcccagtactcgggaggcagaggcagctgtggatctctgcttttgaggccagcctggtctatatatggagttccaggacagccagggctatgtaatagagagaccctgtctcaaacagaacaaaacaagcaaaaaagtgaacaactgtgggagaaatcttaagctaaggtaaatctctcagtgaccttacccatgacaagactgatttaccagagaaatctgggagataacttagcataagtcagactcagcatttacactcagatggagtggatggttaaggtttcgttgtcaagtctgtcttttttctttttcttccttttttttccccccttaggcccttagatgttttagatgacattttgataaactataaagacccagaagtgtgtgtcttcagagtgcattctgaaaagccatgcatctttgagatgcctctgaccaacagagcctgggaattctagcctgcagggtcatggaatctcacagcttgctttatttagctaaacaaaggaacaaaaaacttactccagactcacgtgaccctggcacaaggtcccaccccatggattcctgttctctttaaaagtcacatactgtctggagaatcacacagccactgacatggccagaagactcaagacagattgcagaccttatacatggtaaaagtcagggaatcccgctctggctggaaagtggggtgtgtcagaacagagagattctgacacttctgcccaagactggggcaccagcaaggatgaggctgggcttatttaccttaacagggtagctgctgctggttttactcaaaacaaaaccaagttggctgtttaggtttttaatctccatggcacagaagcagtttggcctgccctgtgccgtgtctgcccagaaagatcatcctgaaaattgaaggaggtgttctcactgcctgcttctggcctccattgttacttccttatggtcaggtgatattattggctgtcctgtgctctatctgcatgcccctaagaaagacggcaggccatctgcacccttactttccaccccacgtttctagacagaccccattcctctggaccagccagctgagaacattgacctaacttgcatgtagcctttcagacctgaaagggggcaaggctcaggactgtccttttgcagctcaagtgactgaggccaaggacagggagagagcattctctgctctgagataaaggacagcctttgacatcttcattcttgccagtgtcccagtgatgcttttatttaagctgtgctcagaaactcttagcttgattttaagaactaagaatgcctgagccaagcccggtggtgcacacctctaacccccagcactctgagggtcaaggcaggaggattgtgagttctagactgacctaggctatatacctagaccttttctcaaaataacaaaaggaagggacaagttcctagactcttgagactaacaggggggcatctaagaattgattccagggacgtcgctgaggcccaagggagaggaaggggccgaggacacaggatagtgggaggcctaactgtgctgtcctcatggtgatcacagatcctgaatgagcccagaacatgggagatacccaccatagggccaggcctggaaactcctcagttctgggaacagtagatttaagccaagtgacccagtgctttgagaagatttattaagcaaaggtgggcggagtcagggtgaccaggctactgttgaatcctgatacatttgcagttgcagtgtgaatgcttgtgaaatgctagttgttgcttttcattaaaagcaaaaacaaaacaaatatctaatttttttactggccagtttcattcttgtttcttagaaataataaaaaaaatttttagttcatccccatttttggttttaggcagtttgtttttttaaaaaaaccaaacagacatacctccggcaccatgtttgtgcaggaaatgagaaactggcccttgccaccaaaataaaaaccattcacctaagttgtgctactgcccgggcatgaaacgtacacgtttattagaaactctctttcggagcaccctactaacttgccttgtatccaagataacttcctttaaaagggatttttaggtgacagacatttattggtttagcgagggtatgctggtgcccccctgctgtgcatatggaggtcagagtacacttggggggggggagtctgtcctttccttctgtcatgtgagtatgagagatcaaactgaagtcaggcttggcggccctcgccctaacctgccaagccatctcaagtcaagataagttattttgaagttctgaccttaagtagctgtgggaagattccattgttattaacctgaagaatgctgcacatctgcacagatcagtatgcttctgttttaagttgcataagtttatgagcacctgcttgggaattttaacatcttagaaccctaggtctgaattatcttacatgagcctcactccccattgtgagaggccggagaggcacatgtgtaactctactctccactgtctgtctgtctaccctcccctagataaggaccaatgctttatggtattttggcaagtctgagataaatcctactctttgggggggttgttggggttggattttagatgactaactggtactggggtgtgtgtgtgtgtgtgtgtgtgtgtgtgtgtgtgtgtgagatgtacatgtacacaagattatgtgctaaagtcagtattggcgatgctaggataaatatccaggacccccagcagtaaaagctctgagctacacccagcccttcagcattgctactgacatgcaaattatcaggacccccagcagtaaaagctctgagctacacccagcccttcagcattgctactgacatgcaaattatcacaaattataagaactgccactctcccatcttggtggcagtttggattttgaatttgtgagtcaactctcctcctgtcaatagggccacttagctctcctttatttctgtgacactgttgccattcaggcaccagttgtatccaaatcctccaagttcattaaaaaccatcgtttaccatgcaaacccagcacgagggcagcaccagggaagctgggtttacatgtgtgtcctcagttgaagtctgatttctcccaggctcccgactgtgtatataaagagtctcactatggctagtgaaggttgcactaaatttgatgaagtttatgctgcatcgcaatatattcattattaaagatttataaactgaaaaccaccctagtggtctttctaagcacagaaacagtttagtgtgctgtggagtaagctggcatgtgctgtatttggaaactggtcagtggtgcttttagatctttggggtgatttgtaacacttgtgcttaggaactggctggctctgagtatggatactgaaatgtaagggtctggaaatcgctgaaggacgaccccagactcagatagcatgcgaaaacaaagaatatttattctgcagaaacaaccagcctgtgggggtcaaccatgttttgaaatggcgaccccagacaaagatgtgcaggccttcttatagggaaccaggagaactctctagaaggattcaataatctaaaatttcattggtggatgctggggggtcataggtgttgagtggtctgcattcccatgtcatgcatgtttaaccatagcctgagctagggctgcccagtgcagatggccccttctgagataagatagttccccatttttgtgattattcctaggctgttctttgggaaggggtttcatgatcttgttctggatttcatggcctatccctggggctggtgtcttatggtctttttttcaaaatcaggcctggtccttaagtggagacaaatggggtttatgctgccctctcagaggctttgtgcgatgctttggcatggtcttgtggcatgatcgctgtgtgtctgggtggcagcaacgcccttggtggaaacattggtacatctgtcggtctttagtatcaagattgtggacacaacactctgtgtgtgtgtgtgtgtgtgtgtgtgtgtgtgttactattgacttggtggattttggttgattggttgggttggttggtttggtttggtttggttttggtcttttgagacagtgtttctgtactcatggctgtcctggaacttgctctatagacaacactggcctttaactcagagatctacctgcttcagcctcacaagtgctaggattaaaggtgtgcaccaccacatgtggcttagggaagattcttaaaaacctggtgtatgcccagatcagagctagggattgtccttttgaactgaacaaatatagcctacattagcagaagtatttataaagctactcgcttaccttccagagctgtctgaactttggcttgaataaaacctaatcagaaccctaatgtgacacatagctgggtgtggtggcatacgcctatagagctggcagaggcaggaggattgcccgtgagttagaggacagactggtttgcatagtgagttctgggccagtcagggctatatagtgagaccatctcaaaacagcctccaagaggagatgggtattacatcttaaattcttaaatagtgtgcttcatgtagttttcagaatggttgatatcaacagtctgtgtgtgtgtgtgtgtgtgtgtgtgtgtgtgtgtagatatggatctacatatttgagcagatgtatatgtgtgcgtgtgcctgctaaggcttggagttgatgttgaatgaaggagtcttccttcattgatgtccactctgtttaccaaggcaaggtctctcatctaattctttacctgttgaaccatctccacagcccttgcagcatctttgtggcaatcactggctttggcatctgcagattccctacatttagaaggcttgggatattctctctctgcctctgtcctgctgtttgttatgccgggggtaactgaagatctgccaacctgatatagggatatttctctagattatgctttttttttgttttgtttagtttggtttggtttggttttctgagacagggtttctctgtgtagccctggctgtcctggaactcgctctgtagaccaggctggcctcgaactcaggaatccccctgcctctgcctctgagtgctgggatcaaaggcgtgtgccactgcccggcttagattatgctttcttactggctttttttttttttctttaaattaagagtattgctgtcaggaaaatgactaccattttaagttttaaaaatcatattaaaacagcaagtttctttggagtaaattccagtttttcaacttgtagataggcagagacagtttgggcattctggagactcctgcctcctgggcactagtgttgccagctagcaagcctcctgatctgggatgggtgttagagaatcccttggcttgcccaacctttcacattaggggcaaatcttttatttttccttctcttccttcttcttggatttgagatgggggtcagacgggggtggggagggttggataggtcctcactgtatagccctggatagtgaaattgatagtgacacttgctatgtagactaggctggcctcaaactcagagatctgcctgcctctgcctctgcctctctagtgttgggatcacatttggtgcctgccccctgctgttgtgtcctggctggatactctacccagtgggctaagaactggctcactcggtcctgtcatcatgacaggtcacctgtgctgtaaagagacccctctggtcctgtctttgtcacccatctctaagcatcacagctgctgtgggctctggtccttctctgtgggagggtgatacagaagagccagtgagaggtttcctatacatagtaagcctaggtttctcaagcatgagatataagaactatcttgactttttttattgaaaaaattaaaaaactatatataatacaatgtattatataattttatataaactataatttttgtataatttaatttaaatttattatacaaatatatatttgttatataaatataatatatgcactctataatacataatctatatttatataacatgttatataatatatgtgtattatatatttatatataacatatatactatatatatagtgtgtatttatatgatatattatactacatataatatatagtatttatatcctgcatgtatgtctgtgtaccacatgtgtgcctggtgcgtatggaggtcagaaaaggccatcagatcccccgggacagggtctggatggttttgaaccaccatgtgggtgccggggaactgaacctggggcctctgcaactgccacgaatgctcttaactggtgggccaactctccagctccaactaattttaaacaaaaaacaaaaccaaaagagccagagtaggaaagttctgaggctctctgaggcactgcctcccctcggtgtatccttgagggaggaggagggtgagggttggggttggaagttggggggctgggcaccattctaatgtggcgtcccctgccggcctcttaagtctgtctgagctggtgttgatgggccatctccatttatgcttgtcgcagttttatttttagatgtccttttcttggtttctgctgtataattagcattttaaatggctgcctgatgccctgtcccctttgattttgaagtttattcattgcaccgtttttttatatcagttactaatgtctccagactgccaggcacatagcccctcccccctccttggcgtgaccctcctgctggtacctcagctgccctgtctccctcccctggcttttgtgtgtgtgtgtgggggggggggtgtcatgaaatggtgtacgggaaaatgtattattcaaggttctatgtacgtccacacagatgtgctttgttgacatggcgagactgcttttgaaccccagaccctgtacctgctgaggctttgtgattcccagtgaaaacagatgttaccctactcctgagcagctctgagtttaagtgggagggtgaagaggccaccatgggaagatgcgggaaattcaagtttcttttcccgttttccagatcaacgtccgggtgaccaccatggatgccgagctggagtttgccatccagccaaacaccaccgggaagcagctctttgatcaggtcagtctgactctgggaagggaactgaccaagcccttaggaggagtctgtaatggaccaatcctttggtcttctaagcaagttaccgtgttttgttacaagggcctttgagaaagcagaaactttcagatctgtgaagtcagatctttctggtaaatattctttgctgatagcattcacttgatgctgggctattcacagcaccactccttacccaatacaattttgtcaaatggctcagcccttcccaaagtggactagaaaacttttctagcattagcagctgcgtgtcacaagtcaacaaaccctttctgcagagggccacacagttagtctttcaggtcggaagaccatgtggtctgtgccgtctgcattgctcattctttcctctgttactgaaagcggccacaaatccatgaattgagtgaacttgatgttgtcaagtggaaactatacagggtaccgaatttttaaagggatttccccaaccttccaaaacaaaacataacaaagagaaccgaatacttagcctgtggccaccagatagtccacagaccagacttggccgccactgttgtatttagaatcctcttctgcagttcagacagatcagctttgctaatgcaagcaccgtgacaagggcacggcacagcgtatttgacacggggagtggttctcagtacatcagccctgtggtcccactcgcttttgtgaggccacagaatgtcccgtattctgtttcttaacaaaacatcaggtagccggctccagcaggcaggttcactgtagtacgctggttttctaaagcagcctttccagaatgtactacatgactatcgcataaaatggggacctgggcacctctccgtcccatcttgtggtagggctaggaaaactcttggctttttgttctcggcctaacttggtagagtaaatgggcccagacagtagcaagggtgagctgaagatgcctgggcaatcctggccagagctcacccttggcactgaggccctccgtgagggttttccaggagttgacagagcagacacatctgtgtccgcatgcctcctgaagcctgaggtaaatggtagagatgaatgagctcgttctagagcgtaggagagggtgtggggatacacgcaaggccggacatgaatcacacagcacctcacctgagagcttgccatcccaagtggccccactgcctccgggtgtggcactctgccttcaagggcccgacccgaaaatgggagccccggtgctggggaatcctgggaagggaattccagcaccttcggaggttacgcgtggtacagcccatgcttgacccagtctcttctggagagtcagggcagggtagtgccaggtggctctacagcagcagagcgtcgggtgccagggcatgcccagacctgttctgcagggcttggcgcggacctgggctgccggtcaccatggtttgaaggttgttctcttctagtgagatctcagcgattctctgctcgcggggtgaggcaggagtaaggatgaaatctaaaggtcacctcggaaaagttcccaggagaggctgtgtccccgagtcctgtgtggcaccatgttcagggcctgaggcagagcagtgtcctggctcccagcgtgggctcttgagcactacagtccctatctgcctgctttccaaagcagagcgggaaacctgtagtgtgagtggagagaggagaccatagtcacagagcaaggtggcttgctcctatctctgcagcggcctcttccctcccagtccaggctgcagcccgtcacttggctccagctggagaaccgtatggagcaagagctgggattggatgttctgtggggacaggagggatgggacagcacttcagctcctgcttggggttgactgaacctgacatccccgtccttacacttctgaagccagtcacccagacccttcctgaggcagaggtaagggccagcccccaagctgctgagacactccttgggtgaggctgagagatgaatcataggcccttgaaggcagtgggaacggacggacggacggctttacggaggcgtgggattcccctatggggaggacctgtgatctatggcaagatttcagaatgtactgagggaaggctgtggagaagcccaagctttaaacacactgaagaccattcattgggaacagtaaggagggggtggcaagtcagggcagtgggggcagcttttctcagacagcggtggccttggctgcacagcaggctcgcagactgacatgtccgtccacacagatgcagaagactctgagtggtccctggaagcctagagcagaggagaggggggccaaatggacaggcgtccttactagctggtcaggactagactgaggctgcagctgggcggatgggtggaaagagtgcattagagccagcacctgcttgctgagtgtgaaggccttccctgtgccaccttatgccaccttgataaggactggcttgcggataagaagtcggcaggagtggacacggagtcccttctgctctcggcacaaagggcatgggttacacaaggcccgggaacagaggaagaggctgcgtttccttcaccccgcactgtgataacatcttggaggtggtgtatcccctgttttgtggggtgagcagagagaggggatgaacagggcacatggcagttaataagcagagaaacaccacaggaactctgtgagaaagaatattaatctttttctaaaggtttaatattgcttgacatggcatttaaaattgtaacatctaaaatttaggacttagttctttttattttattttttttaattacgtgtgtgcacttgtgcagatgcctgcgtgtgtcagcgtgagggtgtcaggtcccctgcaggtggagttgcaggctctgtgagcctcctgacatgggtgctgggaacccacagagccagtcccctgcttctgagactccacgcagatgaccaaccagtcactgcttctccgtcctaaagaccttaactcgtgaggactgccattgcagatctttaagaacagaacacaggaagcttccctcatggtgtccttgctatggtcttagattgcaatcttagcatagctaggagaattgcatgtttctggaggtccttgacacgagaacggccaagtgccctctgcctgtcacactcttagaaccctggaaccaaccccacctgggcaccctgatgctgggcggtgtacctgggcattggtgaggtggactgttggttctgtgtgctggtcacagcctgccctgcagcctgaagtaagagcatgtgagcgggaatttatataaggtacagataagcctgagtctggccagcttgaggctaaactgtgtcatttgtgctttgacctagcatctgtgagtcacaggttagggttgagactctgcctgttccttgtaccaagaagtctctggggactgctgaacacgaggaacctcctgctggttccggtgcctgtgtttctcacggtgggcctctctcacacaggtggtaaagacgattggcctccgggaagtgtggtacttcggcctccagtatgtagacaataaaggatttcctacctggctgaaacttgataaaaaggtaagtagggttaactatttacaggctattaattgggagctggtgtgctctgtggacattgaaaccggaatgcttcaatgatgcccgtgtctttttgttccttgttatttgtgtaaagatttttgtagacagagaggctgcccgcttccaggaagagagactgtggattagattagatctcggctaattttcactcctcttcctggctcccctgttggggcaggtaatggctaactgcttcgcttttagttgaccttagtgggtttttttttccatgagattaatctagaaatcatgaatcacacaccatattgtcagaacctgccactgctttgtatgagtctgcagtaaattatctaattccaaagattatgtaactgcactcggcagtaagggagtcatcagctaagtgtagtttcttcagacccttggcaggctctgcttcattctctacctcactttctgtaaggaggatcagggtcagttcacggtccagggccagaccagcttcagggcaggtcatagcgggaaggacatggggtcattccaaatgagttctccgggattgatagcgtggtcacaagaaatgagggtgaagccagccggtttccagcagagtgtgagtgcgtcggactgactgaccacctcacaccctacagcgatgagtttcagggctagggaatgtggctgagttagaaggatgcttacctagcacgcacagggccccgtataaaccaggcatggtgggtcatgcccataatcccgggactcaggaggtggaggagggagtgccagaagttcacggccatcctccataatgcagcagtttgaagcaagcctgggattctcacatgataacatgtgtctcacatgatagcagtgataatgggatgacaactctgagtcactggtgctcaggaatggcctgaagttggcactgagaaccgtcccccgtctggcaggtctccgcacaggaggtccgaaaggagaaccctgtccagtttaaattccgggccaagttctaccccgaagacgtggccgaggaactcatccaggacatcacacagaagctcttcttcctgcaagtcaaggacgggatcctcagcgacgagatctactgccccccagagacagccgtgctcctgggctcctatgccgttcaggccaagttcggagattataacaaggaaatgcacaagtctgggtacctcagctcggagcggctgatcccccagaggtgagccgaggctggcctgggtgagcacaagcccctgtctcaggaggagggagcgagcaggagatgtgagagggagcaggtgattctgtcaaggtgaagtgctcccttaggctgggacgctgggactttccaaagtgctcactttggaatgttctcagccagcaggctcccctgatgatgaattgtgacccagccagggtaccgtgtccctttctgacttgcctgcttagctctgcctggtacacagtaacctgacctctggaaaatctgtccttactaaaggtggcaaaaagagaccccctttggaagaaaaggttatttaaaataatttttcacaacttccagcgggaatatgttctttgaaaggctaaatcttcaggtttatgctcaagaaagaaaattggaaagtagaaacaaaaagccgtgattgttctattcaaaagaacagtgagggattgaaggggtgggaggtggcttcgtggctcacatctcagcccttgaaggtgacaacagtcctgcatctctccttcccaatgtccagagtcatggaccaacacaagctcagcagggaccagtgggaggaccggatccaggtgtggcacgcggaacaccgagggatgctcaagtgagtgcctgccttttcagtgtgccttctctgggactgcaggtagctcttccagtcaggtcagccagtgttaggtcttcatgcttggtgaagtccaagatggatgactgggcttgccttggggagagggagatttcagttttgtgttttaaacaaggcctggtgttcttgcccggggaaagaaacaactcagttgaagcctcaaatgctagctagcagtaaccacccttcagtggaaggtccagtggccagcactcatttggccgagggtagcactggttgccagtgaatccgggtttctgtctcttgtggaggagctctaactaacttgattattaaagtcattatcttagtgtaatatgcactatatataatgtaagcacgggctgcagttgagaagagcagcaaagcttgagggagaggcatggggctttagaatactcaaatggagaccccagtccctgcctctggccttgtacacagcccccactacttccttgtagttagggactcggggactgtgtgccacaggggccaggagtctttgtgagttctttcttgggaaccctgattgttctgtgaatgcggaaatctgagttatccctagcaagagaataaaaagaggggaaaagcctgtctccttagaaaccagggcaaatcagtagcttcttcctgaactcacggggccgatgaatttacagggctcagaacaacacaggccctgcctgcccatcccgtatgccgtgcctcccgctctactctgcatgactggcctccatttcaagaataagcagagacttgtgtgttcaggtgtgaatgctgctaactataacacctgtgctttctttcccattagggacagtgctatgctagaatacctgaagattgcccaggacctggaaatgtatgggatcaactatttcgagatcaaaaacaagaaaggaacagacctttggcttggagtcgatgcccttggacttaacatttatgagaaagatgacaagtgagttgaagttgatcgctgattttttttttcctttcttttttaagctgtggaatagcaggcctggaaaacagaggaagtgccatgccagtcctgtgtgtgttagactgtgtggtagcatcatcttaagtggtgacctggaagttagctacttagttagatgtaccttgtacatctgttctgtaggacatgggacctgtggcaaggaaaggccccgagtgcaggactataggaccctgaccctgtgaagcagagcttggtggctcccagaggccgttccccctctatggctgttctaggctcttgcctagctagggtggactcctggctcaaggcttgtgctaatccaatcaggaacgttgataatgccaccagacactccaggattctgtaagcagccgtctgcatgtgtgaacaattagctaaatcccctgagactgcagaaggtgtccgattgcttcacagccattacgttgcctgtcaagcaaggtctgagaacagagtcgaaagagctgcctggcactgggagcctcttgtcagctgatgatgtttgtccctgagatgccttcttcccaccaagggaaatcatcccacttcagcaaaggggaggtggtcctgagcacagcatagaagaagggctctggctgaggagccgtgagacaagaatgtcccagggtctcgatgtccccgttagtaggtcttatctgggaaacctagagggaggcctagagcccaggaatgcagctgagtcccgtgaagtgtgtcaggatgtgcagctctgcttcatgtcctgtcagctccccagatctcaccctgtccccatggtctctctggagccatctaggagagtggccctgttcctagtaaaggacatatacataaagactccagttagtgaggccaggcatggtggtgcacacctttaatcccgcactcgggaagccgaggcagatagagctctgtgagttcaagtctagctagggctgcaaggtgagatcctgtctaaaatacaaacaacccatacagaacatcccaggagcccttaacccttggggaaccagaggcaaactgtggggaacttggctgcttgcttgtgtgatgcggtgttgatagagagtctgagggaactctcagagccaggccgcaggccttcctccacgcctggagtggagcctggagcctgtgagccatcaccatgcggaagagctgcctgtggagtcagaaagtcaagagagcaccgggccctgggccttgtgggggtgcatgtgggaagctgcctctgtcaaaactccatttttgaacagccagattttgtaacaagccatggcgagggctatccaaacaggtttttccagctgtaagaaacagccataggcaagaacatgctgatgtcagcccctaaccaccacagcctgcagaaatgttgcttttctttcttcttttttattccaagtaaaatttgaactgtgctctactgagcccgccccttgcctccaggcttccagtcagcagccaactgcagttctcccaattcttccttattttctcctggcagcaggaggcagctccactcccatcaccatcccctctaaagaaggcacgccctgtctgcggaggaaaagcatttaagtggacactaagtcagttaacagcacagttccctcccgtttgcagtagctgtaggagagtgttctgggctccgaggggccagagctctaggggcccgggtgttaaattgcatccttcaccaatagaactaatggtgggcattggatattcttgatacattgttaataggggtaatccgatacacaaacaaacagatatatcttatcatggcttttttgaaattaaatgggctctggctgggacatgtctcctggggacccccttttcatgctatatgtcacacagttcattgaaagcctgggtacttactgaaagcagttgtctgtcccctttctttaaccctgggcttggaaggaagagggggagataggcatacatagtgcccccacccccaccctccactggcgccatgcacacaagtccagccaggctggattatgacccctcccgacactcccataccaaaaccgacacaaaaataaatgaacttagcacacgaggttggccttggacccttagcctgtgccagcacacccgtaccagccccttgtgtcactccatcatgaagtgtgggcagcagtcctggctccaggcttcacgtctctgagagcgagcatcctggaggagccttgtggactggttggatacgacactccatcagctcggtcactgagatgcaatgcttcccccgcctagagctggcggtgtctcagatgagatgtgccttgccgtgagttgcggcatctgaactcgtcccagtgaaacaccgcagtggtctcatccttgtgattttgggctctctgttgacttttagaaagacttaggcttgcatttcccacactgtcatatttgagttttgcacagtgggtgagtgcctcagggcccccatgaagcatgtgctgttgttggtgggacggtccagccactaccgtgtctgcccctcacattgtagttggtaagtgtactgtagggagagtctacgaactggatttactgacatttccagctattggcgctaatgtccgtggatggaacttttaatagaattattactttttttttttttttttttggttgttttcgagacaaggtttctctgtgtagccctggctgtcctggaactcactctgtagaccaggctggcctcgaactcagaaatccgcctgcctctgcctcccaagtgctgggattaaaggcatgcgcagtggttaagagcactgactgctcttccagaggtcctgagttcagttcccagaaaccacatagtggctcacaatcatctgtaatgagatctgatgccctcttctggtgtgcctgaagacagctacagtgtactcatatacataaaataaataaatctttaaaaaaaaaaaaagaaatggcaatccgggggcagtcacaaacacattaactagaaggggccagtttctctctctttcctcagacctcaggattagcgcggactcatgggtatttgtgagcgatgctgctcattttgctactgaggttgtttgaggttcagcttgtagggaccttggcctggtatctgtgttgcttacatataaccccattgtgcagaggccgaccttaactctcttacatctcaagacgcctcagtcctagtctgtgcacacccagcaaccagccatctccacatagccctggttcctcttggtggtgagtcccacctctccatcatcagcctccttctcttccgcttcttcttcttcctcctcctgctgctctcctctaattcgagggcttacaagtggcctaggttaccctagaactcaccactctcctaactcagcttcccaagtgcggggattctagacacgcactgatatgtccagctcttctccccaccttctaagtaggtgacacatttggggcagtgacactatcagtcctgtgccagtcagtcttctgggtggatcccgcttatgtcacgtgtgtgatctctttttagacagggagaggaaaagagaatccctgcaggctttcattttccaactggctaagaatcaaaggaagttccctcactcagaagcgagtcacagctccctggccccggcgttctgacctcactcagaagcgagtcacagctccctagccccggcgttctgacctcactcagaagcgagtcacagctccctggccccggcgttctgatactacagttagcttatgagtggctacagattgagctttcaaagttgcaagggccgtgttggacccagcctttggaaaacagatgcctgctgaggttggacacccggcttttctaggtcagacctagcgagacctgtatagacagatgctgcaggacagagcctgggctccttggttttaggagttagagatgttgacctggcagccagccatgtggctgtgggttgagtagctctttcctggttcctagttcttctgaaatcagctcttggcgtctggggcatgtgccctaaaagtagctgcctggcatcactatgctttggctcttccctgtgagggggacaaagatagaaatggtgaccgggtcagtccgtagctatatttcaagtgtgcttagacctgtcgacaaagccatactgctgaaagttctgaatcccacggggatggtgaggtgagagaacacaccgcatctgagtgccgcgagcggtggattaagttgggtcgccactgccgtgcccacgaagccctgccatgcttaaaagccctcttgtggtcttcggaggctgccttgtgtttctgacccagcttttacttccaaagcaagagccaccctgccccaatgtgtctttagccactgaatcccacccccagactccagcctagctgttatccgcttgaagtagaacccataggaaatgacaaggtttgttttgttgttgttgtttctttttttattattgttttttagtttaggtgtgtgtatatgacagtgtgtgggtggtagagcagatgtgcctgtgcagaatccagaggccatcagttgccctgcttgatcatgctccactttcttcccttgagactgggtctgtcattgagcctggagctgatctggcggccgatgagactcggcagtcttgtctccacagccgcagtgctgggtagcgatgctttttatatgacttctgtggatttgaactctcaactcaggtttttcacacttgtgccaagaaggctcttgcccactgagccgtctcctcagcccaggacagcttttgatggcagagcttgtggtttgagagtttgtccttacttccggattgctattacttctggtaaagtgctggagagtaggctggagacacggacagcatccagccaggtgggagtgtgtgcctcgatagaatgagagccaggggtgtggaatccagccccatccctgtgcacctcatggatcagtggcttctctgtgaggaaggcccttatggaaaaaaaggcatggttttataaagcgaaaagtaacatggtacttaacactaagctggcttgtgtcacagtgggaagccgaggggcctgtgggacaggagacaaggaaacgtgttggcagcctggaactatgttgaaggtgtagttttagagctgtgagtagactctgctgacatatctgaagagagctctggctggctgacagggaattaatcagaccagaacagcagtgggggctctggccgcatgagaagctgggcagggtaggcatgtgggggaagaaggtcaaataggacaaaagagctttccgacgtaagagtcggtgacccagggtgatgccgcacagctgcctgatgctgagaactaaaacctggctgcaccatttggttgaacctgggagggttaaagactgtttaaacatggtgattttattaattatgtctcctggactcgctttgtattttaaatgaagaggtttgcttaggtctccccgtccaagaacatgtgagttacacactcacatctaaccaactgctgcttttctttttatgacctcaggttgaccccaaagatcggcttcccttggagtgagatcaggaacatctctttcaacgacaagaagtttgtcattaagcccatcgacaagaaggcacctgtaagttcaagcgtagaccgggtcatcgcttccagtctcccagccaaccgggttttcaggagaaaactgaggcttcctagtgtcccgagcacacggtgttcctctagcttccccttaatgggagctcagactccatgtgactgaccacggctgtgggaggttgctatggagaccaaatgtgtccatccaaagctcaatgatgtaattttaagtcttcatacagagaaaagggcagttctcattgaccttgaccaagtggtaataagtgcttccccaaatgacacacttctgcggtggcacacccggcttgcctaatgctcgtgtgggtagccagcccacccctgaaaccagcctgtgggtggagcttatgccagtgtctcatcggtagctggctggatgatagacaatgagaccttcaaatccaaaggaccaaaatttggctgtctgtactgccttgggtttaggagttaactgttcaaagtgtttcagagcatggtgggtccccagaggttcccctctacctcttgcttcctgtctacgatgggcagcccacctttgtcctgtggtcaccctggcctatctcatgatcttcactcaggcatgtactctgcccatgtgggcagcagagtgtgaagtaagctgaaaggaccaatgtactgtgaaactttatctgggttttcttctgtcagcatttaaacttttagttgatgttgggccagaatactgaagacagacagacacaactctagcagggtagaaatagccagaactctcttttcttggttttgtttttttaagtataatttttaaagagcttcctctggcttgtaccacagttatagattgggaaagactttgggtccccgagtcttcttgttccctagttacagtggtaagcctagagagaccagcacggactgtgtccacaccacgatgcctgctaagcctcttagggctgagaaccccttggaaatggtaaacacacttggagcactcagtgttaccaaccaaccgtcacttccccgcaagtgggccgggctgtctgtcggaactgtaaagtcagcaggtctccgcttggcttgtgaaagtattttctttattgaaatgtctcctgctgtttgtaaacccgtgactccctctccactcacacagttctttaaaattaagctgtttaatacagactcaggctccatggtaacgactcccattaatatgcagtcccaccagcagagggtcacaacaaacccatgttctgtgggcagtgaggtggcacagctagagaggcagttctgaagtaagtctggggagattgctttctgctccgtgtggagattgcttctttctttttttaaattcagcttacagaagaagtggcctttgaggctagattggtgaagaatgcatacatgtatgttggcatatattttaaatttctttggaaagccaaagactgcagacgcaatcgtggctgatctggttgaattagtgcacacgtggtctctatcaggcagccctgtgggaagcttcccttagagaaatggctgccaggaagatggttcagtcagtcaagtgcttgccctgaggctggatgccagcagttccggaaacaggtgcagttggggggcatgtgtgaccccagtgctgagggaaagtgaaaggggtatgaggctcatctgtggggctcattagccagccagtccagctggatttctgagctccaggctcgaggagacaccctgcctcaaaaaaataaggtagaaagcaacagaggaagacactgatacaccccatctccggcacacacacacacatcgcccatgcaccccaggagcctgcggcacacacacatcgcccatgcaccccaggagcctgcggcacacgcacacacatcgcccatgcaccccaggagcctgcggcacacacacatcgcccatgcaccccaggagcctgcggcacacacacacacacatcgcccatgcaccccaggagcctgcggcacacacacacacatcgcccatgcaccccaggagcctgcggcacacacacatcgcccatgcaccccaggagcccggtgttccaggactgacctgtggccacagacagtcgcagttctgcattgcggtgggaaaagcgatgagaccaggcaaagaggaggattctcagggtggatctagcaacaccctcagacgaaaagtgacgctgaggggaggagaggagggtagccgggcctctcaatgtaggcacaaacgcagaggcagcattagttcgggagctgaggggtgacaaggaggcggtgacactccatccttccccagggctgaggagtggccatgcctaatcccagtattttactttggacataagcaaaccacatttttaaggttagactataatataaaagacagcagaaaccctggaggtaagagggtgtagggtttctttcttgttgcagcctccggaagggagccctgggaatgtataaaacttctccagagggcaaggcaggaggcattgtcttccctgcccactcacggcagtctgggccctcgttctgacttttaggtgggctctccgacctcatttccctttcagctagtccaggcagccccctctcccttcagaacaataggccctaccattcccttagccctcaggggaaggcggagagctctccgtggcttttgaactgttagaagatttccggactctgtctagctgttggttctgggcagccttctcaggagcccctccgacagacccatgatggtcttggaattggactttggccttgtgggagcttcctgggagtgtgcccatcaggatttggggttcctcggggtcctctttcccttgctcttctgtctgatacttgtttttaggacacgggctgtctgtccactaagaaagcctccccttgtctctctttcgcattaaaatgctctctgaggacttgaactcacaactctaacttggagtcataactggcttctttcaaaggcataggagaaattccttcccctcacccaccccgctgctgacggctgactctggagtgttttctaaaagtttcttgtaggcagggttggggaacctcatgttaacctgtagttctgactcgagtcgctgtgactgttttttttctaaaggggagtttgtgcgtacttgtgagtctcagtgggacattttggggccgtgtgcctttgaagccatgaaatgaggttgttccttcctgtgtaataagagataggtaggcaataaaaattcctggttctcctagcgctgtggactcctccctgagaaacccaatgacttaataaccagtctgtgaaaccagaggggagccccacccaggaagttaggggttccaggaggcctcgtggagaccggaaaactaaaccaccaccgttttggggtgtgtgttactcagcggttgggaggagcacctgccacattaacttcatcttccctccagatggctggagaaaaaccaggaggcatttgcaaatagaccatgactcccctctgtaacctaagctaatcgtagaaggagcaagaagttaggagtcaagattgtctgtcatcatggtcctaaacctgtatgtactggtgacagagcttccaaataccattctctgccctcctctttgagaaagaaactgccttcgttgtgagcacgtagacagctggcccaagtagcgcctgtgtgtggcagccagggtttactgtcccaggtactgttaacacactgtcccaagccccttgggaatattttccaatttagtcttgtgacattcccattatactgttgcccttgttcggtgaccctgaggctcagtgatggagcgcaggatgcttgagggtgtgtgtggaatcgagctcagggctggtcaacatggttggtaggagtagcactgtaaggctgtggtgcatccctggctcaggaatccagagcagtggatggaggtcagggcagtctgtggcagcgtgagaggggacgggaagctcagaagttaaggtgtagcatacaggaaggaacaggaaatgacgggtggtgacaggatgaggagctggagaagcagataccaaaacatggagccagcgataaccagctctctcagtgcaagaggggcctctctaggctgagatttagcgtgtgcacacccatgctaggcacaccacacataaaccacgaatatacaagcggtgtacacacatgtacatacccagggccccctcccacttgacccactgagcgtatattctatatacagggagtgtgtgtgtgtgtgcccccccccccatggcctttggccttttaaagaaggttgagaaactcttatgaagtgccgtcttaggaaagaaggtcgtcgagggagccgaagccaaggccgctctgttctgttttgtaggactttgtgttctacgccccgcgcctgagaattaacaagcggatcctgcagctctgcatggggaaccatgagctgtacatgcgccgcaggaagcccgacaccatcgaggtgcagcagatgaaggcccaggctcgggaggagaagcaccagaagcagctagagcggtgagtggccaggacacagtgccagcagggaccgcgggcctggacagctgcatcctcaagtgtctgctcagcagcccagttgggatcaagcagggacacagacacaggctatggcatccctgtgctggtggtagcggaccagcagctgcgtttgcaggtccgagcctcacccttcccccgtgcctcttcctcttccctataccagacagcagttggaaaccgagaagaagaggcgagagacggtggagagagaaaaggagcagatgctccgggagaaggaggagctgatgcttcggctgcaggactacgagcagaagaccaagagggcggagaaaggtcggggctcctgctgcctggcctcccgcccccgcccccgcagtcactccagagttggttcccctagagagtcatggcccacagccaagagggaacttgttcaagagtgctgtctctgacacaatcccataagacagaacagagcaattgcagtgccatctttgagactagaaagcagttctgtgctttattaatgtctgtctgtgcctgtcagtaattcccccctacacacacacacacacacacacacacacacacttgctaagaatgttgaacttcagtgagatagatatcacatcccttcaacacatacacagctgtcacaaccagcttgtgacacctctaccatacatcccagggtcataggtgcagccctgccctctgaggacattttagaattagaagagagatgctgtctctactggggcatgaaagataccagcaaggccatttctgtgtcccaagtcagtgcccaggtgaagagccagggtgtcattattgaggtgcagcaggggtcagagaggtcagacctggccccaggagccaggatatctaagcagctgctcctccggggtctctggccacactgaggaaatgatcttagcagaaatgagccccgagctgtccctgctcacagcccagtgactcagtccaggactttgtgactgtgaggttggctttcacacagtctctcacttggggtgagatgggaactctaaggctcacttcctgcctgggagtctgagcagcgccgactccattttctctgcagagctctccgagcagattgagaaggccctccaactggaggaagagaggaggcgagcccaggaggaggctgaacgtctggaggccgaccgcatggccgccctgcgggccaaggaagaactcgagagacaggcgcaggatcagataaagagccaggagcagctggtagggattgcctgggtttcaagatgctgaattatagagagggctgctcctggggaatccaccaagtgacagctgcctttcaaagcttgctgtaaacagatctgtgtgtgtgtgtgtgtgtgtgtgtgtgtgtgtgtgtgtgtgtgcatgcgtgctcgagcatgtgctggacctgtctgaatcctcaggaaggtggatgtggatgcttgaggtcccagagccatggggaggtacccagagggtcccctgaccctgaagagggcggggacacagctcatcaccaggaaggccaatgttacggggaaatgttgttcaccaatggactctgccagaaggattctggacacccctttaccctcccctgcaggctgcagagctggcagagtacacggccaagatcgcactgctggaggaggcgcggaggcgcaaggaggacgaggtagaagagtggcagcaccgggtgagtgaaccccagaaaccaggcatggccgtggggtacgtcttaggagggtgcaggccacaccacaagtttcaggaacctcttaacaaccctctgcagatggcttctctgttcatgagacagaaatcccccaaggaatggccttgaccctgttcacgaggtagagcagcatgcaggcactggattagcagcagaacaaagggcccactcattccttcccctgtctgtatccccatgtcccacgctcttcagccgtgatcaaacacccttgattgggaactagttttgattctaactgcttgggtaccccctgcaatggggtcacagaccctgaagcaggatatgacagttggagtgtactggagaactttggaggtttcccgactagcgcgacagcctggactcccagatgtctcactgaacgctcacttgcctttgagcctgctccctgaggggcagcatccagtgtggtgttctgctttgtgttctttacagtgtcagtatgtagtagctggcctcttgagtcctctcagaggctgggcttccctgtgttcctgtacctccaggatgaaggtctgggtgttccacgtgtcctttgcttctaagggccctcttctgggtgtgccctgggcctacgtctcccatccgtaccttacatgttttctaacccactgcaagcagaaaacttaggattgggggaaagcgctcattgtaaaagcattagttaaagaagggtcaggctgacctagaaaggggtgcaggtggatgaggctgggtctgggcccctggctgacactcttaagagcgagatccatgcagacctactccaagtggtagcacttccagtcgctggagaacagagccgatgagcatgtacccggattacaggcagagagaaatggttgtgctctcgagtgtccagggtccggaatcttgagttttctgattgcagtgtatgtgctgtcactccagccaagagccaaggggaggcgggattccccgggctcctagccggccggcagaccgttccatgatgggatgtgtaagggtcctcacttgaccagcattctcctctccaaaggctaaagaagcccaggacgacctggtgaagaccaaagaggagctgcacctggtgatgacggccccaccgcccccaccgcccccagtgtatgagcctgtgaattaccacgtgcaggagggactgcaggacgagggagcagagcctatgggctacagtgccgagctctccagtgagggcatcctggatgaccgcaacgaggagaagcggatcacagaggcagagaagaatgagcgcgtgcagcggcagctgctggtgagtgggcagggacagcagacattatgcagggccccacccctggtgccttctcctgccctaacctaacatacccgcatatcccagtcagtccacaaggagtgaaaccctgacctcacgtggcaagcaggccaataacagataacttgcttcctgtttcagaccctgagcaatgagttgtcccaggcccgggatgagaacaagaggacccacaatgacatcatccacaacgagaacatgcggcaaggcagggacaagtataagacgctgcggcaaatcaggcagggcaacaccaagcaacgcattgacgagttcgaggccatgtagaggccaggctgggaccaagggcagagggcacctcactgcaggcaggtgtcacacttggctctttagttctcttaagtttagacacccccttgctgtgttccagtcccttaaagagcagttacggggcctgcattctgccccgagacccagtgggctcctccttggttccttctaattgtatcacatagtgccaaacaggtcagatttaatgacagttaccgaatcacttcctgtttggagcagggattcggagggctggccctcatgaagcaagattcattgtcactgggacagcactgtggctcacgggtgccatacttttctctagttttacaatgagctcaaatcgattttgttcttgatttttatgaaggatccatctctgtgtattgaggggtaaaaatgattttgaaatttgagtctaaagcatgcccccacagagtctccttcctccagaccgctggcagagtctccaggggtccttcagagtgtacggtacaggactctccgatacaaaattctcatgcttatctgttagcatacattgttggacttatatatctaatgatctgctatagaggatagtatttatatataagcgataatatgggtttgtaacattagttttaaaaaagggaaagttttgttctgtatattttgttaccttttacagaataaaagaattcaacattaagaaccatgtaaccgagacacttgatctgacacaggggcagtcgggaaaccgatgactgcagtaatcaccactgtacaaaaatgttagtgggttttgtgcacgtaaaatgcacacttccatttcctgtcagtttcttatttgaaaaaaaaaaaatacacaccgagagcatccagactccagccctgaagggacgccggcctctttattgtgagcaacttgttcccgttttcagtttgtcttccttcctttcgcggactagcctccttggttgtgatgtctgtcctgtgcgggtgactccgcaccagatttacacacaataaaagctctccaaggccttgtgtctgattgcatggggggggttggggtgggagtggggggtctctcagacttgtcctcgggattcaggaagcatgctaatcagagaggggtcttccccagctcccctgcactgggaggtttgccacccgagaggagcacacagcattcaacctacttctattttcctctgaaacaacatataacaaagctaaaaacgtggttgttaataaatgctgggagttacaggacagtgttgagcgtttattgagatcagaacatttccacatctatctgttgacagtagcctccccgactgcctgggtaacagtaattgttccgtgtcctaacgacacacattactgtagtcagttattggtgatccagtgtgtctgattctgccatgatcccacttcctgttgacctttgtgggttcgcagtcgccttgggcttcacctcagtgcaggacgagggtcatgtctgtccacaggtttgggctggagaggactctgtgccactgaagcttggactgtgaacctgagtcgggacaacccgcagcacctccctctgcaatgagagagtaggtggggggtgagggagattgccactttgtgctccctagcttttaagaagcaagtacccaggaggagacttcctaagagacaccccacccttgcacaggcagcatcacccccaaagcctagggtcccacgctctaaatcaaaggttcccaacttgtgggtcaggaccccctttgggggccaaatggccttctcacaggggccgcctgagaccactgtaaggcagatttagatgcatagacattacagttcataacaccagcaaaattactgatacgaagtggcaataaaatacggttgggggctgccacaacatgaggaactgaattagagggtcacagttaggaaggttgagagccactgctctaaagcaaagggaggtggactcaggcattcagttcttcccagtgagtcatagaagttaattctgagactggaggtggtctgagggtcctgtttttttcaaggaagggatttctgggaggacttatttgcttcgaagacatttgcattccaaggaatgcaccctccagtcttgtttagtaattctcagctggcagtcattgaggagacctgcgcaggcaacggggaggtcttacactgtgtaggagagccctgctgagagctgaacctgcccacgcccagtaggagactggccatacaatgtcagccacctcctggtaagccacagtgaatggcgcccttgtccgttccccttgatcatgctcttccaggtgtatgcttgtctgggttcagatattttccttacgaaaataatcctcttatgattgacacgaggaacaaaagcaaacactgtcccttgcctgttgtgaggccccgaagcttttgtttctttagctgagccaaatctgattgaaattgctgaaatacttggctgtattatcactctcttgcagagttagacctcgacttggggattcccattaggacagggcagggcagggcagtttcaaagccagctgaattgtttccacttcagaagtagggattcgtgtcaggcaatcactaagggcataaaacctgtggtttttcactgaacctcagagacagacccacaaaaagtgaacagacttacttgaaccaagcctggcttccccgagcagacggtcgttcataccaaagatggcctggtcccagacagtcagctccaaggtggactgtctcagctgagaactgctcacaccattaaacacaaaggagtgtttccactggggacaagcctgcttcttcaggactggggacttcacacgcagcttttgttggtttggcagggtgagacagctgaagagggaaatgggaaccctgaagccacagttgagtgtgtaacctccttccccaccagcccccattctgtatgctgatctaggttagacccccaagcctgtccatgtgccttctccctacaaagttcccattttcctttaaagctgggtatttaggctgagttggaattctatggcatatggtcctcagtgtgatcgcctcatggccatgccaccattaaagctaatgaatgcctagggaccaaggctctgtatatacatggcttcattgtgccccattctcaggtaaatacgttcagaaaataaaaacttgccgcagggcacacacagtttttcaatgcttcagtgactgggaggttgcccctctatgattattcgtgttttcttttgaggacacaagtgtgcttgtggtgactaagaatagccaagagtgaccatatggtacttagtacaagaggaggtgccgagctagggaaatggttaacagatttcaaaaccaatggctgatatttcaagaagtgataaggtctaggtttctggtcaaagtgtgtcattcctagccaagcctcataaccaaaaccaatttcttggaagttgtggtccttaaaaacatgctacattccatttctttttaatctctttaggttttataatctattttgtgcgtgtagcaataagaactagtgagcatgttggtcacagcataactagcaggagttggttccctccgctgtgtggttggttccagaggactggactccatcaggctgggcgagtgctttcaccctgggggccttctcacccaccctcttttagattttcataggaaagctaaaataagatgaatccaaatggcctatccttttcagtggcctatccttttcagctttggggccatgttcaatacatactcaccaacacatctgatacctaccccttaacaaatgagtttaaggtgccatctgacctcaccggtaaattcttggctcccaacacaaccagacacagttgaccattaagcgctagctgacctgttcgggaaggaaagccagaactggggttaagccgatttatgtgtgcgtgtgcagcatcaacacccagaagacggtagccccctgagaagccgtagcctccaggcttgcagaagaggcactactcccacagctccaccggctttgcccacacactgcctttagtccacagcatgcagacagaagggaaacatatgtaaaaatgccaggacagtgccatgacacagagaacttggggaaggcaggggtgaagggtctcagggggtagggggtgtgcaagctgactgtagcttgggtttgagaaaggagcaataaactgctgttctgttgtgttcctgaccctgggaggttggatcagaatgtcctactcctgccaaggtcaccgcactgcccttgtcattctgagctctctgcatccttctctactctcatagcacgtgcagaccttgcattatctaagttaaataccggaagctatgcccttgacccactccatccccatctcgctgagcctccagctcctagtgccccagaagccctcttggttcccaaagagccaagctgacccctggatgcctgcttttatctacagggccaccagagactggcagtctacaccttagagaggatgaggtgtgcactgaaggccttgtccttctgctcacctatgctcccttgagtcacgagctccagtgtgaaggatcagtggagctgtgggaaatcgtttgcctaactcaaactctctgccctccaggctttggggacagtgacacagacagacgttcatggggctttaggtcaccaaccttcttgggcctcctggggctttcttggccctgcgggaaggaccaatttggctcgaacagcaagttctccattattctgaggaatattctcttcgtatttctcagcctatgggcgagaggcggaggtcagaagcgggacccctcccatggtacctcagagccacccaactccgtccataaatgccccaacccccacagaccctctcaaggcctaggggtggggtgggtacacttgtagactaccaatactgcctatactgccacctatactgcctatactgccacccctgccaccctcacccctcagcaagggaggaccaatttaccccttcagaacgtcagaagccaccgggaacagcaagcctccaggaggcctggacaacattggcttgaggacaatcaaaaccccatttaccagctcactctcagaaagactggagctacccttccatgccaatgtccccttcgggcactgagggcagaaagcactgaagacttgtgtctgaagtcataggcgatagaactctgtaggccgtggatgtctagcccctgtagagacaccattcgatctacagaaatggcttctctggtcatgagtgattttgtcaaaaagtggatgaaaagcccagagaggggatgattctgagtctgatggatcttccatctcagttgtgaggaagtctactgggagggaaatgcatgcctgacactatcagaagagagaagctgccctcagggctcccacactcctggaagcctgcatgggccagctgccaccttcacagaagcatccaacagggtaccaactgggtcagggaccctcaaggtctaggaaccaagtcccagtccctgaatgtcccatggccggagctccgtggcaggcctgtggacattcactccctgttcaataatgctactctcggccggcatcaggtagggtgacttcagcttggcactctactgctagcctattcaccaaaggaggctgagtggggtgcccatggatgtcctagccaggttcatgctgccaatggggcgggggcagggtagaacatgagttgctcacggtgactgggcatgctcagcccctatggtagtttgagtggaaaaaatgtcactccactggttcaggaatttaaacacttggtcctcggtggtacagtttggggaggttacagaacactgggaacgtggaaccttgtttgaggacgaagagtgtcacctggggtgcgctatgagagtgtggaccctcagcccacttctagtttgcccgctctgctttccgtgtgcccttgagatgtgatctccgggcttcatgcccctgctgtttactgccatggctccccaccatggtggactgactatctctgtagaatcaaacacaacaaactcttttcttctggtcaaagggttttatcacagccacagaaaagtaacaaaaagacacaccttggcccgcagaggataccatctggcattctgtgccgtactgtccttaaagtcccacatggccagtggaaggatcacttctccgaggaacaccctccgggcaagggtgcctaggtgccacacagagacctgcagcctccgggtcatcagctggccagggtccacctgatactgcatatgcaaggacaaggttgttagccaggtctcctagaaccacccccaggcctgcacaggctgagccctgagactcgactgcagccagagtccagatgtagccagggtggcccaagccatttggatccagtggtcaagatggacctctttgtctgcttgccaaacagcttggatccccccatagccctgtcctcagcccttcccacccctagtcccaccagatgccctttcctatttctcagaatgaggccaggatggaggtctttgcctagtcaggattgctggcaatcaaaccaagaactgtgtcaacacaggatttgcccttccacgaggccaccctgcaccaagccaggattagcccaagatactaaagctcagacttgatttctaaaaatgaagtgggcccaagatcaatccccagcaaccacatagtggctcacaaccatctgtaatggagtctgatgtcctcttctggtgtgtctgaagacaactacagtctactcatataaataaaatcataaacaactttttaaaaatgcagtgggaccataactagatataaaagacatgtttgacactcatcaaatcctaggatctgtccccagtaccacagtaaaaaaaataaataaataagcaatcaaacaattaaatccatcctcagtaccacaataaataagcaaatgaatgaatgaatgaatgaatgagtgaataaatgaacaagtgaatgaatgaatgagtgagcgaatgaatgattgagtgaatgaatgaatgagtgagcaaatgaatgagtgagtgagtgagtgagtgagtgagtgagtgagtgagtgagtgagtgagtgagtgaatgaatgagctttcatgccaatatgtttaccctggatagaaatgtatgtgagaagaaagtgggaacagagatcaggactgtaggtgacacacagcccttctgcaggctgtgccaccacttggggcactctgcctcagcctctgagaacctagattccagttttcacatcgtgacttttccgacaatgaaatcaaagggcgagctgctggggccctcgtcttgtaccatgcatctttggcctccacaagcacaagtgaggtcaagaccatgaatcattcattgaaggagggtgtggtcctcagcctggaaacaatcagcggtgggtgggactgccacccacacgtccaaccctgacctcccagggttgacctttgcaccacgctgcctactctactgcgcgtgcacgtgagtgcgcgctctagttggattttgtggcctcttttccactctccacacttctttttctttgagggacaagatggtaaggagacagaaactagaacactgtctgcatttgcagacagagaggggtggtagtgacaggtgctggccccttctggctggccttctcttctctctgggatctatgtggctatgtgggtctagtcactcttaggccatgttcccactccacagcccttggcaatctcgtcctgtaactcactatgtagaccacgctagccttggactcccagaagtcatttgtctttgccccacgtgctgggagtaaaggtctgtgtcactgagctggccccctgctccatatctctgtcagccgaccaaccatatcaccctactaactcagccttcctcctccttcattagtcagttaagccctgaccgcagagctgtgcttgctgccctgccctagctattccacaaagagctagctacaggggccatggtagaatggggccacagtgtcgcctgagggccattccccaagcgctcactgtgaaggcgtttgttggactccctgagacaccgaggcatttcctggatccccaatggctactcgcccctatctgatgaacgggcttctctcccccagtagcttaacttactggtcagacaagaactagcttccattgtgtgatgctctccaaagcccacaccagtggcctgaagctgctatagactatggggtctgacatcatcagagaacaagagcagacaaggaccaaacactccaatctactgtctctgtcccctcagattcctgttctgagagtctcaaaggaagtagaaacctccctggaacccagaggagaccccaagaaacattctgcccagaaaactgtgacaattgaaatatcagaggctcaacttgtgtgtgtgtgtgtgtgtgtttgtatgactgcgtgtatgtgcactgagtacagtatgtgtatacagtgtgttggggggtgtatagtatatgatgtatgcaatatgtctgtggtatgtctgtgtgttgcagtatatatttgtgtaggtgtgtaatgtgtgtgtggtgtgggggtgggtgggtatagtgtatgatgtatatagtatgtctgtgtgttgcagtgtgtatttgtgtaggtgtgtaatgtgtgtgtggtgtgggggtgggtgggtatagtgtatgatgtatatagtatgtctgtgttttgctagtgtgtatttgtgtaggtgtgtaatgtgtgtgtggtggggtacccgagtccgatatacagtaa

SEQ ID NO: 552 - DNA, 2693 bp, Mus musculus
ggtcccgacgcgtctccgccgtcgccgtcgccgtcgccgtccgccgtacagccgaatagccgaggacccacgcagagccaccaaccagccaagatgcccaagccaatcaacgtccgggtgaccaccatggatgccgagctggagtttgccatccagccaaacaccaccgggaagcagctctttgatcaggtggtaaagacgattggcctccgggaagtgtggtacttcggcctccagtatgtagacaataaaggatttcctacctggctgaaacttgataaaaaggtctccgcacaggaggtccgaaaggagaaccctgtccagtttaaattccgggccaagttctaccccgaagacgtggccgaggaactcatccaggacatcacacagaagctcttcttcctgcaagtcaaggacgggatcctcagcgacgagatctactgccccccagagacagccgtgctcctgggctcctatgccgttcaggccaagttcggagattataacaaggaaatgcacaagtctgggtacctcagctcggagcggctgatcccccagagagtcatggaccaacacaagctcagcagggaccagtgggaggaccggatccaggtgtggcacgcggaacaccgagggatgctcaaggacagtgctatgctagaatacctgaagattgcccaggacctggaaatgtatgggatcaactatttcgagatcaaaaacaagaaaggaacagacctttggcttggagtcgatgcccttggacttaacatttatgagaaagatgacaagttgaccccaaagatcggcttcccttggagtgagatcaggaacatctctttcaacgacaagaagtttgtcattaagcccatcgacaagaaggcacctgactttgtgttctacgccccgcgcctgagaattaacaagcggatcctgcagctctgcatggggaaccatgagctgtacatgcgccgcaggaagcccgacaccatcgaggtgcagcagatgaaggcccaggctcgggaggagaagcaccagaagcagctagagcgacagcagttggaaaccgagaagaagaggcgagagacggtggagagagaaaaggagcagatgctccgggagaaggaggagctgatgcttcggctgcaggactacgagcagaagaccaagagggcggagaaagagctctccgagcagattgagaaggccctccaactggaggaagagaggaggcgagcccaggaggaggctgaacgtctggaggccgaccgcatggccgccctgcgggccaaggaagaactcgagagacaggcgcaggatcagataaagagccaggagcagctggctgcagagctggcagagtacacggccaagatcgcactgctggaggaggcgcggaggcgcaaggaggacgaggtagaagagtggcagcaccgggctaaagaagcccaggacgacctggtgaagaccaaagaggagctgcacctggtgatgacggccccaccgcccccaccgcccccagtgtatgagcctgtgaattaccacgtgcaggagggactgcaggacgagggagcagagcctatgggctacagtgccgagctctccagtgagggcatcctggatgaccgcaacgaggagaagcggatcacagaggcagagaagaatgagcgcgtgcagcggcagctgctgaccctgagcaatgagttgtcccaggcccgggatgagaacaagaggacccacaatgacatcatccacaacgagaacatgcggcaaggcagggacaagtataagacgctgcggcaaatcaggcagggcaacaccaagcaacgcattgacgagttcgaggccatgtagaggccaggctgggaccaagggcagagggcacctcactgcaggcaggtgtcacacttggctctttagttctcttaagtttagacacccccttgctgtgttccagtcccttaaagagcagttacggggcctgcattctgccccgagacccagtgggctcctccttggttccttctaattgtatcacatagtgccaaacaggtcagatttaatgacagttaccgaatcacttcctgtttggagcagggattcggagggctggccctcatgaagcaagattcattgtcactgggacagcactgtggctcacgggtgccatacttttctctagttttacaatgagctcaaatcgattttgttcttgatttttatgaaggatccatctctgtgtattgaggggtaaaaatgattttgaaatttgagtctaaagcatgcccccacagagtctccttcctccagaccgctggcagagtctccaggggtccttcagagtgtacggtacaggactctccgatacaaaattctcatgcttatctgttagcatacattgttggacttatatatctaatgatctgctatagaggatagtatttatatataagcgataatatgggtttgtaacattagttttaaaaaagggaaagttttgttctgtatattttgttaccttttacagaataaaagaattcaacattaagaaccatgtaaccgagacacttgatctgacacaggggcagtcgggaaaccgatgactgcagtaatcaccactgtacaaaaatgttagtgggttttgtgcacgtaaaatgcacacttccatttcctgtcagtttcttatttgaaaa

SEQ ID NO: 553 - protein, 611 aa, Mus musculus
GPDDPSPSPSPSAVQPNSRGPTQSHQPAKMPKPINVRVTTMDAELEFAIQPNTTGKQLFDQVVKTIGLREVWYFGLQYVDNKGFPTWLKLDKKVSAQEVRKENPVQFKFRAKFYPEDVAEELIQDITQKLFFLQVKDGILSDEIYCPPETAVLLGSYAVQAKFGDYNKEMHKSGYLSSLIPQRVMDQHKLSRDQWEDRIQVWHAEHRGMLKDSAMLEYLKIAQDLEMYGINYFEIKNKKGTDLWLGVDALQIYEKDDKLTPKIGFPWSEIRNISFNDKKFVIKPIDKKAPDFVFYAPRLRINKRILQLCMGNHELYMRRRKPDTIEVQQMKAQAREEKHQKQLERQQLETEKKRRETVEREKEQMLREKEELMLRLQDYEQKTKRAEKELSEQIEKALQLEEERRRAQEEAERLEADRMAALRAKEELERQAQDQIKSQEQLAAELAEYTAKIALLEEARRRKEDEVEEWQHRAKEAQDDLVKTKEELHLVMTAPPPPPPPVYEPVNYHVQEGLQDEGAEPMGYSAELSSEGILDDRNEEKRITEAEKNERVQRQLLTLSNELSQARDENKRTHNDIIHNENMRQGRDKYKTLRQIRQGNTKQRIDEFEAM

SEQ ID NO: 554 - DNA, 73930 bp, Homo sapiens
  misc_feature (1)...(73930): n = A,T,C or G
atttttttttaattaaagaaaatatttcaagtgccaattatctagtttacatgtcaaatctctgggatccggacatctaaatgcttagtgagacattgtcttcactacagaaaacacatggggctcagttttcaattcagttcgatcaatatttactgagcccctatgatgtgcaaggctctatgctaggtacttgagataccaagaccagtagtcactggtctcacctttgaggaactcacagtttgagcagaggacaatccaaatgactgataaccacctgtgtcgtgccgggcatttcagcacatactgctttattaaggtagcctttcataagaaaaaaaagaaggaagcggaaagaaataaaaaatcaggatgatttaaaaataattcgtttatattctgcaattaaacacctaattaataacatctaatttatttaggaaattgtttcatgtttttggtttttttctttttttgagacaggtctcactcggtcacccaggctggagtgcagtggcatgacctcagctcactccagcctttacctcccaggctcaggtgatcctcccgcctcagccttctgagtagctgggaccacagaagcgccccatcatgcctaggtaattttgtatttttagtagagatgaggtttcaccatgttgcccaggctggtcttgaactcctgggctcaagtaatcctcctcttgcctcagcttcccacagtgctgggattacaggagggagtcacacccagccacatttttttttttttttcatataaaacattaacccttggccaggagcggtggctgacgcctgtaatcccagcactttcggaggccaaggcgggcagatcacctgaggtccggagttcgagaccagtctgaccaacgtggagaaaccccgtctctactaaaaatacaaaattagccgggcatggtggcgcatgcctgtaatcccagctactccggaaactgaggcaggagaatggcttgaacccaggagccggaggttgctgcgagctgagattgtgccattgcactccagcctgggcaacaagagcgaaactccatctcaaaaaacaaacaaacaaacaaacaaacaaaattaacccttgcatagaggaaacccagcaactttagaacattgattgttcctgcggagggctagagaggctttaatttatctatcgcattttatttctttttctttttttcttttttttaagacagagttttgctcttgttgcccaggctggagagcaatggcgcgattttgactcactgcaacctccacctcctggattcaagcaattctcctgcctcagcctcccgagtagctgggattacaagcatgcactaccatgcccggctaattttgtattttttttctgtagagacggggtttctccatgttggtcagcctggtctcgaactcttcacctcaggtgatctgcctgcctctgcctcccaaagtgctgggattacaggtgtgagccaccacacccggccgttatttcttttttttaaaaacctgaaactaatgggataaaataacaccatttgttaaattgagatagttgtctattgaattaactcctgaagatttaaaacatttcaccattttttaaacattacaaaataacatgttttatgataatagagagcagacatagctccctttcctgagaaaacaatcaccaggaacaccaatcaatgccctcgggcttccgggctgtccttctgagttgcctgctctgtacaattcctgcctcttcaccatcaagcattgcttcttactgctgtcagtgtgtctgcctgcaccctgcaccctctctgctaatctgccatggcctcggaaaggaactaataaaacttagactcacaatgaaaacaggaattaatacactttaggggaaacccagagaaattctaaaaacatgaattctggttttttttgttttttttttttttaacatctggttttcgatggtgttttggacagctgggctgctaaataagacttcaagtaaggtgtttccatggttagcaacccagtggacagcagtatgatacacaggaaggaaaacttaccagagtaccccggttctggaactaacaggatttgttcattcatttattcaacagatatttattgaacagctaccacacaccagacactgttttagttgctgagggtccatcgacaaacaaacaagactgagaggagcttcaactcttgtggggagcccaaggtgggtggatcccctgagctcaggagttcaaaaccagcctgggccacatggtgaaatcccatctcgacaaaaaatacaaaaattagcctggtgtggtgtcatatacctgtagtcccaggtacttgaggggctgaggtgggagtatcacttgagctcaggatgtcgaggctgcaggaaactgtgttcacaccaccaccactacactccagcctggacaacaatgaaagtgagactctgtctcaaaaaacaaaaacaaaacacaatggggaagctgaggcaggaggactgcttgaggccagttcaagaccaatctgagcaacatagtgagacccctgtctctaaaaataaataaataaataaataaattagctgggcgtgatggcacgcacctgtggtcccagctactcaaaaggccaacgcaggaggatcgcttgagtctgggaggttcacgttgcagtgagccatgatcttcatgatctcaccactgaactccagcctgcacaatggagtgagaccctgtctcaaatcagaaaaaaaaaaaaaaaacacaaaccaaggaagagaattgcagagtcaagttctctgaaggcagtgaatcgggtgaagtggcggggcaccagagggtggctcttcagatggcaggggcagcaggggacagtggctgggaagtgctcttagaggaggaggcactgctgcaaagacctggaggatgagaaaaggccaggctggcacagatgggggacatgccttccaggccgtgggaatatgaagcacaagacctctaaggcagcaacggggctgagtgatcacagataaaaaaatcagcagcgggagcagagccagctgagctcaagctcagggcgagtgagagtgagggaaagaagacgcagctggagatgccgatgcactcccggccaaggaggagtttgaattttatccccaaacccaggcgtgcaccatctgacctagccgggaaatgtggctgtttggtctgctggactggaggcacaggggtgaaggataaaatggggttgaggcaaaaagagaatgcaggttacctctaggtttggggccatgtaacagcgtgtgtggtggagctctttgctgagaacagggaggctaggagggaggaagttcttgaacaaacaagaaccctggagacaccaatagacggttgttgctgggggaaaaggcagggctggggacgtgactgaagccttgggatcaggctacatgacctaggggaagaattcgtacatagataagggctgggaaggacccagaggggaagagaagagaaagcacagaaatcctaaacacaaaatatgctcagggaatggttggacatgtggaaagctgcttaggagaagggtcagatgaggccaagaggtttggcctctggattcagcaagatggaggtaatgttaatattgacaagagaagtttaagtgcaggaatgaggacaatcagtttaatcttttggggcccggttcctctgtcaaatgagagtatccgaatagaggaggtttaagcttccaactaccccattatgccacatacttttttttcaaaaaacggggaaagaggccaagctgggtggctcatgcctttaatcccagcactttggaggccaaggcgggcagattgcttgagctcatgagttcgaggccagcctgggcaacatggcaaaaccttgtgtctacaaataatacaaaaattagctggtggtggcgcatgcctgtagtcctagttacttgagaggctgaggtgggaggttggcttgagcccagcaggctgaagttgcagtgagcccagactgtgctgctgcactccaggctgggtgacagagccagaccttgtctcaaaaacaaaagggggcaagtgtgggtgggggaacaaaacaatgatcaaggataagaaatcataataggctgggccggtggctcacgcctgtaatcctagcgctttgggaggctgaggtgggtggatcacctgaggttgggagttcaagacccgcctgaccaacatggagaaacccccgtctctactaaaaaaaaagaaaagaaatcataataaagaaagctgtcctatttgggagtttattagtcaaacaggttgtgtgatcatcagtacttgttctttttttttttttttttttttttttggtagagacagggtgtccttctgttgaccaggctgctctcaaactcctgggcttaagtgatcctcccacctctgcatcccaaactgttggaattacaggtttgagccattgtgcccagccactagttctcttttacacagaagttattaaggatatttgtgcaaattattaaataagccaaggaaacaattaaaatagaacagttagtggccagaattcttcttagcagacccaaattatgtaagttgtgccatcaaaacagtaccaagacactcttcaaaacagtaccaagacactcttcaaaacagtaccaagacactcttcctagcttagtatactataaagatccttaaacattttttttttttaaattgagacagagtcttgctctgtcatccagactggagcgcaatggtgccatctcagctcactgcaacctccacctcctgggttcaagggattctcgtgcctcagcctcccaagtagctgggattacaggcacgtgccaccacactcagttgattttgtattttgagtagagatggggtttcactatgttggccgggctggtcttgaattcctgacctcaggtgatctgtcctccttggtctcccaaagtgctgggattacaggcgtgagccactgagcctggccttaaatattccttctgaatacaacgtatttggactccaccgaacggccatttatcagcttgtctgagtccttagttgttcctgtgcttgctcacccactctgaaaggattggtcacccttcccaaagtcaaaaaggaatgttagatgatattaggaatttgcatgccaagttcatagaactttatgattccatgaaatgtttctctgtagctatcatctcagccaatgaaatgcttactgtcttttttttttcttaaataaacatttcaggccaggtacagtggctcccacctgtaattccgacactttgggaggctgaggtgggtggatcacctgaggagttcaagaccggcctgggtaacatggtgaaaccccatccctacaaaaaatacaaaaactagcccagtgtggtggcgtcgcctatagtcccagctacttgggtgaggtgtggggatctcttgagcctgggaggtggaggttgcagtgagcagagatcacaccactgcactccagcctgggtgacagagtgagatcctgtctcaaaaataaataaaatacaataaaataaaaatttcagaccaataaagaggtaggaaggaggctataaaggaaacccgtggactaccaggcaccttagtcaagtattaccaagacagtggaaacctctatgcttctctcactgtgtcatcgccctatcctccagatttagtcaccgtcttgcattttcccccaaggttattaagggtggaaaataaccccaatccttgttttgccaagagtactctttatgtatttccccactgcctactgactgttcttttgaagtgactacagctagatagagctttggtcacttttttgttactggttgagattaacccggcaccagtgtggagacaggctccaaggtgatttgatagaaatctcctgtatcagtggatgtgactgttctgggtacaatggttctagtccgtgacactgttctgagcttccgggagggctgcccttcctcactttagttttaaccttgtctgaagaactcccaggaaattaccaacagcccttcaccaggctcaagaggcagacttaggattacccttctctagctgaaaaactggaaaatggaaacccggcaatgaagggtcattcaaggtcttatacctaaactaacagcagggaagtttccagtagtcctggctccagtgtttcctcacttccttccaaggcactgagtatcatatattaacaaaaggatgactttcaaacacaaggaacagcttcacaaatgagggctaaaaggagaggcaagtgaaatatgcgtcaaggtcctgccacatcctaagtcagttgttctcaaattgtggtgtacatcatcaaaaccacgtggggacttgttaaagaaacagattcccaggggctgcctgagacttagtcttagtgagccataagtcctggagaagggcactatgagtgattctaatgcatattcaagtttcaacacagctggagttgagtcttctgtgtgtgtgctgggggcaggggtttaggttccaaaccctgatgaaaataaattacccttagaaaatcttaaaacattcataagatacactgtaagtgtttccttggtgggcagaacagtacagtaacatgtaaatgctatgtgtcatacttacagtaatgtaagatacatgataaggaatgcatgtacaaatatgacgttatactattttaacttatgtaagaaagattatatagcatccctctgtatccacaggggattggttccaagacctctgaggataccaaaattctccaatgatcaagttcctgacataaaagggtacagtatttgcatataatgtacaaaatcctcctgtatatcttaaatcatctccagattacttataatatgtaatataatgtaaatacttgttatactatattctgtattggatttttattggtattttaattgtagtattatttttattttttattttccaaatcttttccatccaaggttggctgattccatgaatgtagaacctacaaatacagagggctaattgtacataaaagttgagtgagtcaaatgctcatatgatatgattcagtgacacaagaataccatgaaatacatattatcctttccattttacagatgaagagatggatgctcagtcaggttgacagacttgcccgaacggaccaggttggtcagtttgcaggaagcagaattcagacttagctctgtttgcctcaaaaacctgccatcgtttcatttttattttattttatttattttttgagacagagtttcgctgttgttgcccaggctagaatgcaatggtgcgatctcagctcactgcaacctctgcctcacggttggtttcaagtgattctcctgcctcaggctcccgagtagctggggttacaggcgtgcaccaccatgcccatctaattttttgtatttttagtagagatggggtttccccacgttggccaggctggtctcgaactcctgacctcaggtgatctgctcgcctcagcctcccaaagtgctgggattacaggcttgaatcatcgcacctggccgtttcatttttaccacactgccacaggccacttcattttttggcattcccctaaagggtcaagttcagaaatgctcttcaaggtcttggggcaccgctatttcaaacattcaatttagaagacagtatacttcaaatggagcgagataaaaattagattagaggcatatcctattatgagagttgggaacccaaactggctaaccaggctccaggcagtgataaggcagtggaggtattgatgtccagttggaaacattatcagtgcaggtaatttaaatatctttcatagttttctttctactgcagttaccattatatcttcattttatttatttatttatttatttttgagacggagtttcactcttgttgcccaggctggagtgcaatggtgcgatcttagctcactgcaagctctgcctcccggggtcacaccatttctctnnnnnnnnnnnnnnnnnnnnnnnnnnnnnnnnnnnnnnnnnnnnnnnnnnnnnnnnnnnnnnnnnnnnnnnnnnnnnnnnnnnnnnnnnnnnnnnnnnnnnnnnnnnnnnnnnnnnnnnnnnnnnnnnnnnnnnnnnnnnnnnnnnnnnnnnnnnnnnnnnnnnnnnnnnnnnnnnnnnnnnnnnnnnnnnnnnnnnnnnnnnnnnnnnnnnnnnnnnnnnnnnnnnnnnnnnnnnnnnnnnnnnnnnnnnnnnnnnnnnnnnnnnnnnnnnnnnnnnnnnnnnnnnnnnnnnnnnnnnnnnnnnnnnnnnnnnnnnnnnnnnnnnnnnnnnnnnnnnnnnnnnnnnnnnnnnnnnnnnnnnnnnnnnnnnnnnnnnnnnnnnnnnnnnnnnnnnnnnnnnnnnnnnnnnnnnnnnnnnnnnnnnnnnnnnnnnnnnnnnnnnnnnnnnnnnnnaaaatacaaaaatttagctgggcttggtggcgggtgtctgtaatcccagctactcaagaggctgaggcaggagaattgcttgaacctgggagatggaggttgcaatgagctgagattgcgccaatgcactccagcctgggcaagaagagcaaaactccgtctaaaaaaaaaagggaaagaaaagttcagtctttcagagggaatacacttacctgaatagaggtcaaaatctcagaagaggcctccctcctctctctgacctctgaaatgccctggatctgcaagtgggagataacaggccctgacaaagggttgcccaaacagcagtgtgtccctaggaagacaggttaagcatcaattactatgaggctagcacgagttaagcattccgcatgcacgatctcatttaatccttacaagtctatgtaggtggggctactagtatgttcactcaacaaattgggaaacagagtttggaacttcgcccaaagtcattggtttctctttctaccaggatagatttaagtgcttactaagtgtcaggtactgttcaggcatcgtacatgtactaactcattatcctcattagaaccctctgatacaggtgccataattatgccgctttacaaacaagaaaactaaaagcagaaagggaggagtaaacccaggagaggaattcaggagaagctctggtctcaacctttagccaacatcacaatcacccgaagggcttgtaacacactgattgctgggctcagccctagagtttctgaatcctaaggctgagcaacacctaatttccacttatgcaagttcccagtgaatgctgttgctgctcgtctggaagccagacgttgagaaccccttctagagtgagctctcccgcagcaaattctactggcccccaaagtatgtgttttgtgtgtcttaaaaatttgttgagaaccattagcaaaaaaacaaacaaaaaaacttaattcctagaatttcagagaaatcccatggagctttttgccagtcacgtcaaaagaggccacaaacgtgccacttaaccagagcttcggaaaggcggcggctgggccggccacgtgcaccgagactcggggccaggtgcagccgccccagggccgaggcctcggaactggcccccggtcccggccccaagcggtccagcgattcccccaagccgtccgcccctccagatttatttacgttttcctgacttccccctgcccgctgtgggacaaacagcctccccacttgcatctgcgaggggagtagcgcgcacttccgccaagttccgcccccacccagcccgaggcccggctgccgccatcttgcggggggcgcacctcacaggtcgggagctgggcgggaaggggcgtggtcccgggacccgccgcgccggggcttttgggagcgcgggcagcgagcgcactcggcggacgcaagggcggcggggagcacacggagcactgcaggcgccgggtgaggcgtgcggcggccggggtcgggacgggggttctgggcggggggttcctggtggagggcccgggcgggcggcggggttcggcggcaggtgcggcgggcagcctagggggcgcggcgcggggttctcgcccggcacccccggggcaggtggagctgagccggcccgcggccccgcgaccttcccctcggcgccgggtcccctcaggtctctcccgaaggaaacgcggagcctgggtgcctgggcgccgtccctcggcggctcccgagcggttgcagtttttgaaagagtttctcaaaggcttgacggttgtgactgcagccgcggggcaacggttgctacacaaagtgaaacttgccgagtgctcggcttctcacgggcttcctggcagccccgggaagttcctcggcggaccccgagcccgcgccccctctccacggatccctccccagcgagtgcccccccgcccgccctgtgccccctctcccctgacccctccctgtcgggtgccccgcgggctcgcgctggctgtcccgggactccttcctcctaggtgttcctcctgcccctcgccctctctctcccaggcgcgcgctccctctccccgggcctttccccgccgggtatccctgggcccgcgccccctcttctccgcctctctccgctgggtgcacctcgagtgtcccccagacccctccccgcccggccggcgctctctcccctgaccctcctggccgagtgttccccggggcccgcgccccctccccccgatcctccccactgagtgttccccctgccctctctctcccgggcctgcgccccccaccagccccttcatgctgggggtcccctgggtgcgcaccccctctcctcggacccacccccaactggggggcacctccagtgcccgccggctgccccttgggcgcgcgcccccgctctcgggcgcctcctcgccgggggcccggcccggccccgccccgcccgtgccccctccccatgcccgcagtgctgggcggggcgctgactcacccgggcccgggctggccggttcttaagcggcagcgcgctgcgggcgccgagtgtcgggcgcggcaggaggacgaggcagggcgggcgggcgctctaagggttctgctctgactccaggttgggacagcgtcttcgctgctgctggatagtcgtgttttcggggatcgaggatactcaccagaaaccgaaaatgccgaaaccagtaagttgcccagtttctgggccgggcggacgggagaggcttcattggagaggggaggcacctgctcgaggtgttggggcagttcctggggaacagggttcttctcacacgcagaagacgataggaataggaggaggttttcgccgctctttgttacttgttgacccttttgtggagcgttaggaaaacaccattttgatgcttttctctgcagtctttttctttgtgagccccctccccagtagttacggtcttttctaaaaactagaggcctttttacactgcttccgtctgtttttaaagggtatagtaatacaacttagaagtttcttaaaaagtccaaatcacagggagactcagatggcttccgaccacacacaccagttctcagagctcctaagggtccgaaaccacaggcgccccagatccaactggggagatattaaaaggcgtttgggagaggagactggctttcggaagttgcctttcagcttcgcttcctactaggcccatgaagcggtgccctgtacaccagcaaacttgctggctgcagcagaatttctgtctctaacagaaggttagccatggacttgaattgtagatgcaggcagccggtggagtttgataagaggttcctggcaggccgggccgagcactcctggtcagctgatgaaagggctgtgcctgcgcctctgtctccttgaatctgattgtgttgagattgctggcgagacctgggggttgtaggcacaaggcaggttctctgggactgacgcttcttagaaagttgtatgtattctacctgcttttaacactggggaactggtgactagacattagggggaaggtttaacattttttgagttttgaatcacaatggacaaaatatcaggattcattacaaattgggattacagatacatctggaatttttttttggtttttcaaacaagttggttctgtaatcaatgcttgtgtgccttttgtgggggatgggggagcggagtctctctctgtggcccaggctggagtgcagtggcatgatctcggctcactgcaacctctgcctctcaggttcaagcgaatctcctgcctcagcctcccgagtagttgggattacaggcatgtgccaccatgcccagctggtttttgtatttttatagagagggggtttcaccatgttggccaggctggtctaaaactcctgacctcaggtgatctgcccacctcgacctcccaaaatgctaggattacaggcgtgagccaccacacccggccttgtgtgcttcttctgttacattttatgttctctaagatctttgttagaggtattaattttgctgttaggataaagaatattaatatgccagtagattcagaagccaatataatttttgcctaagttacatcaagatgattcatttgtgatgcagagtattttctatacaaaatttttctttttaattcaaacttaaaagtgacacgtgacatcgaggcttgacagtgcatgtggtatgaaactgacctaagtacaaccccttactcaggcagagctgagtgcaacggtatgcggaggagtggtcaagaagattacccttctgggtgtggttttctttatttcactaaaagaagaggtgcagagctcagctaagatagcactcaggaaaaagttaacctgttctccgtcactacttttctttctcatttctcataatgaatggtaatttatttttatggtttcttttttgtattttggtaaaatatacagtttatcctcttacttttaggtttacatttcaaggtattaagtacatttacattgttacatagccatcaccaaggtccatctccagaactttatcttcccagattgaaactctgtacctattaaactctccctccccattcccaccaccagcccttggcaaccaccattctactttctgtctctatgaattcgacaactttagatacctcatgcaggtggaatcgtgatagcatttgtccttttgtgacagtctcatttcctgtagcataatgtcttcaaggttcatccatgttgcaatgtcagaactcccttctgtctcttatttcttatggcaggtatgttttcatttcattttgttttagaggtcttttatgatagatcagaacttaaaagatgtttctgacatttgataaagtgaagatagttgtgaaactgttaaggaaagacagtagccatcaccttgtgtattagagccagagttactctttgaaagactgtattctgtataatatctacaattaaaatttttaaactttttttgaggccaggcgaggtggcctgattacaggcacgagcctgtaatcccagcactttgggaggctgaggcaggcagatcacatgagcccaggagttcgagacttgcctggccaacatagactctgtttctacaaaaaatagaaaaattatctgggtgtggtggctggcgctctgactgaggctgaagtgggaggattgcttgatgagccctggaggtcaaggctgcagtgaactaagatcaagccactgcattccagcctgggcagcagagtgagatgttgtctgaaaacaaacaaaaccccttttttgagaggcttccttttaggtcagccatacctgtctgccatgggaaatttctccctgccccctctttggcagaggagggtcttagagataagttaaacacactaagcctttctgtgtgtagattatattagagccatcccacaaatcactgagaagagcatagtaggttgcacatatttgaatatgacatttcttaaggctgttagagaggatccagttagttttggtttggtttggggtttttttgctgccttagtaaatgttaaaatgaaacatccaccaacagctctgtggatgtgtcctttaaacaaaggtttattgattctaattattcaagcctaagttaagaatgttagcgaagaatgttaggtggttttcttgggcttaatgtttaacaactggattaaggggcaaacacacttaaaggatggatacctctgagtagttggccttccacctgattcattgcaactgttaacccttgaattcaacgggcaaagtatttttgattgatttgcctgaactgagtgagtggatgactttattcataaaacagtataactgaaaatactcatttcctgtgttttctcctaatactgtttcccaaaagcaacagttacttaaaagactgaggcggtacacagtggctcatggcagtaatcccagcactttgggaggccgaggtgggcggatcacaaggtcaagagatcaagactatcctggtcaacatggtgaaaccccatctctactaaaaatacaaaaattagccgggcgtggtatggatgcctgtagtcccagctacttgggaggctgaggcaggagaatcgcttgaacctgggaggtgaaggttgcagtgagctgagattgcaccactgcactccagcctggcgacagagtgagactctgtctcaaaaaaaaaaaaaaagactttattcatcagcaagcggagtgacctgcacagagggcgaggcagaccttgttctctggaagcttagtgtctggtacctgggccaagatgcggggtaaatgctgaaattgaaaacccgctaagtgctgtcagactgggaaagagcctaggtaacgtcgagaggaaaatctgatggggaaaggaaaatcatctgatggggaaattggcagactgtattgagaagtaacacttcagctgaatcttgcttgagggctggggggcgcacgcggcagcactccacagggaggaacagctgtggtttgttgtctggttttgcttttcccacagctgcttagggactctattcatgtgtgactggctgacgtccaaggagggtgatttggggttccagagggagccttggcctctgttcaggccagtccccaggacatggtgtgctgtgtggccttgtgggtctgccccatctagggagagttgtaggagttggtgctcagatcattggtcccggaagcatcctctctgcccgccccttcatgttagggtgactgcggagcgcctttctcccacacttgctttcttctgcccagtggaaagaaggcatggggagtgagcaaggaacactgctgtagttaagctctggaaggaaaaggggattgtgttcagggctgagatctctttaagctgtcatgagaaccatagagctgaactgcctttaagtggctccaacacatcttacctgttcatttctgaagtgttatagacatttctaatacaaaagcaggtttacctttcattaggaaaactctgaaagtgtgttcacatttctactgtgccaaaattttaaggtaatttctgagattaccttgcctctttgggaatacataaccttttctattaaatattttaacagggacagtttactgaatgtactcccccctcacaatcccctcgcaattgaggaggatgcgtagcatctgtttccacccctcctcctccacgaggggcagtggtgaattaggtagctaacattttgccatgtggcagtgagaggtgctggtaggatgagtgatttgccatgatcacgctgtaaggcacaatgaatgtatttggatgttcacagacacagtccctgtcagtggatttacagtctggtttcggggacagacagcaatcccagagtaaatgtaaaactgcagcttcagagagtatgcctgaagaggggtacatgaggcctgagagtagatgaagtgtgtatgtgctggtgggggtgcaaataggggaggtcaggaaggcatccttgaggacgtgacctccctgggcagaggtaacaacgtgtgcaaaggccctgtggtgggaggaagtagtgtgagtttggggtttcacatgaagcccaatgtggctagagaggaagacaggtcaggccatgccttgtaagccattcttgggtgttttttagtttaacttggggttttgactgggaggtgacatgatcagatttgccttttgaaaagttgactgtgatctgtaataggaaaatcacaggaggcaggagacagcaagggtagttatggtagaccattgagggagctcatagcttggaccaaggtggtggtggtgggaacagaagtggatgcatttgagagttctttgggaggtagaattgatagtgcctggtgatgggttggatatgcagggccaagggtggtgtcgaggctgacttctcgtttctggcttgcgcaagtggatgtgtggtggtgccatcgctgaggtaagtaatcctggagaaggaccaggtgtgggggaaggtggggagtctggatttgttgttacatgttaataagtttgtgacaatcgttgatgaaaaaagtccttgccttctttcattactacatccactgccccccaaaatattaaaggaccagactccttaaactacgttatttttaaatccaaataattcagtagctttttgttttccctagtatatgtacacaccgtacatacctaaagttaagaggaagggttaatttagtgcagtgttctcaaaattttgtgtacacaattgtctggagactgttgattcctgggtcccttgaagaactaatgacttccatctctagggtgaggtgcaggctgggtgcttatgttttaaataagctctccagatggtactgctgattcaataggaaaagggcagttattatatattcctttctcctgcaccccaatcaagcccagtgtgatttcagagcacccatttgggtgaaagcagtcacttgatgcccagccgccttacagtccggctgaaatgccaggagtgctgttattggtatttgggactcgaataggggctaggatgactctgtgaaaaagagccataaaaataagaatttcatagctaatttactgcttacctatacttgggcaggccattcaacataatattcttctgacttgagtttctctctgcagggagtccagtaacagagcttcatttggcagtgcccagtggtctctcacattttggctctttattttcaaagagaaaaaaagaggctagaccttccctataaatggtagggaagtaagagatcccattccttgttcctcttttctcttttattccttccacactggcctcttttgttaatgaaataatgtgaatttttttttttttttttggaaacagggtctcactctgtcacccaggctggagtgcagtggcacagtcacagctcactgcagcctcagtgccccggcccccacccttggctcaagtgatcttcccacctcagcctcctgggtaactgggaccacaggcacacactaccacacccagctaattttttatttttttgtgaaacaagatctcactgtgtggcccaggcggctagtctcaaattcctgagctcaagctatcctcctaccttggccttccaaaatgttgagattataggtgtgagccaccatgcctggctgataatgtgatttctaacaaatgttgaataattatagtttgggaaaggaaaacagtatcatttagtgaactataatttttttcttaatttttttaacttaaacttttatatctctttgacaatttggagattcttagggtggtttgatatacctgctttctaatggtagttagatgtttcagctctattctgaagcagtgaaattcagtctgctttcaaagtcagtgaatgcattttgaattatcccttatttcatttcagtagtaactaccttgagactccccaagtactccaattagtttttaatttcagcagtaaatgtgtgttgaaaagaccaaagtttgcattattttccttctgatgtatttaccatccatgcctgttgacataaaaagatttttccagacttgggtagttttcagaaccaaacaaaacccttgtgctataatgtgacttagacacttttgactgaaatgcttgatatagttaatacacataatttttttcaaaatgaaaccacaaagagctataaagagaatttcatagctaatttactgcttacctgtatttggggaagccatttagcatctgtgaacctaaatttcatcagccgtaaaatgggagttagtttttaagtggaaagaatgttacataagataaacggagacaaagtttttatcagtgaaatccaaacaactcatcttaagatgctgtaagctttatgtgtttcttttgtgtttccctaccccgcaaatgtttttcaaacttaaccctgttaggtaaaaactctgggttcctataaacgggtaaagtttgtccattggtcttctcaaggaaaaagcaatatgaacagtttgggttatcttagtaaaagggaggactctgattttgtctcatgtccatcctctctctgtgtgttctagtcggaattcccttatcagtcacatgggtaccaccttcatgttttgaagcgctattatatcccattatgtgcttggtgcagggacaataaaaataagattggttttgcctttaaggagttctcagtctcctagtgaaagcagatgtgtaagcaattacaatgcagtgtagtgcatgatagaggtcttcacagaagagaagtgtgccctggagaccagggagggcctcccggctggtaagatcctttgggtaagtgtggagggatgtgggcttcccagtcagcagtggtcagttctgttttcctttattcattaacccgttcttaacacttacaggcaaacagtaatgctgtttcaaaggaaatgtaaaacttcattaagttatccttttaatctaatatacttgaaaacaaaaccttaaaagcaaaataaaaaatatctcaccatgacccaccttttattgataggagaggaaccagtatcacctgaggatcaaactctagtagtcagtatatcagattttgctcatatttttcagttagaagtcacttctgcaacctaattttgttttccatttttgcctgagagatcaattttaaactgcctgtgtggacagttgtcatttcagatactgtaaataattgtttttactttaggatggggtaggtaaactatcatcttagggccgagtctggctgtggcctgtttttatttggtctcccagctaaaaatggtttttatatttttgaaggattttaaaaacaacaatatgcaacggactccaagtaagaccctcaaagcctaaaatacttactggctggctctttagagaaacaaatggaccaactcctgcttctagcataaaaataattattgttaagcatttattataaccttgtatatattttatggctggactaatatttggaagcagatccaccccattggttccagtttttaaaaaattgttctcaaagaacagaatgtgttttgttagccagtgttgagcacatcatggactctgagcatggactcagaaactactgaggagaggcatcgtggtgctgaggtaatgttttaaacaaagctggtgtttgggtgggtctttgtgtagagaaagtggcagtatcttgtgtcacacttgctaagctattgtgtaatgacagatttctggcatatgctaaaagaaagcaatttgtacctgatgtttgagttggaaagagaatgttatgtaaatgaattgcttttttcctcattgatagtttaaaatgagcttttgatctactatagtctgtatgtgaatttctgactgcagatgttttgtaagtccattcctgattcagaacaccctgtctaaagtacagctccatctctgtctgtgccgtgccccactttactgcactcatagaactcggtctccacctataacgctgtcaggtgcttgtttatttgtgctttttgtcttttctggcagcaaagcaagaggataggtgttgtttttgtgtttttgagatgcggtcttgctctgttgctcaagcacgagtgcagtggtacaatcatagctcaccacagccttgaactcctgggggaccgcaggcgctcactaccacacctgactaatctttttatttttatttctatagagatgaagtttcacactgttttgtgcaggctggtctcaaacacctggcctcaagccatcctcctgcctcagtctctcaaagtgttggcattatagccatgagccactatgcctggcccaagtttgtttgtttgttgtttagcattattattttatagcaaactttaaattcttgtttattggcaggataaatagagggaagaaggacgagcaaataggtaaacatacctgcctcctagtgggtaatcttgggcaagttttttcacctccctctgcctcctcatctgtaaacaagatcctgcgtgcccgcctgggatgcctgctaagatggcacatgggaagcacctggccttatgcctggccctggtcagtaagggctgtgcggttccacttgtacctgataaaattctaatctgattaaaagctttactagctcgtgatggtcattcttttcctctaacttagcagcccgatgaaataatgtagtaagtaaatgtaaccttgttgtttgtccttttgctgccacgatgaacacagctgtcttgctagacctctgttgacttcaacagggatagcatcaggtttattggaaatttacatatgggacagtccagtggtggtgggttggacagaacagcaactgcttcccgaaagcttggaaaaagcatgcagtttacacagcattcttacttaacatactccccctaacagcctccacctggcagccttaaagtgcttgtgggctgggggttcagatgttccccatagataaggaattgatttcagggttggccactaggattccttagctcggaactccacacacacattcttcttaagttattgatgttaggtacacctgtacaaccaccctgcataaagttcattcattcaacaaatagagcacctactttgtgccaggttttcaggtactggggagacattggtgaacaaaaagaggcttttaaaggattatcacctgcttggttgacagtcacatccagtgaatggtggaacccatttcctgctaatgtgtatttgagcctgaaatgcacattgtcccacctttcctcaatggcaaaatgctctggaaaggagatgctggtctgactaaataaaatgggctttctgtttggagttgtaaagggagccgtgccttcctcagcccctcctgaaagaaagacctgctttcaagaagcttatattgcagggggaaagacacatgtctaatacattgtcagggggtggtgagcgtgctactgtaaattttcacctaggctttggcaagagctagaattaactttcattctttactgactctttgaagcgttaaaaccactgggcagagtgacttaggagtgggcccactgtgatgtgtttttgttggttttctggtaaatcacttttgggttggacagtgaaccatgatggtctttcttcaagaacttgtttttgcaagggtttggtgataagtccatcatttccaaacccacttactcttccatcctttctcaggtgctgtggttcagggaaatgattgttttgatagtattttacctattgcaccattacttcatctgtaaatttcttataaaatatgtcttgggatccagccttgtcttttttgtttgtttgtttttttttttttgagacggagtctctgtctgtcgcccaggctggagtgcagtggtgtgatctggactcaccgcaagctccacctcccgggttcacgccattctcctgcctcagcctcccgagtagctgggactacaggcgccagccatcacactcggctaattttttttgtattttttagtagagacggggtttcaccatgttagccaggacagtcttgatctcctgacctcatgatccgcccgcctcagcctcccaaagtgctgggattacaggcgtgagccactgcgcctggcctgttatgtttttaaagagaaaattgaaccacaggtcacttggttaaagcttagcacataaatatgagattggaatcactttatttgtaaacatatatgtagtgtatattggtacagtattttcattaaggtgtgtttcattgcctcagttaaataattaagggtgttggctgctgggatgttgaagtatttgcttacataatccattgctgtttgggtgagactctcaaatggatttagacagataatggtgagaaaactggattttttatttagaacgtggctgaacaaggcagtgtggaaatagtgtgataacaaggtgcattatataacttgaacaaatcaactgcaaaaagacattttcaaagaaatggaggaaaattgaataatatttactgaacttgacgtattaaggaattgttttaaattatgttggatgtgataatggtattgtgatttttttttttagtgctttagagcaatatactgaagtttttacaagtgaaataatgaatgagggccttaaaatatgccagcaaaaaaaaaaaaagtgaaagtggtagagtagaagaaagaatggtgttgaagctgaaaagagagtgtggaggatcatggtactacttattctctctacttttatgaatgttttcaactttccataatagaatatttgcttttaaaaagcatgttatagggtagaaagggagagatgctttacttttgctcgtcatgaagtgcctgagtgttgaggtgggaggatctcagggcgagggcaggtcccccattccctgctgctggggcaacctttgtgctctggatcaaatgagtaactgatttgatctcatcaaatggccccacccgggccatctcaccctccatgcacatgttttaaaaggaggtcactactcaaaattgcagctgacttggaaacacatagaacgatttgttcccagttttttccactattactttgtattcccaatgttttggggggcccataggaatggggcacagtgctgtgacccaactgggaacaggtcattgtcttaatagcgattttctcagacttgaaaattgaaatgaacaaaataaggggcatctactgggtagggctttagccattttaagagatcaatctacatactggggctgtgggcagggatgggggaaggaaatacagcaaaccatgggttggggttggggtgagtgatagggttgtaaaatgtacaccatgtcttttccagtcaagtaatgatgtacaaattataatgccatttcagatgtaacatacttgatactgacagtataaattgaagagtttttttaattttaatttagtataatttcagaaatggtgattttaaaagttttggcagggtttgcttatttaagcaaattttgtaagattactgatttagtttggattttttaaaagaagctactttggtcttgctaatttttgacacatggcaaaagtaaagactggggtgagttcaaatcttgtctaatcgaagtttcttacaggagaaatgttctttaacattgtataatattgctcatgtgatcttaactaggggcaaaaatttatctcagcaatggcacaagacttaagtatggtttatgtcttatgtcctctaaaaaacaggttagcaaagaaatttttcgacctttttttttttttcctgagatggagtctctgtcaccaggctgggagtgcagtggcgccatgtaggctcactgcagcctccgactccctggttcaagcgattctcctgcctcagccccacgagtagctgggattgcaggcacacgccaccatgcccggctaatttttgtatttttagtagagatggtttcaccatgttggccaggatggtcttggtcgcctgacctcgtgatccacccacctcagcctcattgtttcctagactcaccttctcactcccaagatcagaaattggaaatcatcattctcagtaaactatcgcaagaacaaaaaaccaaacaccgcatattctcactcataggtgggaattgaacaatgagatcacatggacacaggaaggggaatatcacactctggggactgttgtggggtggggggaggggggagggatagcatcgggagatatacctaatgctagatgacgagttagtgggtgcagcgcaccagcatggcacatgtatacatatgtaactaacctgcacaatgtgcacatgtaccctaaaacttaaagtataataaaaaaaataaagaaaaaagaaaggaaaaactcttcacaggcttctaaatttgcagagacaaccatgcattccaggtgaatagtgatgtttaatctataggcctttagttccctatgttttctgagcctacaattaaaaccgactctagcatataataagccatcttggccttgtcccttacttttgtttatgtgtgtagttactaagtttactaagtagttactaaacttaagtttctgtgtataattacctgcacatttcagtgaagcatgttggtgatgaagtatttatgatatacctagtgaaactgaaatcacatggtatacaatcaagacttagacttcaggagtttattagataaattcttgttcaaggtcactttctctttattttgcctgccctgaggtaaggagatgagaaggatgtagattgtgtttctagaaagaatagtttcttttgctgaatgtaacatcctttgattatttcttttccctttcttaggggaaagtggtgtctaagaagtccagtttacttccctgttagataacacacaatgtatgttatttccagtgtagaagaagttggttcttaattagagacactcaccaaaaagggccttaaaaactagcagctaataggtatcaggagcattattttcatacgccatcagcaggtcggaaatggccatcagtgttactcggcagtgcaggcttggaactcgggcatgactagcagtcatttcattgtcagacctatggaaagcagctcctttctgcctcccagatgcagtggacagtagggagggcttagcacagaactcttcccaacctggttttaaaatgaccctcttttgaatgtgaatgcccagaaagttcccttctagttctaaggtcatgattttcttgctgataataatgagcacagatgggactggtttgtccgctttttgtgtttgttaagcagccttggtctgacaggatgtgggtctaggggcaggaagtggcttactctcagaggaaaaaggagagctatttaggatttgagatttcattacatgttcttgaaattatggggtggctattattctggactctctctgtatattttatatatatatatgtatatatatatatatatgtatgtatatgtatatatatatatatatatgtatatatatatnnnnnnnnnnnnnnnnnnnntaatgtttttaatatttaccctggagttggtaaatacaaacttttcaaaagcataaaaccattggcatctatttaaagatactattttaggagtaatgttaaagagccagagctacacagatattttggtagctgattaccagaagttgagggtctcagtttttgtaaccattaaaaaaaggtcatcagacgaggataaccgtatacctcgtatcgagtactcatttggagtcactctaccagttatacttcatcactattctgattggctacttaaaacatacgtttatataacataaaaatgtaacatcatgtagatacgtgaaaagtcagttactaggaaattcccagcccccacttctgtgtcaatactctgccctgttaacgtctgctgcacattaagaatttagccttgacattttaagtttagcctaatggtggtgctggaggaagtagtaaggagaacagtttagaaaaggaggtgtgagtggcatgtagtgttacttttcatcatttaaattactcaaaaagttccttaaagtgcttctggcttctctgggaaatgagttcctgcttccctgtggtgtcaggagaatcgcagggtaggagacacggcccctaggatactggacatgggctggatgctgtattcgagggataaaccatgtatggttcttgtgcttaaataagcaaaaacctggccgggcgcggtggctcacacctgtaatcccagcactttgggaggccaaggcgggtggattacgaggtcaggagatcgagaccatctaactaacatggtgaaaccccgtttctactaaaaatacaaaaattagctgggcgtggtggcacatgcctataatcccggctactcgggaggctgaggcaggagaatcgcttgaacccgggaggtggaggttgcagtgagccgagattgcgccactgcactccagcctgggcaacaagagtgaaactccgcctcaaaaaacaaacaaaacactaccaccaaaaacctaactagccatagtcaagtagaagtatacaaatattccagaagaactaaactataaggtgtttgtaaatatttagatgtgaatgagtataaacaacgcatcaaaaaatcataaaaattgatatttggtaaattttcctttctgccagacttgctggcagttaaaatttgaaacagtgactgtaccgaaagcctttttattcaggttaaaagttgtactcccatttcctaaaataaggactgaactgagaaactctagctacagctgcttggttttccatagagttaagttggctccttagatgctgaagtctgtagttatgaccttgctttcattagtaattagcacctgggcaggtactaaccaatgaatgccctttacacctggcaagaaggaatgggtggggaggccagattgtttcaatctaaagggcactacgttgtggtgggttacgttttttggtagacagacactgcctacaggcaactaagtcattccattaactgtcattatcaatccatgtgtggccaagcttgaattgtcctgctggtttagcttcctgatggggaacaacagctgtcgcaacgcacagtgtctgcagctccatcatgggccccaggacgtcccacagcagctaacactggtctgtactcggaactctgccacctggccagtgacttttgtgcgtcatgttcctgggaatagtatgactgtccatgattcctaggaaagctagaggaataactgaggatgaggagctagcactttgacccctgtggggagtgctggttatagtggttatcagggttgtgacaagtggactcttgtgagttccaacactggatgattttattattcctattactcaggcagtaaaagactagtacatatcctggtgttatataattatatgaaaacttatcagaatgagttttataactagcgtacccatgtttttgttattgtgctgcagataaaatggcgcactgaaatgttactgaattacgtgacaatttttgttacaattctgtgcactttttacaagatttgtggagcttagatagatggctggcctttggcatctgaacattttcctgagcccgatagacaagcagattttttttgtttgtttttggagacagggttctcatgcctgtaatcccagcaccctgcctagttcaagaccagcctggctggcaacatggtgaaaccccgtctctaccaaaaatacaaaagttagctgggcatggtggtgcacgcctgtaatcccagatactctggagactgaggcaggagaatcgcttgaacccgggaggtggaggctacagtgagccgagattgtgccactgcactccagccttgacagagcgagaccctgtctcataaaaaattaaaaagacagggttctgttacccagtgtggtggcgcacgcatggctcactgcaggctcgacctcctaggcccaagtgatcttcccacattggccttccaaagtgctagggttacaggagtgagccactgtgcctggccaagatttctttgcctttgcgctcatgttcttctttaaccttaaaagaagaggtcatataaaataatcaggtataatttaagatacagaaagcttgatagaaaggagtagccgtgttctacatcttcatccattgcatttgcagatatgcctcaggattattttattagtacaatttttttttctttttgagacagtctcactctgtcacccaggctggagtgcagtggtgcaatctcggcacactgcagcctccacctcccaggttcaagcgattgtcctgccttattccctggtgtatctgggattaccaatgtgcaccaccacacccggctaatattttgtatttttagtggagatggggtttcgccatgttggccaggctggtctcgaactgctggtctcaagtgatccacctgcctcagcctcccaaagtggtaggattataggcatgagccaccgtgcccagcctagtgtcatgtatttatactgttatttccacctcctaaaagtcaacaaggacacttagctcaagaaggctgatgttgagagagaacgcttatcagaacagggatctctgaggaaaaagggagcttaaatgtgtgtccctggaatttcttctagcccttcctttccttggtgacatggccactgctatgggcgggaattagagaagagccctgaccagtggtgttgatgtctttgccaagtatactgtcaggtcagtgtcataaattgatgatatatatagagagacttcatttaatagaaaataatattttaaggaccaccttgctattttacttctctaataatgttttgaatattttgataaatacctttagcaacatagtggttctcatctcagccctctctgtccttgaaagaatgttatttataacagggtggtttctggactgcccttctggagtaaaacttgggcattctaaccatatgcttgctggaaaccataataatgtaaaaagtcgtcattgggttttcaattgcaattacattgatataattttgtatataaaacagtttgttactgggagcagcattgttcatgtaagaaagatgttcgcttcatataatacatggaaacaaagttatattttcaatgttagccattactgtgacactccaaaaaaggctggtaatggggagaaagaagagctttaaaaaaacctacagacaattcacttgcctcttgggcttttctgctttgcctgccttgaccgaattagagtatctgcatttctgcactaagctggttgaggtttgctaagtcaatggtaatgttttacagagcttggctgttagccagcatttgtggaaaacgaccaatgtctgtcatagctagtgctataatttattcagttggcatattgtttatggagacagtgagataaggggatcaggatccagagagactattaaaatatgtgagtccatctgttgtgatctgaggtttcattagagaaaacctgtctgctagtacaataaatggagacttagtaaggatgtttttatataaaggattataaatcagcagaggtaaatacattaatcttggccaaacaggtcatgtccttttgcgttttcctgatggcaggttctgccccctgccgcccgggcactgttggtcatagcatgaccttggcatcagctgtgagccggtaaacatggaaatgtaggcccctcccaacctgagtcagacccttggcctggggtccaggaaactgttttaacaagcccctgggtgattttttttcacatgttcaagtttgagcgcctcgagggcctgtgaatggctgcatataaggtacagctggccatatgtcttaaatgacttcaaaggggtgtgagccaggcctcttcccacaccagacttcatgaaccatgcctggtattgtcatgtttttgtgagcagccgtgaatagggctgggggagagagatgttcagccaagaaagtctaaaatagaaagggaatgttcagttataacaaaacaaatttttgtaattagagtgctgggttgtgctcagcatcattggagttaaatgtggagcagtggcttacacttgtaatcccagcactttgagaaactgaggtgggcggatcccttgaggtcaggagttcgaggccaccctgggcaacatggtgaaactccatctctacaaaaaatagaaaaattagccggctgtggtggcaggtgcctgtggtcccagctaaggaggctaaggtgggagaatctcttgaaccctggaggcagaggttgcagtgagctgagatcacgccactgcactccagcctgggcaacagagcgagagaccctttctcaaaaaaaaaaaaaaaaaaaaacagcggagcagcaaactaagtcccttttccatcgagggaggtctctgaagcaaagctgagccagcctctcagctctgccctggtggggcaccccatagcgcccagaagcagtgagggctaaggcggcagagtgcagcatggccatgcatgattggagcgccgctactgtgttggtgtcagtttggcagccagcaacttctaagaacatagaatattttcatttagaacttaaaaacagtaaacccaaaaagtttagtttttaaaaattcattttgtttctccctaaagatttttattcttttgaaaatgaccacagtctagtttgaatgccattgtttttcagctgtttcttatttgcaattgctaaaagccaacaaggagcaagttaaatgtccatcacctgaatgggtagacaagtgacagccacacaatggaatattcctgggcagtaaaaaaagaatgaagtgctggtacatgctacaacatgaataacccttttaaacattatgctaagtcatgggattcagtcatgaaagactgcatattacaaaattctgtctctctgaaatgtccagaataggccattccttagagacagaaagtagattggtggtttccaggggctgagggatcaggaggaatgcagagtgactgccagtggccatggagtttctttttgggctgacaaactattccaaaactagatagcagtgtcagttgcataactctgaatatactaaaaaccactgaattatacattttccatgggtaaattttatggtaagttacatttcaatagctgctatttaaagcacatagtgactcaacatgaaaggaaaaatatacagttttgtctctataattacccaattaagtgaaccaaaatagctgcaaagtttttaattcatttatcattggttgtaagaattttccctatcatactcccatttgtgggagaaaatttactgtatctactttctatcagagcatttctaagtatttgaaaggtcttatccaaatatttgaaagctgttaaaagttgctgaagtggcaccttcggaagaaggctggaatgttggaaaacagcgttgacattttaaatgatatggaaggtcaagctcgcaatgtaatcttggtggtggctggatggctctactcagactggtttttgagtaaatggcaggtgtgataatatagggattaatctgttaaccactgaatccactgcctgaaattcagacattcaaatgctcccatttgaatttccctttcttattttacatggttttcctgatttttgagtacataaaaaaattattgcaaacttttttcctgcagtgttctggccactgaaattaaatctggttcttttgtctaagactcaagggttgctctcctgtaatgtttgtggaggaactgatcttggacttttccctcctgtcttgggcttttattacagtttgaatttatgctgtaaaaagtgtgattgtagaggtaatctataagtttaaaatattcagaggaaatggatgcttcccaaaggaaaaattgcatacctatatttatttaccaaaatgaggaaaatacctgggaaataatttggccaaatattcagcaattatattcatagattagaagcaaaatacaaaatttgattgtcaacttggtacctttttcattccttacactcttagaaggcattttaagatgccattttgataaaattaaactgggaagactcagaaatcatgttttcccaactatattctgaaaaatcctagttccctgggatgctccgtggaaataacctgtgggcagaacaatctgtgaagtggagactgtggccccgtcttggactgccactgttggcatcaacatggcagacaggcaacagcctttcagctaaagaaggaagaaacagaaaaccccaccttaaccactgcagagttacgtgacctccaaacactgccccccacagcatatccccatttttgtccctttccctttcaaagccaaataatttcaaagaggactacatagctgctggcttgggatggtgtcaaaagccaggcaagatgattttaagtcatagaatgatcgagctggaagatgctcacagattaaatggtctccagccactcaatatcagcagcaagggagaggaacagggttggcctgagtgaggctggggccacccctgccgccaggcctgtgtgccaggctcaggtgctccagggaatgagcaaagaggatgttgggtttattttgttttaataaggcgaattgttactgagtttatttaaaaataaagcagcttggggtttaacaccttgcatgtcggttgcattggagtggtaacacctgtgctgtcgtgtgtctgcctggaggggtactttccttcttgggaaagtgaacacaggtgtgttgtcccttctccgtgaaaacactctacttgctggccttgaatagcattctagtgggttacttttctcctagtggtcagagagtatttattggacctctggttccattggcatgtgtcccctaaggagggagacccttcagggggtacttacacctctactgtccgatggcactggctgtgtcacacctggcctgtgggctttgaacctagcatttcagagtgggaaaaggcctcaagccatctagtccaaactctacctgcagatcaggtagaggcccagtggcaggaagtcatcagctaggggtcctcagattacagagctagctctcaaacccaggccctctgtctcccgtctcttgccttccagtgattcccaaatttggcctcctcaaaatcacttgtggaagtgacagcttcctgggctgcgggtgtttgaaaagcttctgtggggattctgatgctgaggctgatgtgggaagcactgtggtgtgtgatcactgaggcacacccatcttcattaatgtgtaagccactcggggataggaagggctaatgcctctctgtactcacagtgcccatcgaggtgcctggcacaccttgcagtagttaattggtatttgtggatcgaatgaacatgttaggtgcccactagcaggggttggtcctgtagtctgtggccatggaacattagaagaataaagctattgtggttcatcctgtagtatagtaagttcgagctgagctaacctgtaataacacaaatataattttttttttttacgtttttaaaagttagagatgggttcttgctatgttgcccagggtagtctcaaactcctcgccttgagatcctcctgccttggctccccaaagtcctgcgattacaggcctgagccattatatttggccaacaaatagaattatttatttatttatttatttattttttgcgatggagtctcaccctgtcacctaggctggagtgcagtggcgtgatcttggctcattgcaacctccgcctcccaggttcaagcgattctctctcctcagcctcctgagtagctgggattacaggtgtgtgccaccacatttggctaatttttatatttttagtagagatggggttttaccatgttggccagcgctggtcttgaactcctgacatcaagtgatctgcctgccttggccccccagagtgctgtgattacaggtgtgagccactgcgcctggcctagacttttttaaagagtagattattaagcaaagggagagtataaacagtattggtttttcattagcttcatctgtaccgtcaaccacatggttctttttgtcttggtagtggtacaggagtaaagttaaacttaaatcaccaccaacacccccaagctaagcataacttttaaaagtttttaatattttggcaagcctgggagaaatattgcccttttttgggtagatcttggatgactaactgcttactatacacacacctgtactacacgtgattgcgttgccttcactgaacaccgtttttgataactgtgtaatctgaggggaattactaagacaataaaaactgcagaccacgcgctctttttctccagtctgcacatagtttggatatgtgtggtggtgtgtttaagcccatggacttgagttttttatgggacaatccttgtgtgtatcagaatcatacagtcccagtaccatcttattcctctggcattattgaagatacaagaaccagttggcattcaaatatgttgagttcactaaaaacagttgctgatgagggaaacctaacaccctgataataaaatgaaaagttgggatttagatgtgttttctcaattgccaaagcctggtggtggtggtgctggtgctggtgctggtggtagtgctggtggtggttgtggtggttttgagtcttcgctgtatcacccaggctggagtgcagtggcgcgatcttgctcactgcaagctccgcctcccaggttcaagcaattctcctgcctcagcctcccaagaagctgggactatgtatgggcacgtggtaccacgcccgggtaatttttgtatttttagtagagacggggcttcactgtgttggccaggccggtctcgaacgcctgacctctagtgagccacccaccttggcctcccaaagtgctgggattacaggcgtgaaccactgcatgtggccccaaagtctgttttttttccccaagcccttggataagtagacaaagtatgtatgtaaatggtcctgtcatctcagtgaatgtctcattttaaattttggtgaaagcttatgctgtattgtagcacattattttatctataacattgaaaataattggcctttctaaacatggaactgtttatcatgcagtagggtaaggcagtgccatgctgtggtccttaatctggggaggatctcctcccttttccccatagagcatttggaaatgtgtgtgtggatggggttgcttttagatgttccagtgactggggacactcagtcattggatggcttaaggatgctaaacgttcctgagtgcttgggatagtcttgcagaatgaatacttgtgctgtccagaatgacaagagcacccccagtgggaaacactagtagggtaatgactaatcaagtaacagacatgccctttaacttaaagcagctcattaacatagtattcatttacctgtttagattttgagtatcttctcttcaatctctatgtaaagatacagattgtagagcctgccctatgtatgaatatatatatatattaaaactgtgattctaagaaggggttcttaaggttctggtgtgtccccaaatcagaactggaaattattccttttaacagggccaatggattcctattgctggtcctagttttattactgcagtgccagaacaactccctgatcatcatttttatttttttaaaagaggatctcactctttcattcaggctggagtgcagtggctcgatcatagctcactgcactccagcctgaatgattttttgtagagagatggggtcttgacttgttgcccaggctggtctcaaattcctggactcaagtgatctgcctgccttggtttcccacagtgctgggattacaggcatgagccaatgggcctggcctccctgatctttagacttgcaataattgtttgaggttgcgtaccatagggaatgattgcccatgggtgttggagcataggtaaaaaattttgtggaatgatcggaccagctaagagttggcattgtgttggagctgctggtgctcagatgaagtccttttgttaggaggtgtagatttgttgactcatgcagaacttctcagtagcttacttttttttttttttgagatggagtcttgccctgttgcccaggctggagtgcagtggcccgatcttggctcactgcaagctccacctcccgggttgatgccattctcctgcctcagcctcccgagtagctgtgactacaggcgcccgcacacctggataatcttttctatttttagtagagatggggtttcatcgtgttagccaggatgatctccatctcctgacctcgtgatctgccctcctcggcctcccaaagtgctgggattacgcgtgagccactgtgcccagccaatttttaagttcactttctacacgctactgggttgttaaaaccaacctcagtaaaagtatccgttttacaagttacttgctttttcaggccaggcacagtcaggagtttgagaccagcctggccaacatggtgaaaccctgtctctactaaaattacaaaatttagctgggtgtagtggctggcatctgtaatcccagctgcttgggaggccgaggcaggagaatcgtttgaacccaggaggcagaggttgcagtgagctgagatgatgccactgcactccaacctgggcgacagaggagactccatctcaaaaaaagaaaacaagttaattgctttttaaaagggttgtgtgaactttcagtcagatatgaaactgtttcagaaccaaaaataagttattctaaattcctgctagtcagtttgcaaaatgcttaatatctttttaatgttaattattagctttggtttcaggagatgtcattttcacactgtcttcaaacttagaagagactcaggtttagaatttggagtctgggccgggcgcggtggctcacgcctgtaatcccagcactttgggaggccgaggcaggcagatgacaagatcaggagattgagaccatcctggctaacacggtgaaaccctgtctctactaaaaatacaaaaaattagctgggtgttgtggcgggcacctgtagtcccagctactcgggaggctaaggcaggagaatggcaggaacctgggaggcggagcttgcagtgagccaagatcacaccactgcactccagcctgggcgacagagaaagactccgtctcaaaaaaaaaaaaaaaaaaaaaaaaaaaatggagtctgaaatctcgtgtgcatggactctggtcatttgtctttgtcctaaccagacagtggccttcagttctaattgtacttggggttcccacttctgaaccagtagatagcagagaaagaaaggtggcatatccagggttctgcatttgtgagcaaacgcccctccactttagttttagtgtgttatgtcattgttggcttctgtgtatgtagctggagctgcatttgttattgagatatttgacttggggctggttttcccatctctaatacatgcccttggaaccataattgagagaaatgcgtgcttttattttatgcttcataacagccattttgtgattttaaaaaaattaccagcaggaaatgaaagaaaagtaggtttttatattttagtatgattaaagactttaaaacatgtctcgttgcctcctagtaaacttgagttctttaacttctggacttggggattgtggagaaaannnnnnnnnnnnnnnnnnnnttgggatgtgtggagaaaacttttgaaacaagatctggaaaacgatacttctgtacttgttgtaccagtcggggagcctttaaggcatattggatgcatgttagaggatctctcagtcatagtcttaaatgttattgggacggggtgggagcggctggggagactaattatgttcctgaagtaggaagtgacatttggtgagtgcttaatatttctggttccctggctggataacgaaacctctgtcgccatatactggcacaggtaatacgtccttattacatttacacctgtgttaggaagaatccgggataggtatctctccagcttctgtatatttcacttgaaaaatggtgagaagcaagcatttcttaatattaagcattatagttgctatgtggctctgctgttttctttgggacagtgacataaagtagccagatttgagtgtttttcatacgctttagtaaatctgggttttctcaagtgataaatttgaaaactgccttgatgtaagtgggttgttttgttgttgtggtggtgggtttttttgtttgtttgtttgttttgagatggagtcttgctccggagccgaggctggaatgcagtggcacaatcttggctcactgcaacctccgcctcctgggttcaagcgattctcctgcctcagcctcccaagtagctgggactacaggcgtgcgccactatgcccagctaattttgtatttttaatagagatagggcttcaccatgttagccaggctggtcttgaactcctgacctcaagtggtccacctgcctcggcctcccgaagtgctgggattacaggtctgtgagccaatgcgcccgacagtgttttgtttttttaaaacaactacatggcaacattagaaatattttaaggccctcccatctccacctcctcaattctgtgtctcaccatcctcatactatttccatttttacattttattttcatgtcttgtctaaacagagttcacatttgcattgagtgttgcttgtcgtatttttgatttcagaagcaatttgcccagtttctactattttcgtaattataatttaatatcactacataatccattttttatgtgtctttggacatttcaccatttctctctcactatggtttctaaggttgcttcaaaccttctgattcaaagctctttctctcttcccttctctgacttccttggtgccttgggagccctcctgcctcccttggctgtcgtaaggctcatatgagatggtgcatggaaaaataggttaaagtattgttttaacaaaaaagaaaaaaactgcttaggttgggcagggtggcccatgcctataatctcagcactatgggaggctgagatgggaggcttgcttgagcctaggagctcaagaccagcctaggcgacatagtgagaccccgtctctacaaaaagtaaaaaacaaaacgagctaggcatggtggcacctatagtgccagctactcaagaggctgaggtgggaggcgttcgtgtgagcctgggagatcatgactagtgagctgtgatcgtgccactgcactccagcttgggtgacagagcaagagcctgtctcaaaagagaaaaactgcttagacctaagtgtcagtgtgctttattaaagcaaagaagctgcgtttggtttgcactgtgtgcctcctgagacatccccagccatctgcagtcaggagtggtgtgtggcttcctgactagcacaggaactgatgtcaggcatatgccgtcgccacactgaggagcagcttatgtagaaggtgcaggaggttattagaagaaaagaatactcagttaagcgtaatttgtttcattctgtttttcagatcaatgtccgagttaccaccatggatgcagagctggagtttgcaatccagccaaatacaactggaaaacagctttttgatcaggttggtctctgaacttgagagttaactccacctacaaaaaaaaactgttttgcaacatttcagttattttgtttgcgaagcatattaccttgttttactcacttgaggtaatagatgagaaggatcttttaaaaggtgaaagtatttcatgatagcattataaaatgcattaacagacaagtatatcatgcctaggaagtgaggtgtatgaaagcacacagctgtctgttgtataaagtcaggcggattcagtgtgttaccaggcatggaagcaaaggactgaaaagagagttattgtgcttgtcattgtaaggaggtgctggcctgtgtgtctctcaccctgtattagagacgcggcttcctacccgcagctgcctccacctcaagagtagaacccctctcgctgcgtggatgagtgagccttagttgtctcagttgctgcagcttctcatttctaagtgatcgtacctgaacatctatgaaaggaagaaatgaagatttagagaaataattcactttttaaaattggaagatttttttaaatcaagtatttattagtgatattactacttacttattaaatacttttttccccaataacagctgcttcaaatacagcgttgtttttttttttttctttgagactgaatctcactctgttgccccggctggagtgcaatggtgcaatctcagctcactgcaacctctgtctcacaggttcaagcaattctcctgcatcagctccccgaatagttgggattacaggcacatgctaccacgccctgctaatttttgtatttttaatagagacagggtttcgccatgtttgccaggctagtctcgaactcctgaactcaagtgatccacccgtcttggcctcccaaagtgctgggattacaagtgtgagccaccacgctcagcttgcagccttcccccatcccttttgggtgagtgggaagagggggaagaacaggtcagtcctgggcatttaataaacagacttctagagctttagggagcctctggcctccctgcacccttcagatgaagaaacaggcccagatcaggagttaatttggaattttaggatttactttaagcaaatgctctgtatacctgagttgtcatttctaatgtattcaaccctctttggcattaaatatgatagaagccatgtatttgaaggatggtagcattttttaaagtttaacattatatatcatgggattttaaattagacatctatgtatatgtaaatagtcgaacttgtctgggactcggtttagatgatgttcaacaaatgtccacagcaagttcgactatcactgcttttctgtttacaagacagtcgtgagactaagcagctcaggactcctgtaatgcacaacagaggcttgaaaatgtgaaatctttgctgtgacctagggtcgggattctacctttgctgtatcagaatgtcccatttctggaggtctataagatgcaggttcctctgggcacccctgtgcattgacacccttccgtcccagaagtctgccttgtctgttttcctgcctttcctaggatttctttgtccctgttcctagtaagtcagacccctgggccagctggctgagaggcagaggcaggcagccagaggaggctcaggtgtggcactggatgctttagtcttctgcatgagcacacctgacgggcagcgatgcacccaccgcactgttccctggggggctgtgggctcccatggttctgtgtgtgctggccataacccgccctgctgagtttcatgcaggagagcatcctggagtacaaaggagtaggagtgagattttctaagatttgaaggtagaaccctgaatctgctcaaatttatattaaaaataagtcgttcatggctttgagataatagcctcagttagtaacaagttatttgagtgcaaaaaaagatgttgcccagtggttggactgagcagatgtcctggtttcctggggactctgctagaccatgtgatgaacgacagccaaaagctgttgcccttttgagtgagtttctcatgagtgttgagcctctctctctctcacgcaggtggtaaagactatcggcctccgggaagtgtggtactttggcctccactatgtggataataaaggatttcctacctggctgaagctggataagaaggcaagtcaggattaactatttacaggctgtggattgggtgttggtctgcttcatcgataaggaaactggagcaactcaccctgtcttttgttttctgttcctttttgtttgtgtaaaagtttttacagacaaaaaggttgcaggtttccagtaaatggagatatcgattggaaatcagatctggcatttctccatagtgctcactcattggagcatatgatggttaattgcatagcttttagttgaccttagttttttcaatgagattgttaatcttataaactgtgaatcatccaccatcttgtaagaacctgttattgctttgtttgaacctgtgacagattatcttccaactttaaagagtggataattccattaaccaaccaaaaagaaaagtagtaagataaacattttcttcaaactctgaaaattatcctttttttttttttttgaaacccccactgtcctcccaagtcacagcaacaagttaaaaagatgatgggaggtggggaagagtggaggagcaggaggaattcttaacagtaagttttggggtccagggcccgattggcatgtggccccattccaggtcactggggtcatttccaaatttgagttctccaggattgatagcatcatcccatgaggactggggcttagtgaggcagtagctttgatttccagctgagcacaagagtgtgatagtacttgtttgttttttgttgttgttgttttgagatggagtcttgctctgtcgcccaggctggggtgcagtggcacgatcttggctcactgcaacctccacctcccgggttcaagtgattctcctgcctcagcctcccaagtagctgggactacagctgcatgccatcatgcccggctaatttttttgtatttttagtagagatggggtttcaccatgttggtcaggctagtctcgaactcctgacctcgtggtccgcccacctcagcctcccaaagtgctgggattacagtcgtgagccaccatgcctggcctgtttttttgtttttgtttgtttgttgttgttttttaagaagagacagggtcttgctctgtcacccaggctggagtgcagtggcgccatcatagctcactgcagtctcgaactcctgagctccagggttcctcctgctcagcttcttgagtaactgggactataagcatgcatcaccatccccagctaactttttttaaaaaaatgttgtagagatgggatctcttctacgttgcccaggctggtcttaaactcctgggctcaagtgatcctcctgccttggcctcccaaagcactgggattataggcatgagccaccatgtctggcctgtggtagcacttttgactaacctttttttgtctggagtgctaaaaagatgactttaagaataaatatctcctgaaaactggcttgagggccccattgagtcttggttagaagcctgtgttggggacagtgggccttcgtcttccggatttgtgtggagagtgtggcttgtttcgtgcaggtgtctgcccaggaggtcaggaaggagaatcccctccagttcaagttccgggccaagttctaccctgaagatgtggctgaggagctcatccaggacatcacccagaaacttttcttcctccaagtgaaggaaggaatccttagcgatgagatctactgcccccctgagactgccgtgctcttggggtcctacgctgtgcaggccaagtttggggactacaacaaagaagtgcacaagtctgggtacctcagctctgagcggctgatccctcaaaggtgagcacaggatgacccggcctgggcaggagcagtcatgccgtcctcggcagggagaagtgattgccttagaagcacagtttaaaaacgcaaggacttcgccagtgtcaagtgctccttcatgctagtcattaagtcactgaccagcgacctgaaacatagccagggaaggcgagctgccattcctcatggaaactaaagcgtggccgtgtcctgtgggacatggcatagcaaacttctcgacctgactgctcagctcctcctggggtatgataggttgcccctgtgaaatctgtttttatttagtaatggtcacaaaaattaccccatttggaagaagaggccacttaaaatacctcttagtttttccagcagaactgagttcttgttcaaaatgctaagtcttccagattaactgtcataaatagaaatgctgcacatcaggaaatagaaaccaaagctctttgggattgattgatttgaatggaaagtaagggtttgaatgtgggtggtaagtgggcctccttccttgcctgtcacattccttaaggatgacagtgctgtttccttttgcattccagagtgatggaccagcacaaacttaccagggaccagtgggaggaccggatccaggtgtggcatgcggaacaccgtgggatgctcaagtgagtgttgtgccctgctgttgggatcttgccatctccgtgcactccagcatgtcttttcctgtgactctagttagtgctttaaagggctctgtgtcaggccttgtgaagaccttgagggaaccgagttaaaagtggggttttcttagggaagaggttttttttaaacaaagccaggtgtcttgcctggggaaagaagcggtttagctcaagccttcaggttctaaaagcttacaccctccctttgtagaaagtgttgtgtctaaacttcatcttagtcagaggggcattgttcacctgcaatcagcattattctgtcaaagagatgctggtttgctcattatatgaaggtacttgtcttacaaagtgtatataaatgaaaaaggatcccaagtgagaaatgctgatgtcagagaacctggacgtggggctgttaatgtaagacatggccgagccacctgattctgggtgttctcgtcctagagccttgtctctggcctagtcttgcgagtctgcattatttcagcctctgaagtttgtttgaggtttgagcctcagattttgtgcttcagggtttcctgtctggcccaaacatcctttatggaaggaaaacaactcaaagcctatgaggagggttgtgggaagacatgtgtgggcaagagaaaaaggaggattgtgctgagtgataaaacttaaaaacctgttagagaaaccagtgtgaatcagttcttcttcaaagtgtggggtttggtggtgaggctccagggcagcacggaccccaccccaggcatagcttctgggctgtatgggtcccctcctcaccggtcggctgcccggcccctgcctgcctgcacgcagcacacagcattgagcccatcctacacaaggcgccttaatttaaaaatactggaaaggttttactgttctagatattgagtgctaccagtgactctgcctgtttcactctccccaattagagataatgctatgttggaatacctgaagattgctcaggacctggaaatgtatggaatcaactatttcgagataaaaaacaagaaaggaacagacctttggcttggagttgatgcccttggactgaatatttatgagaaagatgataagtgagttgaagttcacagttatcttcagtaggtagggtggtgggcctggaaacaatggcaaaatggcaaatttgtgggttatttttgaagtatttatttagcaacttactatcccaaagtaggaaactttttaaagggcttttggactgctgtggccctctcaaagggtggtccagaggtgtgggttatcctctctcatggtgggcggggccgatagtgggctcagtcctggtagaggaaggcagaatagagcagaggctgcctctcctccccgctgcctctgagattccaccccagctgcctgcaggtaccagcacatccatccatagctacttcgcaggcagcccagccagtgctcgactcctggctcgaggtttgtgctaatccaaccaagaatattgatggtgtgatgagagacttgaaaagctgtaaacaatagcctgtacgtgtagacacttgagctaaatgctgggagtctgcaggagatatcttaattgcctcgcattagttacgttgtttgttgagtgagggcctgtaagcaagctgggtagagcagcagagccaggcctctccacagggacaggcagttccgctttcacatacagggcatttgccttctttctgctgaggataaacagggaaagtcatcctagttcatgagggcaagtttcccatggtgagtctgcgacatcagcataatcctagattctggattgatctgatcagaagctacctgaatttaagaggcagaaggaaactacctctggaaagagaagggagaggctcctgactgcctcctgactaccgtctctgccctgattgtccacagtcagcctgattgctctgcagggctccccgaaacaaatcatctgatggccaccaggttcaggggcctggcagagaaggtgccagggcaagaatgctcctggggtctttttgccaagccctgccttttggcctgggttcctgctttccacgtaaagagcagagtggcccagagttcctggatgtaccggtttccttcccagcctcatgctgttccttgaaatgacagctctccccatttcccacttgaggctcacccatctcatctgttctcagatatttttgttctcagcatccccacatctcaggttcccccaaaaccctctctggagttctcaaagggagtggtgctgctttccacaaatgacctgcacgagtccatctccatttgcaaccacgcggattcctgccagaccccagggcacagatctatttcacttgggcaagtcagggacctgtgccagctgtgcccaacctcctctcacctccggggcccacgtggtgatactgcacagggagggaggcaggcgctgtcacaggagctcctcagagaacctggaaatgagatattgaggactctcggttcgctcctactccaagtgtgctggatgcagcattggtaaagaagcacggaaaagccaggcacagcggctcacacctggaatcccagcactctgggaggccgaggcaggcgaatcccttgagctcaggagtcttgcccagcctggggaacatggcgaaaccccgtctctaccaaaatttaaaaaattagctggctatggtggtgcacgcctgtggtctcagtcaggtggctgaggtgggaggatcacttgagcctgggaggcagaggttgtagtaagccaagattgcgccactgcactctagcctgggtgacagagcgagaccgtgtctcaaaaaaaattttaaagaagtggggaaagtgggtacttggaaccaggacaccatctttccgggagaccctagagctgaagccgtggctattaagacagccatgccaaggagcagtgcacaaagtcctcgtgggaacgtatgtgggaaactgcctctgccttggaaatctcttcaatgaccagattttgtaacgtggccaggccagggctgtccaaacaggtttttcaacctgcaggaaaacagccatgggcaggaacttgctgatgtcagcttgtaactgccccagcccacgtaagtgtccatttcttccaagtaaaaacgtgagctgtgtgccctatttagtgctgtttttgcgctctgctccccctcccccaccattgagcgatgaacgtggcaactctctcagatggttctttccccacagagcatgctggggtgttgggcaggctcactttctgcctctcttctccccattcctgaaggcacacccctctcttcatgaaaaaagcatttatgtagatattcagtcatttaataggcccaaattctttcccttttgaacaaatattgacaacttggtagcagcataagcaggagactgtcctgaagtctgaggagtgctgagaactcaccagctgttgcgctgttacctctctcggtagaactaggagaattagatatgcctgaaacattgttcaggtgagaaagctgatctattgaatatggaaattgagctctaagagatttatactctgcaagtaaagtctctattaaaacacctgttttagtattaaatagggtctggctgggaaatctgtctcttggggttcccttttcattgtacacataagcattaagtgggagcatgtaggactatttgtcatctttctttaaacccttagcttggaataggtgggagtataaagagggcaaaaacaggtaagcgccctcctgacaggcattgtaagcttgtgaacagagaaagttcagtttagctgggttacaatttgaaacctgacactcggaccaaaaacaaaaactaacaaaaactagaggaacctgatctttagtcctgtaaaagcactttttctcccttagcttcatccctctttgggcagatttcatcatagaagtccttctgtaggtaggagtttctggaaatgcactaggtccagggcttccaccttaaagggaaagggtgcacggggagcttggggactgaaacaggagccacagaacatgtctcttctttaaattccttgcggataggtactcagggcttcgcttgctttctcacgtctctttccgtatgcactccactgtcaccctctggccctctaacacatttccaagaaaactgcaggcatccatatccttcctcaaaatgaaagtgcatatgatatactagaggttggttatgttttgttcttttgatgtaaaatttaaatacaatgaaatgtaatcttaagtgttcatttgttgagttctgacaaatatgcctgaaaaatgcaaaatcttaagacatgtagaacattatcacactcagctacatattttggatttacattttttaatcattcttggtttttttttttttttgagatggaatctcactgtgtcacccagggtggagtgcaatggcacattctcagctcactgtaacctctgcctcctgggttcaagcggttctcctgcctcagcctcccgagtagccaggattacaggcacatgccaccactcctggctaatttttgtatttttagtagagatggggtttcactgtgttggccaggctggtctcaaactcctgacctcaaatgatctgcccaccttggcttcccaaagtgctgggatacaggtgtaagccaccatgcctggcccattcttgcattttatagtcatttcaggctgggcatggtggctcaagaagcaagattccataagctgagaactctggacagctgatcaggtttacctatggtgctttgcctttaactagagtgtgtgacggtagattatttcagatatgtatgtaagactgtttcctgaacaataagatgtatgaaaggagcagaaataaataatttttctaattaaaaaaaaaaatgactaccagccattattccgggggtcccaagatctgcaacttccctgttactcctataaatgacatcactattgtagaacctaagactagccttttgagannnnnnnnnnnnnnnnnnnngccaccatgcctggcccattcttgcattttaaagtcatttcaggctgggcatggtggctcatacctgtaatcccagcactttgggaggctaaaacaggtagattccttgagctcaggagttcaagaccagcctgggctggtctttgccaacatggcaaaaccccgtctccaccaaaagtacaaaaaattagctgggcgtggtggtgcatgcctgtggtcctagctacttgggaggctgaggtgggaggatcacttgagcccgggaggcggaggctgcagtgagccaagattgtgccactgcactctagcctgggtgacagagtaagaccccatctcaatttaaaatatatatattatttcaaactttaaaaagattctaaaaatagtacaaataattcccatatacccttcacttagcttcctcaaacattaacaccttatgtaaccgtagtccaaataccaagataagaaaattaacattagcagtctctagacctcattcccattttaatcagttgtctcactgatgtcctatttctgccccgggaccctctctggagccacacagttagttgttagacctccctgtctccttcgatgtgggatagttccagtctttttttgtcatgaccttggtatttttgaagagtactggccattgactttggaaagcccttcagcttggattgtctggtgttttctcattatttggagttttacatttttggtaagaataaagtgctgttttgcccttccaggacctctttcaaggtggcacatgtggtcggtatatcttatcttaggtggtgctaattttgattattagttaaggtggtgtctgccacgtttctccactgtaaaatcactatccttccctttacaattggtcagtatatttgggggagataattttaaactatgtagatgtcctagttctagctaccattgatgagattactgtggtatttgagaaattgtgatttttaaaaactttttacgtgtattaattggaattctataaggagccaatttctgttctccatttattcagttacattaatatggactcatggatatgtgtttcggtctttgggttatgatctatgagtatgtatcttcttgctcaggttgtttgagatttggcctttaggagcaccttgaagtgtgagccgtgcattctttgcaggcttccttgctgtctggctcctcgagatgcaccaggttcatcctttgtgttccctgttctagtcctggaatcagccatttctccaaaggcctctgtctggtccctgttattggagaatcacgcttttttaatgtgtggcctaagcaaggacacttataaaccctgtggccaccttctctgtagaccctgttcatgtcctatatgtgatctcttaggaaaaaggaaatccttgggctttaattttgcaactttggtcaagaattaaaagttctttaactcaaaagtgagtcataattttcatgtttaacctttttgttttgatactgcagttatgcttatgagtggctatgaattgttatatgaggtttcaaagtcctaagaggaaaaactttctaggcacaccagagagccggaggcctaaattttctaaggtcagaacctgttttgagagtcctgtgtagagacaggagccggagaggggatcccagccccttgaagtttcaggatgcggcacgctggctcacagtgctatgtgctgtgggcggagcctccggagcttggatcctagcttctctgttggtgccagcaggctgctcttgtgttttgggagaaagtgctccagaagcaacacatgcctacctggtgccactttcacagcctttcaatgtaaggaggacataggctgaagtcagtagcagggcaaggtggtatctggagttcccctttaatgctctgaaacctgtaaagaaaattacatctcgaagataaaagaacaaactcattgcatgtctgtttgaatgccaggtgtgttttttttaatggggattggtgattctagagcatagcactgtaaaagaaaggatgtatacaaaagctttgacatttagaaccatggtctggccagtgtcctgccatcattcctgcaggcacaccatgactgactgcgctaattccccagaagggccatgtcaggcttacatgtttgccctcagcctacagagtccaccccactgccttgatctagttgatgtgatcataacgaaacctgtattgctcgtcagtattgaagctgttggtaggccatagattgcttgaccttcctgctacttctaaaatgaaggtttttgtgggatgttggaaaggactgctttggagggcagcattgttggatggtggttttgaggatttgtcgttatttccagaatggcattatccctggtaaaatgtgttggaagaatagggtgggaagtgtcaggtgagcagagcaatgtggtcttgaagtcacatgatgaacttgggaatgctaataaaagccagagtctggccagtcatggcattgcattggttaagtaggattagccctgtggggccttcattagggccgttagtttgaaggctgtcctggaagttggagagtgacatgggaagatgtctgtccagccaggagaacacacactggaatgagaaccagaggagcagaatgcatagcaaggcctttgtccatttctcttggcaagctctgttgagtatggcacgtctaggaacgtgatgggatcttggccctccctgttggtttcatagaactaaatgatcagtaacttaaataacattcaacagtctgtagcagaagagcctgtatgttaagagaggcctcaagggaaagggaggcagccctggggaactgtgtgttgaaaggtgggtctgaaccgtggagtttggggctggatttgacagctcttggatgctgagttaaggactgtgttgacatgggaggagaggaaattaatcagatcagcagactgaaagtagggctgctccagcacacagcttgagagtgggctctggcaggatgagaggtaggtgagtgtggtgatgtgatgtgggaatgaacagcagaagatacctgagggggagggtcaaggtacctgggtaggaatttcagttgacctcgagatcaccagcctgggtaatcataggtgccctagactgaggaaaaaccaaaggaaatgggaacagattaaggttgcagatgccttgcagccaaccacttggcttaacctaggacaggtgggaactatttgataatagcatataacacattgtgcctcttgggttagcttcatattattttaattgaactaataagaattgatttgcgaatctctcttagccaatccaagaacatatgtatacatctaaccatccacttcttctttttaacctcaggttaaccccaaagattggctttccttggagtgaaatcaggaacatctctttcaatgacaaaaagtttgtcattaaacccatcgacaagaaggcacctgtaagttccaaaggattctattcaggggctactgtttttcattcttatacttgtcagggtaacggacaggttatactgtgacgagtagccagtgatagtccaaactcctcatgaggttacattgagggccagagatcctgtgggccaggcaattgctgcaggggagaccacttaacttttcaaatgattctcattccttatgaagaaaagggcagttctgagccattggccaaatgataagcatttcccaaaatgctgtgtttttggtgtggagagccagcctgtccccttgaccacctgggtgcagggactctccccggcacctgacggacagtgggacctgcgagtctcaagggccagatttgcctttcagagctgtcctggaacttacccaagatagggacagtcagacttgcacccaagcattgctggtccccaaggtttcatcggggcttcacccacttctgttgtcagaggtgtgcatcctcacacaggtgacactggcaggcagtcattttgggaggacatggtaagaaggcgacactttatgtcctgaaatctgatagtattgattgtaatagctgcaaagaccagtgcattatgtaaatttggttttatttattctgctgacatttaaacttttgttaactcagaatatttgagacatacgcacataactgtagcattgtagaatgggtaaggattttgttatctaatcagaaatctagttctctaaaaaattgccacctgaagaaattctgttaccaccttagagcctgttctgaattttacgaaaattatagattggaaaggactttgtgttctcatgtaatttttgttccttagttacagtgttaagcttggagaggcaaacatgggctgtggtccataccttggttgtcttgttaacccttttgggactgggtactgcttagcaatggtaaatccacttagaacagtatgtggtgttattgtcctgttacttctccccacatacaggtttgtctagcataatttaaaatcagcaggtcttgacaattttgtgaaagtattttcttctttgttaaaaacgtcttggccaggctcagtggctcacgcctgtaatcccaggaccttgggaggctgagatggccgaatcacgaggtcaggagttcgagaccagcctggccaacacagtgaaaaccccatctctactaaaaatacaaaaattatctgggcgtggtggtgggcgcctgtaatctcagctgctcgggaggctgaggcaggagaatcgcttgaacccaggaagcggaggttgcagtgagctgagattgccactgcactcaagcctgggtgacagagctagactccgtctcaaaaaaaaaaaaaaaaaaaagggctcctgctgtttgcaaactattggctgctactctgtgggtagttgcacggttatttaaaattaaacgcgtattgaatgcagactctaaggctccatggcagcagttcatattatgcaacagcatgaatggagggtcatagcgtcttcatgtcacttgggtagtaagattggcacagtttagaagagcaagaaaatgctgaaatctcttcatcagtaggctactacgtactctgtgacgctactgccttttcagaacacttattaaaaatttgactagagcagaagctctggactagactgtttcagaatgtttgtgcgtgcgtgtgtgtgtgtgtgtgtgtgtgtgtgtttgatgataagtccatctcttgaaaagctgaagaatattttcataataagccccaagcagaagccattgtaacgcatctcgtgcatgtgcctttattatagagtagcctcatgtgaagccatctcgtaagcaaaagaaacattcgctggtggcacgctgtcccaggcactcttccagggctgtgtgcaccatcaacaaggcaaagctcctaccctggtgagcctacatttacgtgaaggaaagggttaaaaaggcaactgagatgcttcctggtagtaaatttaacagtacagctgtgattaaaaactaagccggatcagaagatgggggtgagattcctttaggcaggttgggcaggagccacactgaggaggcagcatttgccttgagtgggcactgctggtttgaggaggtggagttctgtcacccccacagcaccccagggctgctcgaggcactgccccacctcagtctgtaaactttgggcagaagaagttcaagttttcgacatcgaactttcatgtaaaaaagaagaggcccaaagtttgaggcggtgggattccttatcttgtgttgactttcacgggtcatcttcaccccaggcggtttctgctgtgaactcacaaatgagtctttgtccagttctcacccaacaactggcgtctcctttttaaaagccagcttctcttccctgccaaggtgcatacagcagtttggggccacactttggctctttagatgggaccttgtatacagctgacacggcctgcccaggtgacactatgaggggctgaggcggctgccttttccctttcaaaagggcgttttgttcctgtggccttgtggaaaaggcagaaggctctgaggcatctgaaatttggagaaagtaagcagcgtttccgctctgactcctcggccgcttcccccacgtgaccttcccaggagccccgctgcctttttgcctcccgcggctgcctcctgccatctctgcggccagatgagccttgggattggcctcttgtgggagagtttcctggcatcctggggacttgaaaaggggctcttttaccttctctccttctgtatttgtagggtcttgggtttatttttcttgaactttccttgtgcctggtttgcatttttaccttgctggtcctcggccagtttaaaaaccctgctccaggtcttgtcgtgttgtggttctgcatcaggaagctgcatcctgcatcaggttagggacttggatttagaaacatttcagtatgagtctttgttttaacttgaagtgagaaaccggcttccttcaaaggcactgggagagatttcctgccaggcaccatcctccctcacccactggcagtggactccccaaattctggttcccgttgctggcaggacctgtcttctgcagggaaagggagagagggagacattgttatgttaaccattgaggtttttcattgatccccccacccatgcacccccacaaccccataaaggggagttggtgctaatcagcgttttctgagtcagggcctatttggtagagtcctccaaagctgtaatgcaggattgtttcctcttgtgtaataagggataggtgggtcataaaaatgccgattgctcccagctccacagactcctccctgggaaacccaatgacttaacagcaagggtgtgaaaccccaaagacagccccacccaggaagttcatgggctctcagggcttggcatcacctctcaccctaggatttctggaacagatgaaaagactgaagctaaatagattcttctcggatgtgttgatgagcccgctcagccggttcctcgttaggtctcagaagttgctgtgggatatatcgcactgtttttttgttttagccaccctgtccctctgttccaaatggtcagaagctggatgctgggggccctgaggttaagaggaagccaacagagtcactgaaaaataacttttcatgggagtttctaaaccatattcttctgtcttgtaagctaatcacagcagtagcaaggagttgggaccaagattgtcagctgtgtcccaaatgtttccagtcatggtcacgagtttcccgaaggctgtgattctgccttgttttccaggaggctcctctggttgtggtcttgcaaggcactagcaattggagtgaccgctgtgtgtgtcagccagctcttcctgcgccgagcacctcctgaacgtcaccgataaggcggggacgccagcatctaatgggactgctgggaggattgagtcccatatctgaagtcccttgagataccggcatccctgccttatggttgaaggcactgagcctggtgaagggatgtgctcaaggctgtggagctcgcacgtggctgtctgtgctgcacgagctggcagtgcctggcaggtactgcacacctcaaataccctgggaagataagagatgagtgaatgtgtggcccctgcccttgggagctgatggcctcataggagtgagatgctgaaaggagtcactggagtgaagtgacagtgccactgcggcgagtacctgtagctggtgtggcaggagcagggctggatagctttgaggagagagaaccgagtgcacagcggaggctgggcccagagctggaaggtctctgtgtgggttgggcccaggccctggagctcatcctggagctcccaggctggcagtgatgggtcggggtggtgacccagtcagtgtagcaataacagtgtgggaggggaggctgtggcagaggagacaggaagcccaaatagcagcagaggcagtccaggcaagcatcggggatggggagcagcagtgaggctggagaggacatcatgaaaggtggctacctggaagagcaggcagctctgagacttgaaaggtttcccaaggctgagagttctcaccttggaaaagctttgcagttaacgtgcagtggcatttcagtgtgcatgcaggatgtccctacccacacacaactgcacacacacgcggcacctgcccttcctccacccgtcccagagaatgcactttcccagtgctacatacccacacataaccgcacacacacgcggcacgtgcccttcctccatctgtcctggagaatgcacattcctagtgccgagatgctgccatccctgttctgctacatttgttcttttagaaaagttctggacctttgtgaaggatggtttggagaagaaaaccaaacgaaggagcttgagtccaggtggccctgttctgttttgtaggactttgtgttttatgccccacgtctgagaatcaacaagcggatcctgcagctctgcatgggcaaccatgagttgtatatgcgccgcaggaagcctgacaccatcgaggtgcagcagatgaaggcccaggcccgggaggagaagcatcagaagcagctggagcggtgagcgcgtgaggccagagtggggggggcctgtgttctcccaactcagccactggcagccccagtgcctgtcaggtgactgtggagctgatggggagagtgtggtggaatggaacccagtcaccacgctgggatcttcgaggcctttgtctctgggcagttgctgtggtgctgagcctgttgtcagccctggagcggctgctccgtcaggcagctcaggctggcagcaggccagggtggccctcaggataccaagtccatcctggagcttcaagtacccgtgaagtgtgttgacccctcactttcctgccagagtctaaatctccctgtgcctctttttccctgcaccaggcaacagctggaaacagagaagaaaaggagagaaaccgtggagagagagaaagagcagatgatgcgcgagaaggaggagttgatgctgcggctgcaggactatgaggagaagacaaagaaggcagagagaggtcaggcaccctggggctggcactctacactgggtcatgcatttccacagagtagcaggggccacacccacccacccactcaccaggaaggaaaccaagaacgtgtcccacagcgcagactcacagccgaaatgataaaatggttatttggtttggaaaacagttctgtacttatttaactttgatgctagttgttctaagactttgtattttaaaatttccctagtcttttgcggtaagtgctcaatcacccagtttccccaatgaggacagtaaggtttggtgcggtacagtgatttgcccacagtcccccagcccatgactgacagggccatgctgcactgccctcgacctctagactaaaacccaaaggcgtgttcagagccagacttcccagcacagctccagtcaacaaccccagcagctgggccgattacacaaggcgccacagatgctgtattcactggcagcccttacagcacacatgggaagggtgttctgtgttctgagtggagtgtggaccaccagcacagcgggcggctgacctggggagagtagcgccaagagggttgagtcaggcatgccagagagagggcgcctggctggcgttggacgggtttctagccatcttgaggaagttgtcatggatacagcagcaatgagctctgtgaagtgctttcctccagggtcactggaagacatcccctcaacctgtgacttggtctagggctctgtggctttgggggtgggaatggaaagcgagggctcctaggtccctgggctgagggtttgaatggctctggctttgtgtctttgcagagctctcggagcagattcagagggccctgcagctggaggaggagaggaagcgggcacaggaggaggccgagcgcctagaggctgaccgtatggctgcactgcgggctaaggaggagctggagagacaggcggtggatcagataaagagccaggagcagctggtaggaatggcctgagtttcaagatgctgaattatagagaggctgcttctgaggatggaaaatgtgacacctgccttgtaataattgtcatgactggaagctgtaaactgatctgctggggggctgaaggcagctggtggggaaggggctgggctgttgccagggtcacccattgaaggtgggtgtgggcatccaggaagagatgccgggggtgcacaatggaccctgctggccatggagtgggggtggcggggactcaggtgtcacgttggagactgcttgccaacacacatgaacactcattcacaactggactccgttgaaaggatatcagaactgacgtgagcttggcattcccttcccaggctgcggagcttgcagaatacactgccaagattgccctcctggaagaggcgcggaggcgcaaggaggatgaagttgaagagtggcagcacagggtgagtctgcacgggggacacctccgcacggccacagcacctgttgcccaattgcctgcggtggggcccttctgcaggtgggtgggttgggggagaggtctggctcaagctgccacatcccactggaagcttctgggatgtctcatgatcctctgccaataccagctgtactattgaagtagacatccccaaagagatgggtttgactttgtacacgagtcagtgcagctgctggattcatagagggaggacctctgattgactttcacccactttgctccctccaccccgaactgttcagtgctgatctgacagcccccggtcaggaactggttttacatctaattatatatgtgccccttgcaatggggtcgcagtgcctgaaacacgacctcctgcagctagtatatacagcgggcaccatggaaagatccagctccttggacgtctccaggctggagtgagagctgggctctgctgctcatcagctatttgggggctagtagcatcacttcttcaagcctcattttcctcattgtagaatgggggcaatacccaactcataaggttgctctgcagatgcgaggtcccatgcccaggacctagcacagaggtttagtcagctgtagctctcattgtgggacgcacacagagcttgtcgctccgtctgggatcccctgtgccctccaggaaggcacagcccctgagaagctctggggatggttcccactggagactgcacaccaggctttaagcagctcctctccttcacagacccgctggcccgtccttcccccactgtggcttctccatctgtggaggtgccttctggggacgtgtctcccggctctccagggctgctgctgcctagtacctccttgcctctgttccagcccccattcccgctgccgatctgtattaggctgttctcacacggctataaagaacaagctgagactgggtagttaaagaaaagaggtttaattgactcacagtcccacatggctgggggaggcctcaggaaatttacaatcgtggcagaaggcgaaggggaagcaggcacctcttacatgagggcagaagagagaaaagcaaaggggggtaatgccaaacactgaaaccatcagctcttgctcagaacccacccactagcacgagaacagcataggggaaaccaccccgtaatccagtcacctcccaccaggtaatgccccccacccccagcatggggggattacaggtggagatgagatttgggtggggacacagccatatcaccatcccaagttgcaagcggaagactttggttcttaggtttttggagaaagtacctgttaagtgaggagagctggctacaaagcagatccacactaagctcaactctagggctggctgggatggaggcgggcgggactgggtgtgtgtgaagctgttggaaggactgcaagtggcgagcaggagagcacttgataatgactgtggcatgaagggaggctaggaacagagcccgttactcatgctaacaggattttttttctaaaaattatataatgtctagagttacaggtaaaaaaagaaatggtagttttaaaactgcccaggttccggcatcacagttcctcttcctgtcttggacgcagagggttgtaaaccccccatgcaccctgagggtgctcctcttcgaagccacagcccagcacagttcagtgctgccttagcctgccaggacagagggaggtgacagtctgttctcatagccaggaggataggacttctgggtgagaagtcctcttattaatttgctttccaaaggccaaagaagcccaggatgacctggtgaagaccaaggaggagctgcacctggtgatgacagcacccccgcccccaccaccccccgtgtacgagccggtgagctaccatgtccaggagagcttgcaggatgagggcgcagagcccacgggctacagcgcggagctgtctagtgagggcatccgggatgaccgcaatgaggagaagcgcatcactgaggcagagaagaacgagcgtgtgcagcggcagctgctggtgaggcccaaggggctctgtctccagggagcctgcctcgcttttggagcagacaggcttggggagggcagtgatgtgagccagccccacccagcacccctcttgcccttcctgttttcctaggggacgggccgggccatatggggaggaagggactagaccaacgctgcttaatgttacagacgctgagcagcgagctgtcccaggcccgagatgagaataagaggacccacaatgacatcatccacaacgagaacatgaggcaaggccgggacaagtacaagacgctgcggcagatccggcagggcaacaccaagcagcgcatcgacgagttcgaggccctgtaacagccaggccaggaccaagggcagaggggtgctcatagcgggcgctgccagccccgccacgcttgtctttagtgctccaagtctaggaactccctcagatcccagttcctttagaaagcagttacccaacagaaacattctgggctgggaaccagggaggcgccctggtttgttttccccagttgtaatagtgccaagcaggcctgattctcgcgattattctcgaatcacctcctgtgttgtgctgggagcaggactgattgaattacggaaaatgcctgtaaagtctgagtaagaaacttcatgctggcctgtgtgatacaagagtcagcatcattaaaggaaacgtggcaggacttccatctgtgccatacttgttctgtattcgaaatgagctcaaattgattttttaatttctatgaaggatccatctttgtatatttacatgcttagaggggtgaaaattattttggaaattgagtctgaagcactctcgcacacacagtgattccctcctcccgtcactccacgcagctggcagagagcacagtgatcaccagcgtgagtggtggaggaggacacttggatatttttttagtttttttttttttggcttaacagttttagaatacattgtacttatacaccttattaatgatcagctatatactatttatatacaagtgataatacagatttgtaacattagttttaaaaagggaaagttttgttctgtatattttgttaccttttacagaataaaagaattacatatgaaaaaccctctaaaccatggcacttgatgtgatgtggcaggagggcagtggtggagctggacctgcctgctgcagtcacgtgtaaacaggattattattagtgttttatgcatgtaatggactatgcacacttttaattttgtcagattcacacatgccactatgagctttcagactccagctgtgaagagactctgtttgcttgtgtttgtttgcagtctctctctgccatggccttggcaggctgctggaaggcagcttgtggaggccgttggttccgcccactcattccttctcgtgcactgctttctccttcacagctaagatgccatgtgcaggtggattccatgccgcagacatgaaataaaagctttgcaaaggcacgaagcagcacgggtgtgtgcttgtgtgtggggtgggagggctaccgccgactcgtctgggctctatgctgtcctctggccaggtttcgtgaggggccgtggtgtccctgggggtacactggtaagttggagctgaccaacccaagacatggtgctccatgggtcacctaacctcctcgagatggtttccacaggagagaaagactgctccaacactcatcaggctcctctaaaatgctcctcatagccgggcacagtggctcacacctgtaatcccagcactttgggaggccgaggtggtcggatcacgaggtcaggagatcgagaccatcctggccaacatggtgaaaccccatctttactaaaaatacgaaaattagcctggtgtggtggtgcatgcctataatcccagctacttgggaggctggggcaggagaattgctagaacccgggaggcggagcttgcagcaagccaagatcgtgccactgcactccagcctggtgacggggagactccgtctcaaaaaataaagtgcttctcacagcgaagctgtgactcccccccccgccttgagacagggtcttcctttggcccaggctggagcacagttgcatgatcggggcttactgcagcctcaacctcctgggctcaatcctcccggttcagcctcctgagtaactgggactacaggtgtgtaccaccacacctggataattttttggtttttttgtagacagggtatctatgttgcctgggctgatctcacacttctgagctcaagccatccactgcagcctcccaaagttgctgggattacaggggggagttaccatgcccaccagccggccttttacctcatttgataagcactggaggacatgggtaacaacgtttattaaaatctggccattttctacatctcaaagaggagataacccaccagaggcttaggtaacataattgtgtttaacgtaaatatacacagataccaataggcggttaagccatgggacagggccgcagatggagactgctcaaggtcaaaggggtctccagctgggaccctgcacctggttcgtagcccctctgcagacgcacagtgcctcacgcctgctgcaacctggaaccttgaggccttcatgtcagtgcaggacaagagtcatgtctgtccatagattggggctggaaaggactttctgccactggagcttcgattgtgagcatgcatccccgccaacagctgtgtctccctctgtaagagaggaagacaatttagccatggtcggggagggcaccacttcatcccctctcatccctttaaaaatgatgaccagccagaagtttttcaccttaagtccacattaaaaggccaaccactgatgacagacgccgccgccaccactcccaccccaacaaagctggtgttgagactgggattcacgcaggcatcctctgctctgcgaggctctaacagcctggagttctgtagtttgaaagtgaggcgaggactctggtttggtgggctgggtcttcaccaagggagtggatagttgcacaccagcatggctagctgggtggggccgtctcagactgggggctgggcttgcccatgggaagggattcttagaggaagacagtatgctttggacaaaatatctttgaaaagcaatggagcagtgaagcttatttctcttcagtcactggttctcagttggaggtccttggagatgtgtgcaggtgtttttggttgtcatcatgtcagggacactgctggcagccagaagcagtgccaggcacagaacctcacagcagagggctgtccacctaccatgccggcggtgccctgccgagcggctctggacagcactgctgttctgaccacttttgatgaagtactttctgaattgccatttgtttaagaagatattttcatttaagaaaataatccttttatgattgacgccagaaacaaaagcaaatactgtacctagcccgtttggaggcctataatttttgtttctttagcagatctaaatctgatttaaattgtcaaaatacttggctgtattatggctcagctgtagagtaaaaactagacttaggcatttccaattaaggcaggctaggcaatttcaaaaccagttaagtcactgccctggtggaagcattttctttgcacggtacccattaggataatcacaaagtataaacgtttgggctcaatgtctcagacttacttgaaccaagtctggttcctccaagcaagcggtcgttcattccaaagagggcctgatcccagacagttaactccaagctcgactgcctcagctgagctggggttacgccactgaagacaaatgagtgtttccactgggggcaagcctgcttcctcaggactggcgacttcagtctcagtttttgttggtctggcagagtgagacagctgaagagggaacacaaaccctgcaatcattgccatccacacggccttctctcctgaggcctgtgcgtcagtgcagacgggaagcactaagaaaagtgccaagtccacaacatccacaccctccccagtgaagcagggtgggaaccacaggactcggcacatttcccttagggccgaattctgcatcaggtatgaagggcgagctgcatgctgaggcctcgtggccctcatcttaatctttcctccttggggtgcctcccaccatgactgcagatacacgttatctccttttaaccctgttctcaggaaaatcaactcagacaagcttgtccaaggccatgcagataagcaacaagattagaacataagctcagttctcctttttttgagacggagttttgttctgtcgcccaggctggagtgaagtggcaccatctcagctcactgcaacctcctccccccaagttcaaggaagactcctatctcagcctccagagcagctaggattataggtgcccgccaccacacccagctaatttttgtatttttagtagagatggggtttcatcatgttggccaggctagttttgaactcctgacctcaggtgatccacctgcctcagcctcccaaagtgctgggattacaggcacgagccactgcgtccagcctgagttctatcttgaccgtcatttttccctatgtcactgacggggagtttgcaattcaatgtaataatggtatttgccttacttttagaggggccaatgcacctgtactgaatgagaatgaaatgtggacagtcatgcgttttactgttggtccaagaggagatgttaagcttaggaaatatttactgaccacaccacattttcatgcttgatttcaaaactggcttcctgatatcacagaactgagaagattagggtttcgagtactccagcatgtacacatcccgtgaatttttggaaatcagggtctttaatgtgtgttgttagattttcataggaaagctaaaataagacgttttaagtggcttacgttttttagtgttcgctgcaggttctgggccatgttgtgatgtatactagatcaccaataaatatttgattacatcgaatacctaccccttaacaaatgagttcaaggtgccatctggccgcacaggtaaattcttggctcctagcactaccaaacaaagttgaccatgaagtgatggctgatctgtccctggaaggaaagccagtattcactgtcaaaccatgtctcctgatacgttagtatgcagtaccaccaccccaaaaccgagagctcagctagagaatctgctacagccctcagaccccgagagagcagatgggagtggtgcagtgggctctgctggccctgcccacaggctgtggcgctgcccacaccgtgccgctctgtggtcaggtggaggacaggatggagggattactaagatcctagcaaagagtaaagaggaacgcaaggagagggaagatgccgaagtttgagtctagttgtagccagaagtttgggggaaagtgagagccccgagaccctgtctaggaggttgggatggccatggggcacttgctgctggtctgctggtgaccccgtgaacttgggtagcagaatttcctcttctagccaaatagggagtcagcaaaatacacaacagaaatgtgcattctgggccgggcgtggtggctcacgcctgtaatcccagcactttgggaggccaaggtgggcggatcatgaggtcaggagatcgagaccatcctggctaacatggtgaaaccctgtctctacttaaagaaaaaaaacaaaaaattagccgggcatggtggcaggtgcctgtagtcccaggtactcgggaggctgaggcaggagaatggcatgaatcagggaggcgaagcttgcagtgagccaagatcgggccactgcactccagcctgggtgacagagcaaaactccgtctcaaaaaaaaaaaaaaaaaaaaaaaagaaatgtgcattctcccagtcctccttccccgccctcctcctcctccaccctcctgctttccacacgccccacgttattgaaggagtaaaatctccatagggtccctgaggaccctccctcctgacctacttcttttgctgggcagcagctacccacatgcctgggggcggggatttatctcgtctgagccctgcaggtaccagtgctcttggctccacattgtcatggagcctctgctcttcaggaggggccacggtttccccagagaccatccaatctgcccctgggaggaaggcctagggcagtgtccttagaggagcgtagagagggcatcagaggccttgtctgcttctggtcacccgtttcccccactacgggctccagagaacctctcccgggctcgctgcatggctcagaaagaagagctgctggagctgggcacggggacgtagaaaggaaatgctagaaaactttcaccccacctcagtctgcctgcagcaccaggctctgcagacaatgacacagacaatgtccagggagctggaggccactgaccttcttgagcctcttggagttttctgggccgtgaagggagaaccagcttagcccggactgtgagctctccattactctgaggaacgctgtcttcgtatttctccgcctggggacaagaggcagagcttagggacaggattccccaagtcccaagaaccttctgggttcctctggttgtctcagcttcgtccacagatgcttccccctggcccctgcaaggccctgggtggagcaggtgtgtccgtggcaggactggtcttccttccatctatggtttcactcccaccctccccaaccccagcatggggaggaacagcttggccaccccagcgaaccagagccagatgagcctgaggaagtgaagggactcaagggcactgcacactccctaagacatttctacgaaaacccagacacagcctgagtttgaaaaacagaaatgaactcaagcctccaccccatccaccccacccaggtcagtagagattcacgctgcccttccatgccaaggactggcacagacactggggacagcatggggtgtagtctctgtccagagccacagggggtggcccctcagggtgtggtgagtctgaggacacctccctgcccaccgaggcacttctgtcatgagtggttttaccagaaagtgagtgaagagagggccgggaaagagatgagcctgaaatccacaccatccttctcccagtggggtgggaggagagtattgggaagagtctagagcagggtgtgtccagtcttttggcttccctgggccacactggaagaattgtcttgggccacacataaaatacactaacaacagctgatgagcttaaaaaaaaaatcacaaaaaaactcatgttttaagaaagtttatgaatttgtgttgggttgcattcaatgccatcctgaggccaagcatggtgactcatgcctgtaatcccagcactttgggaggccaaggtgggatcacctgaggtcaggagttcgagaccagcctggccaacatggtgaaaccccatgtctaccaaaaatacaaaaaaattagccaggtgtggtgacgggcgcctataatcccagctactagggaggctgaggcagagaatcacttgaacccaggggacagaggttgcagtgagccaagatcacgccacttcactccagcctggacgacagagcaaaactccgtctcaaaataaacaacaacaaccaaaaaacagagccgtcccgggctgcaggttggacaagtttggtcttgacacatccggtccaccatggctcctgccagcactgagaagcagccctctcagttaccctcagaggcctcaggactcctgggagcccgcgtgggccagcccgtcttcctggccctcgggtgccaaatgaggtatggctgcctccagcctcagcggccagaaaccgaggcggaacagagcccaggggcgggtctgtgggcggactccccaccctactggctttaggagggatgccttgcagctctgtgccacctgcagctctgtgccacctgcagctctgtgccacctgctcctcacccacttgccagagcaggctcagtctgatgaggcctggtggccgcctgtcctatgccaagccctgtgcttgttccaggccttgtcttcgagctgatgacagaggtgtgggagaggcagggtgcacgggggattcagcctcggacagaaggagttcaggctggaaactcagggcgtcccggaggagccaatgctgttctgagagatgacagagcgggggtgagaggaaggcacggaaggcatggaagccagatgcttcacccacccgcaacgtggctggggcaggagcaaagggacactgaggctaaagatcaggccgagatggcaggcgtcctgagctccgggtcctggaagggaggccacttctggtaggggtaatcaggaatggcttcctggaggaggtgggttttgggtcgtcttgggctgaccttggataggggatgcattccaggtaggcactgggaaggggaggtctaagcccggactctagcttgggggagtcagcacaggcagtgggagagtgggcattgcctggaggagcagggagggggcaggtggctcaccaggaggcctcagctgaaacctgagaagcttccaggcagagataatgcgaatcccagctgcgctggctccggagaggaaaagaagccagatggcccttgtgccttatgtccaggtcggagcagaaggctgggcctgccgtgggcccttggctgaggggagtagtccatcccgctgggttttttttttttttttgagacagagtctcgctctgttgccaggctgaagtgcagtggtgcaatctcgactcattgcaacctctgcctcccaggttcaagtgattcttctgcctcagcctccagagcagctgggactacaggcgtgcaccaccacacccagctaatttttgtatttttagagagacggggtttcactgtgttagccaggatggtctcaatctcctgaccttgtgatctgcccgcctcggcctcccaaagtgctgggattacagtcaagagccaccgtgtccaggctccccactggggtttttaaagagatggcagaagcccacgtttttcatccctcgtggtctcacatgaactctctcccagtccgggatctggacacagcaaagtacaaagcagcgtctccgagaaatgctaacctctctcccaggcctctcctcctacctgcatagcctgggggacacggatcctaaatggagtccatcagctcctctgacccacccccagcccacgtgctatctatctcccgccgtgcaattccaaaccaggagctggagccccacatcctagccagggcggcctctgccttcctcacagcatcgggtccagccatttgtcacctattactgttagttattgtcacctattattgagagtgcctggggttgaaaggttagaaacaacacactgtagccccctgggggaccgcatagctgcgggcggtgcccccagggaaaggcatggccagcttccagcaggtcagccaccagcaaagggaggcctccgccaggggaagccacaggacctgatccagtctggtctgtgtatgatgctgaggcgggggctgttcgggtacctgaacagagctgagccagttaaaacaaaccctccgcccaccccacccacaagaaagtaactatttcaaagtcacagcgccaggccggcgaacacacagtcttgggtccaagtcttgccaggtacgttttctcttctgggatctctctgaaaagttatttatctatcacagtggggatggagggcactcagtccaaaaccagacatcaccttggcccggagcggatgccagcggaaggactgtgttgtgctgtcttcaaagtcccacgtggccagaggaatgatcacttctccaagaaacactctccgggccagcgtgcccagatgccacaccgagacctgcagctgccgggtcaccagctgggcaggggccacctgatactgcagaggcaaggaagagatggtcagctgggctcccggggcccgcactcctaggatccccatctctggaccccaccttccagggccccacttcccggggcctggcgcaggcctccctcccacaggctgagtccaagatgcggatgcagccagggacctgatgtggttagggtgggtcaaggtgcttacagccagggtggggcgggggggtcctctctctgctcaagaacccctccccctactccccaggtgcccagtgctctgcctggggacaggcaagggtagccctggtagcctcccacccccaattcctagaacaagacaaggatgaaagtccttgtccagctcacgcctactagaaatcaagccaaagtctatgctcgcacaggatttgaacttgcatctaaacactgcacccagccaggcttggccaaaaataatgataacaggcccaaaaatactaaaaaaaaaaaaaaaaaaaaaaaaaaaaatttttttttgagacaggatctcgctctgtcaccaggctggagtgcagtggcacgatcttggctcactgcaacctctgcctcctgggttcaagcgattctcctgccttagcctcctgagtagctgggactatagacgcccaacaccacgcccggcttgtttttttgtatttttagtagagacagggtttcaccacgttggccaggttggtctcgaactcctgacctcaaatgacccacctgcctcggcctcccaaattgctgggattacaggcgtgagccactgcaccagcctgcatttatttatttattttttaaagcaaagcatgaactcccccctcctccattccccgcaacaccacgtgtttgccctggagggacggtgcctgtgctcaggcatgcagggcctgtgctggcttggcagaggccaacacgatgttcttactgtccacacagggggctcccaacacacccaagagtgacgagggaacccattccccagccaagcatgggttctgccccatagagactagaggccgaaggcccctcagtggcacccagcccttcccaaggtgtggctgactccacctcagcctctgagggcctcactttaagcttattagttggattttctcaataatgaacaaaccctacaagttattgaacacttatttatttcacaccaggctttctagatgcattgatctttttagctttcacacgcaccctatgaggtcagtataattcaaaccatgttgcaggtgaaaaaaaagcagcttggaaattcagtgaccctccctcccttggtctggtagccgacactgcaggccagattcacgtgcactgactgtgtccaggcccgagtctcgctgctgacctctgtggcccatgctgcccccactccggcgcttgtttggggtttgaatggtgactcctcgtgacacggctgttgctgtgaggctggacacttgcacccatt

SEQ ID NO: 555 - DNA, 3015 bp, Homo sapiens
gagcgcactcggcggacgcaagggcggcggggagcacacggagcactgcaggcgccgggttgggacagcgtcttcgctgctgctggatagtcgtgttttcggggatcgaggatactcaccagaaaccgaaaatgccgaaaccaatcaatgtccgagttaccaccatggatgcagagctggagtttgcaatccagccaaatacaactggaaaacagctttttgatcagtgggccttcgtcttccggatttgtgtggagagtgtggcttgtttcgtgcaggtgtctgcccaggaggtcaggaaggagaatcccctccagttcaagttccgggccaagttctaccctgaagatgtggctgaggagctcatccaggacatcacccagaaacttttcttcctccaagtgaaggaaggaatccttagcgatgagatctactgcccccctgagactgccgtgctcttggggtcctacgctgtgcaggccaagtttggggactacaacaaagaagtgcacaagtctgggtacctcagctctgagcggctgatccctcaaagagtgatggaccagcacaaacttaccagggaccagtgggaggaccggatccaggtgtggcatgcggaacaccgtgggatgctcaaagataatgctatgttggaatacctgaagattgctcaggacctggaaatgtatggaatcaactatttcgagataaaaaacaagaaaggaacagacctttggcttggagttgatgcccttggactgaatatttatgagaaagatgataagttaaccccaaagattggctttccttggagtgaaatcaggaacatctctttcaatgacaaaaagtttgtcattaaacccatcgacaagaaggcacctgactttgtgttttatgccccacgtctgagaatcaacaagcggatcctgcagctctgcatgggcaaccatgagttgtatatgcgccgcaggaagcctgacaccatcgaggtgcagcagatgaaggcccaggcccgggaggagaagcatcagaagcagctggagcggcaacagctggaaacagagaagaaaaggagagaaaccgtggagagagagaaagagcagatgatgcgcgagaaggaggagttgatgctgcggctgcaggactatgaggagaagacaaagaaggcagagagagagctctcggagcagattcagagggccctgcagctggaggaggagaggaagcgggcacaggaggaggccgagcgcctagaggctgaccgtatggctgcactgcgggctaaggaggagctggagagacaggcggtggatcagataaagagccaggagcagctggctgcggagcttgcagaatacactgccaagattgccctcctggaagaggcgcggaggcgcaaggaggatgaagttgaagagtggcagcacagggccaaagaagcccaggatgacctggtgaagaccaaggaggagctgcacctggtgatgacagcacccccgcccccaccaccccccgtgtacgagccggtgagctaccatgtccaggagagcttgcaggatgagggcgcagagcccacgggctacagcgcggagctgtctagtgagggcatccgggatgaccgcaatgaggagaagcgcatcactgaggcagagaagaacgagcgtgtgcagcggcagctgctgacgctgagcagcgagctgtcccaggcccgagatgagaataagaggacccacaatgacatcatccacaacgagaacatgaggcaaggccgggacaagtacaagacgctgcggcagatccggcagggcaacaccaagcagcgcatcgacgagttcgaggccctgtaacagccaggccaggaccaagggcagaggggtgctcatagcgggcgctgccagccccgccacgcttgtctttagtgctccaagtctaggaactccctcagatcccagttcctttagaaagcagttacccaacagaaacattctgggctgggaaccagggaggcgccctggtttgttttccccagttgtaatagtgccaagcaggcctgattctcgcgattattctcgaatcacctcctgtgttgtgctgggagcaggactgattgaattacggaaaatgcctgtaaagtctgagtaagaaacttcatgctggcctgtgtgatacaagagtcagcatcattaaaggaaacgtggcaggacttccatctgtgccatacttgttctgtattcgaaatgagctcaaattgattttttaatttctatgaaggatccatctttgtatatttacatgcttagaggggtgaaaattattttggaaattgagtctgaagcactctcgcacacacagtgattccctcctcccgtcactccacgcagctggcagagagcacagtgatcaccagcgtgagtggtggaggaggacacttggatatttttttagtttttttttttttggcttaacagttttagaatacattgtacttatacaccttattaatgatcagctatatactatttatatacaagtgataatacagatttgtaacattagttttaaaaagggaaagttttgttctgtatattttgttaccttttacagaataaaagaattacatatgaaaaaccctctaaaccatggcacttgatgtgatgtggcaggagggcagtggtggagctggacctgcctgctgcagtcacgtgtaaacaggattattattagtgttttatgcatgtaatggactatgcacacttttaattttgtcagattcacacatgccactatgagctttcagactccagctgtgaagagactctgtttgcttgtgtttgtttgcagtctctctctgccatggccttggcaggctgctggaaggcagcttgtggaggccgttggttccgcccactcattccttctcgtgcactgctttctccttcacagctaagatgccatgtgcaggtggattccatgccgcagacatgaaataaaagctttgcaaaggcacgaagcagc

SEQ ID NO: 556 - protein, 567 aa, Homo sapiens
MPKPINVRVTTMDAELEFAIQPNTTGKQLFDQWAFVFRICVESVACFVQVSAQEVRKENPLQFKFRAKFYPEDVAEELIQDITQKLFFLQVKEGILSDEIYCPPETAVLLGSYAVQAKFGDYNKEVHKSGYLSSLIPQRVMDQHKLTRDQWEDRIQVWHAEHRGMLKDNAMLEYLKIAQDLEMYGINYFEIKNKKGTDLWLGVDALQIYEKDDKLTPKIGFPWSEIRNISFNDKKFVIKPIDKKAPDFVFYAPRLRINKRILQLCMGNHELYMRRRKPDTIEVQQMKAQAREEKHQKQLERQQLETEKKRRETVEREKEQMMREKEELMLRLQDYEEKTKKAERELSEQIQRALQLEEERKRAQEEAERLEADRMAALRAKEELERQAVDQIKSQEQLAAELAEYTAKIALLEEARRRKEDEVEEWQHRAKEAQDDLVKTKEELHLVMTAPPPPPPPVYEPVSYHVQESLQDEGAEPTGYSAELSSEGIRDDRNEEKRITEAEKNERVQRQLLTLSSELSQARDENKRTHNDIIHNENMRQGRDKYKTLRQIRQGNTKQRIDEFEAL

SEQ ID NO: 557 - DNA, 3027 bp, Homo sapiens
gcggcggggagcacacggagcactgcaggcgccgggttgggacagcgtcttcgctgctgctggatagtcgtgttttcggggatcgaggatactcaccagaaaccgaaaatgccgaaaccaatcaatgtccgagttaccaccatggatgcagagctggagtttgcaatccagccaaatacaactggaaaacagctttttgatcaggtggtaaagactatcggcctccgggaagtgtggtactttggcctccactatgtggataataaaggatttcctacctggctgaagctggataagaaggtgtctgcccaggaggtcaggaaggagaatcccctccagttcaagttccgggccaagttctaccctgaagatgtggctgaggagctcatccaggacatcacccagaaacttttcttcctccaagtgaaggaaggaatccttagcgatgagatctactgcccccctgagactgccgtgctcttggggtcctacgctgtgcaggccaagtttggggactacaacaaagaagtgcacaagtctgggtacctcagctctgagcggctgatccctcaaagagtgatggaccagcacaaacttaccagggaccagtgggaggaccggatccaggtgtggcatgcggaacaccgtgggatgctcaaagataatgctatgttggaatacctgaagattgctcaggacctggaaatgtatggaatcaactatttcgagataaaaaacaagaaaggaacagacctttggcttggagttgatgcccttggactgaatatttatgagaaagatgataagttaaccccaaagattggctttccttggagtgaaatcaggaacatctctttcaatgacaaaaagtttgtcattaaacccatcgacaagaaggcacctgactttgtgttttatgccccacgtctgagaatcaacaagcggatcctgcagctctgcatgggcaaccatgagttgtatatgcgccgcaggaagcctgacaccatcgaggtgcagcagatgaaggcccaggcccgggaggagaagcatcagaagcagctggagcggcaacagctggaaacagagaagaaaaggagagaaaccgtggagagagagaaagagcagatgatgcgcgagaaggaggagttgatgctgcggctgcaggactatgaggagaagacaaagaaggcagagagagagctctcggagcagattcagagggccctgcagctggaggaggagaggaagcgggcacaggaggaggccgagcgcctagaggctgaccgtatggctgcactgcgggctaaggaggagctggagagacaggcggtggatcagataaagagccaggagcagctggctgcggagcttgcagaatacactgccaagattgccctcctggaagaggcgcggaggcgcaaggaggatgaagttgaagagtggcagcacagggccaaagaagcccaggatgacctggtgaagaccaaggaggagctgcacctggtgatgacagcacccccgcccccaccaccccccgtgtacgagccggtgagctaccatgtccaggagagcttgcaggatgagggcgcagagcccacgggctacagcgcggagctgtctagtgagggcatccgggatgaccgcaatgaggagaagcgcatcactgaggcagagaagaacgagcgtgtgcagcggcagctgctgacgctgagcagcgagctgtcccaggcccgagatgagaataagaggacccacaatgacatcatccacaacgagaacatgaggcaaggccgggacaagtacaagacgctgcggcagatccggcagggcaacaccaagcagcgcatcgacgagttcgaggccctgtaacagccaggccaggaccaagggcagaggggtgctcatagcgggcgctgccagccccgccacgcttgtctttagtgctccaagtctaggaactccctcagatcccagttcctttagaaagcagttacccaacagaaacattctgggctgggaaccagggaggcgccctggtttgttttccccagttgtaatagtgccaagcaggcctgattctcgcgattattctcgaatcacctcctgtgttgtgctgggagcaggactgattgaattacggaaaatgcctgtaaagtctgagtaagaaacttcatgctggcctgtgtgatacaagagtcagcatcattaaaggaaacgtggcaggacttccatctgtgccatacttgttctgtattcgaaatgagctcaaattgattttttaatttctatgaaggatccatctttgtatatttacatgcttagaggggtgaaaattattttggaaattgagtctgaagcactctcgcacacacagtgattccctcctcccgtcactccacgcagctggcagagagcacagtgatcaccagcgtgagtggtggaggaggacacttggatatttttttagtttttttttttttggcttaacagttttagaatacattgtacttatacaccttattaatgatcagctatatactatttatatacaagtgataatacagatttgtaacattagttttaaaaagggaaagttttgttctgtatattttgttaccttttacagaataaaagaattacatatgaaaaaccctctaaaccatggcacttgatgtgatgtggcaggagggcagtggtggagctggacctgcctgctgcagtcacgtgtaaacaggattattattagtgttttatgcatgtaatggactatgcacacttttaattttgtcagattcacacatgccactatgagctttcagactccagctgtgaagagactctgtttgcttgtgtttgtttgcagtctctctctgccatggccttggcaggctgctggaaggcagcttgtggaggccgttggttccgcccactcattccttctcgtgcactgctttctccttcacagctaagatgccatgtgcaggtggattccatgccgcagacatgaaataaaagctttgcaaaggc

SEQ ID NO: 558 - protein, 582 aa, Homo sapiens
MPKPINVRVTTMDAELEFAIQPNTTGKQLFDQVVKTIGLREVWYFGLHYVDNKGFPTWLKLDKKVSAQEVRKENPLQFKFRAKFYPEDVAEELIQDITQKLFFLQVKEGILSDEIYCPPETAVLLGSYAVQAKFGDYNKEVHKSGYLSSLIPQRVMDQHKLTRDQWEDRIQVWHAEHRGMLKDNAMLEYLKIAQDLEMYGINYFEIKNKKGTDLWLGVDALQIYEKDDKLTPKIGFPWSEIRNISFNDKKFVIKPIDKKAPDFVFYAPRLRINKRILQLCMGNHELYMRRRKPDTIEVQQMKAQAREEKHQKQLERQQLETEKKRRETVEREKEQMMREKEELMLRLQDYEEKTKKAERELSEQIQRALQLEEERKRAQEEAERLEADRMAALRAKEELERQAVDQIKSQEQLAAELAEYTAKIALLEEARRRKEDEVEEWQHRAKEAQDDLVKTKEELHLVMTAPPPPPPPVYEPVSYHVQESLQDEGAEPTGYSAELSSEGIRDDRNEEKRITEAEKNERVQRQLLTLSSELSQARDENKRTHNDIIHNENMRQGRDKYKTLRQIRQGNTKQRIDEFEAL

SEQ ID NO: 559 - DNA, 960 bp, Homo sapiens
ggcggggagcacacggagcactgcaggcgccgggttgggacagcgtcttcgctgctgctggatagtcgtgttttcggggatcgaggatactcaccagaaaccgaaaatgccgaaaccaatcaatgtccgagttaccaccatggatgcagagctggagtttgcaatccagccaaatacaactggaaaacagctttttgatcagagacagggtttcgccatgtttgccaggctagtctcgaactcctgaactcaagtgatccacccgtcttggcctcccaaagtgctgggattacaagtgtgagccaccacgctcagcttgcagccttcccccatcccttttgggtgagtgggaagagggggaagaacaggtggtaaagactatcggcctccgggaagtgtggtactttggcctccactatgtggataataaaggatttcctacctggctgaagctggataagaaggcaagtgtctgcccaggaggtcaggaaggagaatcccctccagttcaagttccgggccaagttctaccctgaagatgtggctgaggagctcatccaggacatcacccagaaacttttcttcctccaagtgaaggaaggaatccttagcgatgagatctactgcccccctgagactgccgtgctcttggggtcctacgctgtgcaggccaagtttggggactacaacaaagaagtgcacaagtctgggtacctcagctctgagcggctgatccctcaaagagtgatggaccagcacaaacttaccagggaccagtgggaggaccggatccaggtgtggcatgcggaacaccgtgggatgctcaaagataatgctatgttggaatacctgaagattgctcaggacctggaaatgtatggaatcaactatttcgagataaaaaacaagaaaggaacagacctttggcttggagttgatgcccttggactgaatatttat

SEQ ID NO: 560 - protein, 166 aa, Homo sapiens
SWIRRQVSAQEVRKENPLQFKFRAKFYPEDVAEELIQDITQKLFFLQVKEGILSDEIYCPPETAVLLGSYAVQAKFGDYNKEVHKSGYLSSLIPQRVMDQHKLTRDQWEDRIQVWHAEHRGMLKDNAMLEYLKIAQDLEMYGINYFEIKNKKGTDLWLGVDALQIY

SEQ ID NO: 561 - DNA, 101169 bp, Mus musculus
  misc_feature (1)...(101169): n = A,T,C or G
gataatgtagatgggggaaatttatcacagggaaacctcactcctaggcaaagaactagaagcaactaaggaatactgagagcaagagaaatagtcttccccagggaagagcatacaaattggttattcaataccaaatgctctgccctggaaacaaacatacatgcaagtaacattagacagatttagcaagttttgttttgtatgtatttatgtatatacaaacatattatatatgtgtgtgtatatatattatatatatgcatatatatatatatatatgtaacatatatatatgcacaccatgaatttgaaaaaggagatatacatagaatgccttggagtgaggaaagggaggagtaaattatacgattatattataaaatttttaaaattataattaaaaaatgttgaatacagccaggagttgtgatacatgcctaggcagaggccagcatgtccttctgagttctgggaaagcctgctctactagcaagtcctgggccagccagggatattcagagagaccctgtctcaaaaagaaaagcatttaatgcaaacccatcagcctggaaaaattcaaagtgaattttctataggaatttgcaagggattatctgcacctgttctttttatatatgaggaaatgaggtgccaaaatatgaaactcattcaaaagcagggcagtgactagaactttctcatctccacttgatgcccattggctccaaacaaaatttctgttctcaacactgaaaaacctacaaaaagagttcatcccaacaaccctagaaaacaagcatctttatctggataaacgtaaactggagaagtaggctctattatttttatgaagttttcttttttttttcttttttggaaagtagaatagtttatttataatttttttttaaattctttttttattagacattttctttatatacatttcaaatgctataccaaaagtcccctataacctccctccgccctgctcccctacccacccactcccacttcttggccctggtgttcccctgtactgaggcacataaagtttgcaagaccaaaggacctctcttcccagtgacggtcgactaggccatcttctgctacatatgcagctagagatacaagctctggtagtactggttagttcatattattcttccacctatagggttgcaggccccttcagctccttgggtgctttctctaactcctccattgggggccctgtgttccgtcctatagatgactgtgagtatccacttctgtatttgccaggcactggcataacctcacaagagacagctataacagggtcccttcagcaaaatctttctggcatatgcaatagtgtctgggtttggtggctgattatgggatggatccccgggtggggtagtctctcatactttgctccttaaaacttaccttcaagaggaaacagttagtttcaatgttcaaatgttcaacagttagttgaacatttacaagaagctgtactttttgttttcagcgtgataggaaatgaataaaactcacatgtggctactgctggctttcttatgtagatgctgggaagctgagtgcagatctgatgcttgtgtagaaagtattcttacccactgagccatcttcccagcagctctgatctggctgcaaagatgtctgagccatgtccaccaatatagcagtctgttgtcattgacagcactttctattgaagtttgcaatctaagcctcgggtggagccatgttgtgggaggagcatatatagctagatgatccaacaaatatttagaaagggcttacgggggacggggggacacggaaaatatctcagtcacaaaagataatgttcaccaattaggttttctctcatcagccccccatccaacctcttgcctatctaggctctcaggcatctcttacagatcaacaatactagtgtctcagtcttaaattctatccctcattagcataatgactctgagtttcctgatgctcaaaggttaatggtcactcagaggttagaggcgggagtcggtgggcggagtcaaacttctttaaagactagccttgcagaatgtgggacccctcaaggctccttacttggaggtctcagagacctccttacaaatggagctcttagagactttccaaatgctgtgaccctttaatatagttcctcatgttatggtgaaccccaaccaaaaatttatgttcactgccacttcataactgtaatattgctactgctatgaatcataatgtaaatatctgggcatcccgttggtcttagactacccctgtgaaaaggtcatttgacaacatctccccaagatgttacaacccacaagctgaaaacctgttttagcgtggttttatcattgcaaccaagttcctgacaatcaattacttgatggaggaagaattatttattttgattcattgtgaggaaggctggattgcaggactattattcactggctgatcacattgtgtctacagtcaggaaccagagagagatggatgcctgtgttcagccccctttcttctttagattattgtggggactgtagcacatggaaggtgtgctatggcattcctagtagctcttcccttcccatcctcagctcaggaaactactgtactcctctgactgtgtgtcctaggttactctgaatccagtcaggttgataatgaagattaaccttcaccagagagaaaaccagagcagggcaggaaggctgcaatgtctcctttgtagtcaaggaaacatgtcgcctcttttgaatattttaatggaccttgaccctcttgggctagctctagttctttagttcctgttagactttcattcacagcactaaagactaagaagaaagccataaaggtcatctaatattctggtgtctgcagacctaaagaaagacttagtggtacatatcttagctagttagttgaggcttctctttagaatttagaatactggggggctggaaagatggctcggtgattaagagcaatgactgctcttccagaggtcctgagttcaaatcccagcaaccacatggtggctcacaaccatccctaatgagacctgatgccttcttctggggtgtctgaagtcagctacagtgtacttacatatagtaaataaataaatctttttttaaaaaaaaagatttatttaaaaaaaaaaagaatttagaattccaaaaggtggggatataaaaaggttagagagcagaaaccaccttgtggaagggcaaagaacactagatcttaggcagaaggccaagaagcagcaactgggaagggcaaagtagctctttaaagaggattccaaagatgcagcttcactttgggccttggaataaataactgagtttaactctgctcgccttcatgtctacacaacagtctatttgtttctctgcattcttacccacaggttacagtgtaatctcatagcatgtctgacctgttattcatttgctaaggccaagttgacagttgaggatagctggagagagagacagagagtaattttgggggaatgtagagtggcgaccccttgttggttgtccatgctccagtggatgaccccatacccaagtacataaagtattaatgagacttagtgagaatttaagaaaaaggatagaggacatggagttggaaggggactgtgcaggggaatttttggatttaaaggttgtagggaatgttattatcataaaacattgtatatatgtctgaaactctcaaataagataattttaaaaacaagggcagtgggtcattagtataacctcagtaaatgagctgtagcataaataatctattttttatgctttgtaactttttattagaaaactttgaaacatgcaaaactaagccccaacaaaagtaaggaacccgcgaggtctcattttctagtcttaataatcaccaactcacgcccagtcttggttcactcaacactggtgttctatgcgttcgtgtttattttatgcaaataggtattcgacattaaaaatacttccacctacactgtttcctttgatccttctaacagctataaaaagtaggttatgtgattttttttacataagaatctctaataaatttctctttaatgtacatgcccattttaaagacagtaatggggggagtggaagtttaaatgacagtgtgtggtttatttattggattttcatacattttattagtaaatggaaaatgacaaatactatcatgatgtatagctttctctcttagttcaaataaaactattgttttgtttttttaagataattattactgtcagggctggagagatggagcagtagtaaatcgtgcattctgccttcccagaggaccatagctcagttcccagcacccacatgaggcagctcacaaccactcacaactccagctccaaggagtccaacattctctagtttctgtgggcatttgcattcatatgcacatacctgcacaaacacataacttaaagtggtgaaaataaatctttacaagaaatattgattaatgtcagttccaagttttctagaaaattgggtagcgataacctctatcagggttgttctacacaaataggattctggtaggactaaagagatggcttagtatgtaacggtgattgatattctatcagaaaacccaggtttggttcccagcacccacacagtaaatcacaaccattcctacctctagtcccaggatctgataccctcttctgaccttcaagggcaccaggcatgtggtatgtaggcacgcatatatgcaagcttctcactcacatgcatgcaaaaaaaaaaaaaaaaatctcaaaaaacaggaggcattttactgaacaaactacattttgttcatagctgcaaatacctgacattgtaagcaagcattctaatctcaaacaattctgggataaaatgataaattataaagtgtaatttaaaaaaaaaagaaaattgtaaaatgataaagaattcagatttatgaaaatagacaaacgagccatttaaaatacattctgaatgtcatgtttctgccggttattaaataaaactggtggcatctctgaaattcggggctagagtcgcttgacataattctttcacgtagctgtgtctgatgtttggaaagaaagcactcatattcacgtgcttggttaacgtggtatcaacaccttcatattaaaccattgcttacacatggattagctcggagtctatcaattgatgagcacaaccacagtatcatcatttagatatttataaacacgtaactgtataagggtttttttttttcccttgatctctttcttgtttgactaagaataccaagactgtctgtccccagtgcccacttgaaggttgatttagtcacacttgcaaaaccccaggcttgaatgtcaagagggatcaattcaccacggtgggctaatcaccctgcaatcttcgtgctacagagctggctgcagatccctcatcatagcaaaggcaaatgtttagtccggaggcatgctttttgccaactccccagatgagattattttttcacctctgtgtatttgagaacaaggaaggcagagaggccagcaatccaaagcttcattagtacaggagaagcaacactcactttgctacacaaataattagagagattaaatgagaataaacactgagaggaactgccgaggctctgaagttgggtaattattttaattactctagtgacttccaccagccttcattatcagccacagatcaaattgcaattgttttatgtatgaatatcatgagcgtgagctatgtggaaaggcacagtagctacccaggaatggtagctacccagcacgacattttctttaagctatctgtaatggtttccattccaggacctgataaaccctacatattttttttgaagatttatttattatgcacagtgttctgcctacatatatgcctgtaccccagaagagggcaccaagatcacattacagatggttgtgagtcaccctgttggttgctgggaattgaactcaagacctctggaagagcagtcagtgctcttaaccactgagcctattgtccagcccaaaccctacatattttaaatacacgttttatactagaaagtgtcaggtctggggttgtcatagttagggttttcactgctgtgaacagacaccataatcaaagcatctcttataaaggacaccatctaattggggctggagtacaggttcagaggttcagtctgttatcatcaaggtgggaagcatggcagcatccaggcaggcaaggcactggaaaaggaactgagattttttcatcttgttctgaagggaaccaggagcagactgtcttccaggcaggtagtaggtaggtctcaaagcccacccccacagtgacacacttcctccaacaaagccacacctcctaatagtgccaaacacattcaaaccaccacatggagtctttgttcttctgatggacattcttgataactttgcctcttcacttagatttgatcatgaatgatttgggcgccacgttttgagtcaccgaatgtgaaacagtatggcacacctagccatttgaaataaatgtcacttggaatcatgctatcttattgcatatgtgttatttggggtaaacccatttctcctttaaacgtctccctataccaacttaggaagagaccagaccacaccacctgggatctcatgggggtcaattatagccagtcttgttcagaaaataagtttcttttatacttgtgacaataatgattgacagagatttccccagtgatgccaattcttctggaaaattatcttgtgcccagttttatctcctcccttggggattgtctaacttaccccatttaatcttttcaaaatcccatggagtatattatatattactacccccattttccagataaggaaactgagtagagaggacatggagtgggggaggggtgcagagaggggaggagtcaacggataacaatgtataacaatgtataacaatgtgtataaagaaaaatcccactactttgtatatgtattactggcttctgttgctatgagaaagcatcctgaccaaagaaatttatagaggagactattggaacttattatatttccagaggttgtgggtggggagcagcagggggtgttcctgagcaggaagctctcacatctctacaggctaccaaccagagaaagcaaactatatgtttcctctcaaagcccaaccccaggacacagatgctccagccaggccacacctcctacgtttaaacaggtgcacctggaagaggctttctcattcaaaacaccatagaattctaactcaataaatcaaaatttaaaaattaaacagactttccgtggctccctgactcaatttataaaagtagaaagtggtctgactagcaaccaaatccaggaaccagggcaatcccaaaggaaggagataaacgcaagggctggaccctactaaatagtcttgctccaacttgacaagctaaagttatttgggacaagggaatctcaagaaaatgcctttatgagatcagactgcaggcaaacctgtagggcattttcttatttagtcattggtaggaggagggtaacagcccattgtgggtggtaccaactgtggggtctgtaagaaagcaggctgaacaagctagtaagggtccttccttgggctctgcatcacctcctgcatccaggttcttgcccctactgggtttctgttccagcttccttcaatgatggactataatatcaacgtatacgcccaatgaaccctttactccccagtctgccttttgatctcagtgtttcatcacagtgatagtagtcctatctaagccaagaacacggggaaaggagtgtgacaacagtccttgaatgtcttagccgtttgagatcagtgattctgtatgctagctaacatcccaagttagattccatgtttgatggtcaaagtctctgactagccccattcctgggggaaacacaattcagacggggttttataggtgcagactaccaaagacatccatcccactgagtttcacccccaatatctctaggcatctctcttcaaccgaatttgagatgtccaacaaagttgggaaggattcataacaactttgggaaagagaaggggattggacacatttgtgtgttactgtctggagtttaagaaaagtctgtagagattcccctcagttttcttccccttgggatgctggcacagccatcacactctgaggtagaatacagcagggagtctaatgggatcactgttttaggatcttggcctcaccactttgcacaacattgggctctgggtgacacaggaaaggtgggactgaaggctaggacttagttggtttgtggagaaagggagaacgtttgagaactcactattagatgtctgtatctaagtgtaacaaggcccctagtaggcacctagaccttaacacaactgcctcggcggaagcaccgttcagggtataaagctcagcatgtagaccgtaccacctgccaaaacggaaacaaaggcccaatccatcaaagtccatatagtcacgggaagtctcaaaatgcactaaccttgctttttaccttttgtagttccgattctgacgcactgttcttgttaactgaagtatgtcaacccagaacgtggcttttgttgtttaggtttggttttttgttttgttttatttttttgttttttggtgttgttgttgttgttgtttgcttaaacgctcaccctgagaaagcctcagcgctaccttgggattcaaacacccaatgtagtcaccggctggctaataaatgctttatatatttgcttcaacccaagtcggagcagtcttctctagtgactaccccacaacataagagagtagttgtgaaaattcacaggtgcgcagtgccagacaccgaacccaagatgcaggacacagccacgtgaaggtggaggatctgccccagcgtgctgcttgttcctcaggaacatagtcaaaaggattttcatgcgacagagaaagtcgggttgcggaggaaaacggaatcagaaatgattcattgggggtgggggtgctttcctcagactccctggaatgtgcttggaatgagaacagcctggggttcgttcggctaatagattctctatatatgagagggtcttccaggtatttccgcttgccatcctctgacccacttgatctgatggcatcacctaggaagaccggtcactcacagccaggctgtgctgatgatgtgcagtgaagaggcagtgggttctatccaggacgcccacgttctatttccactaagtcagttaccactgacctcaggaaattcccttaagtctccatcttctgctccttcatccagaaaatgaaggtgattccacctccaaagcctccttgaaaggattacagggatggtcctgggggataattcctgtgcctgcaaactgggaaggctccaacatgaacaaaagcaagttacacatactcagccggagttgtcaaaatgtcccccacagatccaactgtggccgagcagttgcgattgattccttggaatgggctggcacacatgccagacacctatgtgcggcaccccctccatctctgtgggattctattgatttctgcctttcaagagaaagtggttctctttgctgaggttctgtacaccaaccctcaagccagggaaggaccgctttgtcccctccctctttctccttctgccctctttaggactccggacttgtcacacgtgaatgggtttccttggctgatctccaaagaccctgcagcagttcagtgagctgaaccctggggcgatctgaaaacagcacccaccacctccacacacacacacacacacacacacacacacacacacacacacacacacacacacaccccaggcagaggtcgcgcaacccagcagagatcctcctccctacccctgcctctgcccgcaggcagcgcctggtgccaccgggctcagaccccgcagagagccttggcccttcccgcctccgccccgcagcccctctccgccagtagcagcgctgctatcttcccaccggagcactaggaggacgccggagtctgcagcgcccccgccccctcgctttttctttctttccctgctttgggatcttgctgtctggagccgggagaggttccgagaaggagagagcggcacaggtttctgccgcggcgctcgaacgggagcttagggacgcagcatcctcggtgtccacccgggatcgcagctgcaccggccgacatgtgacggaggaaagccctcagcattcccggcaaccgccttcaaaggggtcccggaacgctcgcccaggccagcagctggatcctcttagccctcagcgacgcgggacaggagcgacaaggtacaacgcctggtacgttccaggctcgcactcgggaaaagagcgcagcggggaccgccgcctggcttgcactcggcacaactccgggacctgcggagtgcggctggaccgtgtccagattcccgccgacttcatccagagtgacccaagaccctagccggtcctcctgcaccccctggagttctagcttgccctgcatctgcgccgaccccacaacgcccaggtccccgcaacgccccagtccggaaggggagcgcgcttgcggcttctccctgattgcagacgctgccgctgtcctaactgcacacagaggtcccctacccggagcctagtccttgcagggggtggtgtccgagacgctggggagcgcgcaccatgaagtccgcgctgtgcagccgcttcttcatcctcctgccctggatcctgattgtcatcatcatgttggacgtggacccccgcaggcccgcgccccaactcacttcccgtccctacttctctccccatgcagtgggctgcgggggctcccgagtcccgctccgacggagtagccccgggcgtgacgctgccgagaagcggaacgagtctcggcctcagctgcagccggagccgcgcttgcccaccatctatgccatcacacccacctacagtcgcccggtgcagaaagccgagctcactcgcctggccaacaccttccgnnnnnnnnnnnnnnnnnnnnnnnnnnnnnnnnnnnnnnnnnnnnnnnnnnnnnnnnnnnnnnnnnnnnnnnnnnnnnnnnngccggcctgcccaacacgcacctgcatgtgcccacgcccgcggcgctacaagcgaccgtggctgccgcgcgccaccgaacagcgcaacgcgggcctcgcctggctgcgccagaggcatcagcatcagagcgcgcaacccggcgtgctcttcttcgccgacgatgacaacacgtacagtctggagctcttccaggaggtagtggtccagcgccgatggtggggtgtagggtgtgtgtggggggaggggggacaaggggcggttgggccccgaaggtctgcatgccctttgtgcttcctgtacacttttgagttctcagtcccttcgagcacgcatcccgcactcggcgtggagcagctgaagatgggcagtccacagcctcttcggctggctgcggtgggtggagaaggggtgttggtgggtggagaagtctgccccgaggtgtcttgccctgtccgggattgtgttcagtaaataatagtacaggtgatttgcccaactggatgacgcccaaagctggagctaggcttgattttcttggagactggatcagtgcctacaggtgattctgagtggagacaaatgtgggataaaggtactatcccacatatcatcccactgagttgatactaacaactcagcttagggaccaatctcttctagtacagccagccccctggtgtgagattgatccctggtacatgcacctacgtgtatgagggagggtcttcctttggtctttacctatcgcattggcaaatgaattagaattattctgcccagtccttaaggacccgccccccacccctgccccaggcatcacccgaatggcctgctgggccattctctgagtggaatttatcaagccactcttgcttggcctgagttccttgagcgctgccccgccccctgctgctgaagtggcctgtgttccctgggaggccacctgcatgcagccacagggatagagccggtggcctttcttgagactgttttgtggtaatgttgtaggtctgtaagggttggtgatttctctctctctctctctctctctccctccctccctccctcccttcctctttcccttcctcccccctttctctccctctcttttcctcttcctctctctcccgcacgcctcaacacttagttacagctgaataaaatcttaatttctttgccccgtgggactgtagatctccacctaaaattcctcgacatccagcctcctaaagactccctgacttcccagctcctccattacccccagaaaactggacgttcgggagatagtgtgtgagcaggacactgaattcataaaacaactgtgtgtccagcaatcaaatgccctaagtgccccccacctagtgtcacctagtgtcaggttgctttcctagcctcaggacaatgactatacccttcccgtttaaaaagtatttgccacccttcatttctactctttccttgtattaaaaaaaaaaaaaaaaaaaaaaattgttctctagactctcattccatgggacttgctgttcatgtttccccagagaaataagcttggtttagtgtatagcatggattttattatacccatgattagggttatcaaatgattgctttaaagctggacttttattttaaagttaagttgtttctttgctctttcctctaaaaggaggacttgtgttttgaagcagaccttttaactctaaatgcttgtttatttttaagccaagtctttcttgcccaactctgaaatcactttacctatgacgcgtcatcttgtttaagaaaaatagtgcacattgctgctaattgacatttgaggggggctaagctggaaaagaggaaggattgcttctgtgccagcattcagcctgttggcacgaggcgttaaaggagtagaaaagttggcacatgcaggcagggagacaattcagatacagtctcctttgagacttcccctgatgaaaggagagcttgtgtgaagggtattaaagagcagaaggaaattggggatttttttccattgacctgtggggggggggggttgggaaggagaggaaagagtagggagggaaaaatattgtattggcaatgagaaaataattttttcaaaaaaaaaaagcaagtgaaacttttaaggcacaaacatttcctacaattggaactagtgtactactaataatacatttttcagaccctgtgtaactttttgtgaagatacacaaaatacacagccgtgtattgtcctttgtcaccgtaagatgcaggacactctgtcttcagaacctctctctcagaagcagtttaaggcaagggcctttcctcagcgtgccaggtcccgcctcccagctatagatactcacaaattgggctttcgttgttgttaatgggggttgcatatcttattctccttattacaatctcaacatgacacccaatgtgcttgattagtgggctttatgcctcctcctgtatactttctataatttcatgtttatttgcctttaagtgcttggttttattgatggggtgactcactctgcaccccttctgcaattaatgattgggggtggacttcagtctagacactgttcccctggagaaaagagagaaacccataaactactcagtgcttcagctcctggggggtgggggggagacaaagagaggctacagagatgaggcctgtatctctgccctttctattgaccacatgtacaaatttgtttttaagtaattcatagtatgtaaggaaagaatgtctcaaagctggctctatcttttgttcatagagcttctaatctccagagctgatggtttaaaaaaaaaaaaaaaaagcaagataaaaggaagaaaatgaagcaggtacaaattagctcactgaatattggcttcaaatgaaggagagtaaaaaaatgaaaggcctccaaattaaattaaagacgcaacaggcaatctgcattcaattattcctctctggtaactgggatagcatcttttttttttttccccctcttgtacagctaactaattttcagcttcccttttcaactgagccatgctgccagggaaagagtgtttgcactgaacgagaaccgaatcaatctgcaaatggagctgagtgcgagctgaagcctgggaagctgtctaccgagaaggaggtagcagggcctttgcaggcttccggcacctcagctactccaggcctctcagtgggcagcagtggcgttttgcccctgatggaccactgataatcctgctggcctgtctacattgattgagctttctgggaaagcttatttgcaaagcatttggacagctttaataaaagccacaagtacagataaatgggactttatagctggtcatattttcaatagcgctatcgaccaggtgtctcttcttcaaggctttcccaagcttaaagtgatttttttcagctgaaagtagtttcacctttgcaaatcaattgaattgaaagggttttttgtttttgtttttggggggttttttgttgtttttgaagaagaagaagaagaagaagaagaagaagaagaagaagaagaagaagaagaagaagaagaagaggaggaggaggaggaggaggaggaggaggaggaggaagaggaggnnnnnnnnnnnnnnnnnnnnnnnnnnnnnnnnnnnnnnnnnnnnnnnnnnnnngaggaaggagaagaagaagaagaagaagaagaagaagaagaagaagaagaagaagaagaagaagaagaagaagaagaagaagcacttgccaagcaaaaccccaaaactttaatcttaacaagataagacagaaggcaaaaaccaactaagagagtcaagtgacaccggagtcagccaatgagacagtgtggaaggcttttgcatagtcaagtgacaccgagtcagccagtgagacagtgtggaaggctttgcagaaagcagaggatgaaagggtcaaaaggccccctatcgggatttcattctggatgctgctacctatctgcgtgctgggcagccagagcagtggccttctgtggtcctgatgctttttaaagcattaccatctcccttctgcaagctgcttacaggagccatagcccagtcggacacttgggatcacagtgctcagcagcccttcccaataggcaccaatgcaccctgaaagcaggcctgactttcttgctttctttcccctgacctagtggcctagctgaagggaactctctgtaaagaagccgaagagcttctcataggtgtagcctggcaaggctgccctgagcatattccgtgtatattacgtctttccctctgagcccgtggtaataggccataggactgatgaaacacgactttattgttttacttcttagtgactgtaaaactgcagccagctttctagatgttagatctatagatttatcctcatgccctctgaatgaatattattacttgagttatggttctgctctgatagttttcctgagaccagtggcttcaatgttttaatgggccagaaacaacaatttgggtttaaaagcatggccgacctgcctcttcccattgggttttcctgcccctctcctcctctctgcctacttttcactgacgagtctctcatgaacaggcatgaagacatgcccagagtatcatttggtgtgacagatgtgtatcttcaaaacatttaagttgttgtttgctgcctcttggatactagagtaggtggctctgttttcttctgtctgttccacttgcttctaaattacgatctggtaaattttctcttgtgtgaacagtaatagaatagtaattgcttttaagacatgctgaaaaagcaaatagaacaaaagtcggacagcctcatttagccaccacgggtggtgttcaaggtgtgtgctcgcgagtgtcacgggattcagccctgccgagctatagagattgaagcaattctcatgctaggatattctgcaggctggtaaggaaacacatcattgtatgtttgattcacagggctagtggagcatgaaatttgggttttgtgtggttctcagatcctcttctaaaacataagtgaaaatgttatagccgtccatagaatgcttttccaatttgcagaagcaaaaccataatgttttttttcagttgcacttgatatatatatatatatatatatatatagagagagagagagagagagagagagagagagagagagagcacagttttaaataagtgtcaaaaatattttctagaccagtggttcttaaccttcctaatgctgtgaccctctaatacagttattcatgttgtggtgaccctcaaccataaaattacttctgttcctacgtcataagtgtaattttgctgctattatgacttgaaatataaatatcgatgttttctaatggtcttagatgacccctgtgagaggaccgtttgaccacaaaggggcctcaacccacaggttgaggaccaccgctctaaataattatggaaggccgtggcaagcaaaatagggaatggtggagctcagtctcaaccactataaagcagctccttacacccaaggctcaggggtcattgctgcagagggaggcagaaagattgtaagagcccgaggaaccaggagtttactgtgaaactgtgtctcctagaaatgtcagaagctacacccatgatcagaggacacattttaacaattggtctttccttcagccatgtgggcttcagggatcaaagtctggttatcagcttggacaagaagcactgctatttgctgagcccccttgctgaccccatccattgagttttacttgtagcatctcaaggttgacggtgcctgctgagataaataccagcacccccttcctctctgtatttggataggaaggcagtcttttgatgagggaacttaatgtcaataaaacttgatgatggttcactgttttgcaccagttgttataaacagtatcctcactttaagtagaagtatccaaagtatcttgaaaacgtcatatagctggtagatgcagggacaagagcttgaatcagagtgcccaagtctagctcgaacaactggcttcccagaagttcccatttagcgaacacagttgtgtaaaacatggagcagaaatctcctgaagtgctggctggccccactatatttggtcttccttcttgactgcagcaactcttaattttgtgttttaaactctatggatgaggagtattgggaactaaattctggcattttacccctgagctataactccaaccccactgtttatttaaaattgataagaattgtaaacacgtgtacaataggatgccaattttttttatttcatttatatgagtacactgtagctgtcttcagacacaccagaagaggacatctgatcccattacagatggttgtgaaccaccatgtagttgctgggaattgaactcagaacctctggaagagcaagcagccagtgctctttaccactgagccatctctccagtccacaacatgatgtcttaatatagcatatactttattaaaggaccataggtggttaactagcagtcaactcatatattcttcatggtgactgcttaacatagtccttaattttaaaacacctacgattattatgtgtattgctatgtcgtcctatgtatgctctgtattttatcaactaactgaaattttgcataccttagccaacaaattcctagccctgcctacccttgccgtttgatcttgggattatttcatacactccctcactgactcgacttgtagaccatttgattttggagattgttttttcgtgtcagttaaaaattgctacatttgcatgtaaactgtactcataatttttaaaaattatgtgttcctgtgagtaatgattaagaatctccagagctggggaggtggctcagtcagtaaaccgcttgtcttagaagcacaaggggcctgagtttggtccccacaatccatgtttttaaaaaacaatactaggtgtgggcatggtgtgcttgtaatcccagatctaagggctcactggccagccagccttgcctacgaatgagcttcaggcctgtgtgagatgttatctttctgcaggtaaacattaaggtgtgtacataccagccacttgatctcttagccttctgtcttctcagaatagacagtgttagatgcaaggacatttcagggcacagggctgggtgataattaaactgttgatcgttgataattgagttgagctggatgtgtggatggcagatagctgctgctgcccactctccaggggacacacagatgtacttgtagggacttttagtgcacagcagcacctggtgtgggctgctgatggccggctgctcgttcagaaccaccttcttgctggtaggattgttcttgttcttctggaattagggctagccctacattaaaagcaaaattaataaatcactctttcatgcttgaaataaaggaacaaggaaaccagcaaagaagtaaagaaaaaaatcaagggaaaagagagagaggagagagagggggggggagagagagagagagagggagagagagagagagagaagctagaacctcagagatggcttttctgaaagggagaaaccatgttctcccccactgtcagattgtttggtcctttcccacaaatagcaaactcagtcatcttctttttttcttttaatatcaaccttctccattaatagacaaagaaccttaagtactatgtagagtccatttgaactgaaggccattattgttccttcagctctgatggtagggacatatccaaagaactgaggcagtgtgcagttcagtgactgtgtcattagcatgggcctatgatacagacctatgtgacatcttgatgtaaatcaaagacacagtgagcatgagctcacccagtacagggtgatctgtcttcttgtcctttttaaagtgtccttcactctaacgtaacaataaaaaatccagtaagtggacaagccagtagtgtagtcacctagtaccagtgacaagggcacagaattgcatgtgctgttacagaactaaactcttatagtgccggctgcatggtcagttcatttatacccatgtcaccatagacacataacagaatgcgctatgctgccacacttggtggactccaatgggcaacggattttcaaccctgttataatctcataggacttcatcacaaataaggtctgtgggctgaccaaattgtatcttcatctctcgaatgaaaactgaaagtgttagatgctggcctttcccccatatattgtgtctgtagatcctatgtaactgaccttaaacaccatcacaatcacaatgtaacgcatatgattttagtatctactggaacactgggcaccatacccagggaaggctctccctggcatgtgtgtccagactaagagtgctatgtttgatgtgtgatgggaggaatggctgtgtccttagtggattcgttggtgtggcaagtcgttgaggaagtgataccttatctgagaactgaaggatgaaggaccttgtgggtggtggcataggaagaaagagctgtctagagatggagccacctgtgtgaagctgaggaaatgagatgtggaatactcaaggatctgaaagatgtcccagtggggtccagggctggcattgggagaggtcaagtagaggatggggaggacacttgtatatcctacatgttcacgagtggccctgctctttgggacaaaattgagcatctctgtccaaacctgtcctgcaaaaaagtcttccattgtcaatatttgcaagtgctatttaagtcacacctgttgtgttcattttcctggaaactgccatgtttttgtgtaaatccataagctagaaaatacacacagagtgcaaagggcacactttgctctgtatttagcttttgctttgcatctagtaacagaaatgcccactgggaaagtgaactttttccaacagagcttgtctaagatagggagcaaattgatacatacatatatcatacatacatacatacatacatacattgttttattatttacatatttatacatatgacaagttgctgttacttttaatataggatcttggtatataactaaggctgaccttccctactggtctccctaggactgggtttacatgtcacccagctgataggcaagtatttgtgtgtctaatacaaacagtatcgagaaagcagtaacctatgactagcattaccttaaataatatgatagatgtgttatgcctgcttctccagctggaatacaaaggttggggttttcttttatttacttctgtaactccagtgtttggagtcgtgctagcatgtagcaaatgctcattaaatatttactgaatgaattatttggagatttagatgctgaaaggatttattactccagaagaaatttgataccagaaaacagtcctgcaccccaagtggcattcagataatcttctcgatgtctctgttaaaattgacttgaaccccttaaatagtaacaaaagtgttcatgctacgcagggaggaggtgaatgggcacccatgtgttaggaaggcagccttattaacagttacaaaagtaggaggtttgtcaatgaagctaaaagccagtggagggctgggcttccccgcctgcaaggctgggtgcaggcagggagcgcgtgctttctggaatgcttcacccccaccctctccccgctgcaagtgttgtggcatggagagtcagtgaagaaaactgcctgtgcccatgagttacatattttcgagcaccagctcctgatatctgaactgtgcttcttgatgcctcgtgaaaggaggagaggagggttcttggtctatacccaagtggaactgcattaatctgtctcttagttacacccttgggtggtgccagaataactttagggacgagaataaaatgaggcttttataccacaaaggattctggttaaaatatatatatatatgatctgtgaccacttcttagtttctctgataaaatagtattactgaaatcaagctggggagaaaaggacctatatcatcctacatccttgctacgaatggcccccatagactcctgtgcttggatgcttggctatagggagtggcactattaggaggtgtggccttgtgagaggagtgtgtcactgtggaggcaggcttggaggctttttttttttttttttttttttacgtatgttcaagctatgcccagtgtgatgcacagtcctctcctgccacctgccaatcaagtagaactctcagctccttaagctccatgctcgtctggatgctgctgtgttccctaccatgatgataatagactgaatctctgaaactggaagctaacccccaattaaatgttgttctttgtaagtgctgccatggtcatggtgtctcttcacagcagtaaaaccctagctaagacaatcctgtagcctgtcgtccaggcaagtcagggcaagagctcaaagcaggaacctggagatacgaactgatacagagaccatggaggagtgatgccttttggcttgctccccatggcttgctcagactgctttctttctttcttttttctttctttctttctttctttctttctttctttcttttttctttctttctttctttgcttgcttgcttgctctctctctctttctctctttttcttccttccttccttccttcctttctttttctttctttctttctttctttctttctttctgtctttctttctttctttctttctttctttctttctttctttcgttcttcctggctagctggtgttctctctctctctctctctctctctctctctctctctctctctctctctctctctctctcctctccccttgttattatggctttctctctagagaacatttcatcttcaagacttgactcctataacaggtatcaaaaccagaaaatcttaagattatttttcttctgtagtgataagacttatttataatgactatgggggaagggaatcaattaccaataagtgttaatgagagcatacccagtgtattaccatgcagccttggtcagaaactgcttccatcctaaacagtggcttaaggactcatttggattttgtggagaaaagtatgtttctgtgcctggaagccatgttggtatccacatgtacctcagggctgtaaataaaattatatagaggcctgaatacttaagtgaaactctgggagcacacaacagctgtgttggagcacttagttggtagacaagctttcagagcacagttcagccttctttcttacacactccaagactcctggctcagttggtaccacccacaatggctgggccctcccacatggtaaatcaacaaaatgtaacatagccttgcccacaggccagtctggtggggacatttttcaactgagattccctcctccaaaatgacttagcttgtgccaagttaacataaaactcgccagccacagacagtaaaggggcacctgggttgagacgcgaagggtggatttggttggtttaggagggctgaggtagcggctgaggtggcgtgagagcctaagacaagcccaggatgtgcagcttccatttgtgtccatgtattcctggcatctggcatggacccagggcatactcgccaaatgacagacagcttatgtcctgcctaggtgagaaagaataatatcttataaagaacagattcgtgggaaagaagggggtttataacccaactggttagaaacagttattggatatttaagttcatttcctgggacgttgagtatatactttctacccctgtaagagaaagcgttaagatcccaagtggctgcctttgcttggaacctatccccacgaaggtcttagacaagacacaaagcttacagggaaccagggctgggtagtaacgtgctttgcttttccaaatattatgttacaacttctctcctgcaggagtgaagaccatgagggtggcaggagatggtagggaggggcttgtccataggtcttctagaggctcccaggcctgtgaatgcaagtgactgcctctctctttcagccatccctaaatccctaaagtctctgtggctagaatgtggccattgatgtgtagtcctcaatgttgtttgcctgcagtaacttcccaaagaattttataaatttatatacccacgtgaatctaagtcttaataaatcacttaaagtaattgtcaatgatgtgatttccagagtgtaatatactgatattggtgtgtttatttatacaactgagtcttcaaaactattacagtgtgataccctaaacatttacttagtacacatagctataatacaatttggaattaatttttgtgggttgaatacaatataagttatgtatctcttagtcagcctctttgacctgaagaagtcaaaattatttctaaaattaattctttaaaaaatatttctaaagctttttaattcttcagcttcacactaaaatcacatggtgacccctgtgcagcgatgtattgatggctgggtctctttcaattgggttgaatgaataattagaaaccccttgtatccctgaaggatttattacccattcattagcgacatcgactttcttaataaagacagcaatatttctaattacttttgtctggtgccggagaggttgttatcacaagagacagtgcatttagtagaattgagggtgggtgagaatgttgccctgctgtgaagttaagactgagaggaagggcatagaacatgcccaaattcagtgtgtcagtctgaaaggaaacacacagaggcctgctgatacctgggagtttgtcccctccccagtgcctatatctgcatggactgtctgtgtccatactcaaggactgcaccgcagtccttaaaccctgatgggctgatagaaagacagtaaatgaagaagtatatgtggcctgaagccctgactgacctagaaactctacttccacaacctcagaggaagcagcttgtggaggtatgcttgtgtgtacatatatgcgcatgtttgcaatgacatgctatgtctcaccctgctaggtcaatgtgtgtgatgttgcttaattcattttcacagtgtccctgaggtcaggttgatgtttaataagccctaacatttggttttctcacagggctgatagagggctgggtgcttgtgtgtagctgtgaagtgaagcatgctggtaaaggaatccgtgaggtgatgtataccaggtaaacaggataacttccctactagctctttgagcatctcctccccagaaatcaggaacactgggaaggctgtggagaggctccagcagacatcacagagccacctcgacggatgatgtagccgaagcaatctggactctctcagaggcccccagggtgctgcccaatgggtgctggaaatgagcgctttggtccaccggatctgtggacctgttgttcgaaataaacttggcatcgagagatgaaaatgccagtgtcatttgtaaaggtcagatgacagtttggggatatttcagttactctgcggagttcccagctgcctctgctcggactgtgagaatgttcacgaagtttctgccttcccagggatgacagtcttgccttacgggggagttgtgcggcacgagccatcagagccaggctctgaaaccctgtcccggctgttcattatactctgctttctttagtgaaaatctcttttgatttcatcagtgtatttaactcctcccactacaatttcctgctgctggacagagctcatgcaggttgtgtttctcgtcctccctgttttagggtttaagaagccaaaacgttaagatgctacattaatatgcttgtttctaacacgcatgatctctctcctgtgcggatcctagcttgtaactttatatatagcgtttccacgggagtgaagaacgtgggtacagactggtaaagtagaaggaaatccatgagagagaggagaaagaatctttaagggagagaggttataggacacaggtgatgtggaagtagaaagaaggacttctggagatggaaacattcaagtggggaggggaacgggaggggggaagtcaattgaaactcatgatgtccaggagagccatgaggaagtctgatgcttagtaagttaatcaagatattttaaatgaagtttgaacagagatacacacaagtgcataaaacatctcccagaagtcacaggttattaaacagaaaatcgcagtgccagcgtaccagaaaataggttgttggtcaggaggacccccaaaataggagaggccattgccactgttgttggagcacactggaatggggtgatagcctatggctgaagacattacatgggtacgacccggttggctagccatcgtaccagaaggtgctgtgcagggtttaccaggaggatagccatcagcagtctcattggctgtggatcctacggacagtaataccaaccagccagggcagatatggctcccactccaacagtggtgtggctgttgtaggataaacaccattttcagataggattcagtgctcaacccacaggaggatatttatttctgatgctgtaaacctggtcaacgcttatggctggagaggccacaggccctaggagggaagttactgctgccatcttgtaaatcgacattatgtacctgtcaacctgccttctaaataaccgtgtccctgcctctagatgagtgatgttgtcagctttggtctctttgcagtggtcagcagagaatgcagagactcatagctcgtctcagtactgagataaatggcttttaaatacccagccacaaatgggactgctttatcattcttcccaccaagacgtggggacatcatggaagaaaggtagatgtaagagccaggggaaggaatgggtgaggtgtggggtgctacctcagctacggtactcacacccacagcagctgtgagcactgcacaggagcctcaaggggtggctgacaccctgccatggaagaaccctgcgtcttttttccctctaaacaacaagcacaatagggagaaagaaaatctgaaattttctgttatgatggttttttaaatatatattcacattctaatatgttaagtaaacacccttttttaaatactgggggtttgttgttgtttcttttttttctttttttgtttgcttggtttggtttttgggggggctttggttctgtttttttgtttggttggttaattggttttttgtttttgttgttgttttgcagggattgttgttgttttaaggaaggttggtggtggtggtggtggtggtggtggtagtggtggtggtggtttttggtttttcaagacagggtttttttgtgtagccctggctattctggaactcactctgtagatcaggttgacctcaaacacagagatccaccttcttgtgcctcatgagctctaggattaaaggccaccagctccctaatatgttaaaatgtgtatctataattgcacatttatccaggtgacctctaatatactatctctttgaaaatgagcttttctgagtacttctgatgggtggtatcatataacattcagcattttgttttggtaagcttgtgtcttcgtgtcctcggtctggcaggggactgtcatgatgacaacttcttttttttttaaatactttttattaggtattttcctcatttacatttccaatgctatcccaaagtcccccataccctcccccccaatcccctacccacccactcccactttttggccctggtattcccctgtactggggcatataaagtttgcgtgtccaatgggcctctctttccagtgatggccgattaggccatcttttgacacatatgcagctaaagtcaagagctccggggtactggttagttcataatgttgttctacctatagggttgcagatccctttagctacttgggtactttctctagctcctccattgggggccctgtgatccatccaatagctgactgtgagcatccacttctgtgtttactaagccccggcatagtctcacaagagacagctatatctgggtcctttcagcaaaatcttgctagtatatgcaatggtgtcagcgttaggaaactggttatgggatggaaccctggatatggcaggctctagatggtccatccttttgacacagctccaaactttgtctcagtaactccttccatgggtgttttgttcccaattctaagaagggnnnnnnnnnnnnnnnnnnnngtacgaccccggttggctagccatcgtaccagaaaggtgctgtgcagggtttaccaggaaggatagccatcagccagtctcattggctgtggatccctaccggaccagtaaataccaacccagccagggcagatatggctcccactccaaacagtggtgtggctgttgtaggataaacaccattttcagataggattcagtgctcaacccacaggaggatatttatttctgatgctgtaaacctggtcaacgctttatggctggagaggccacaggccctaggagggaagttactgctgccatcttgtaaatcgacattatgtacctgtcaacctgccttctaaataaccgtgtccctgcctctagatgagtgatgttgtcagctttggtctctttgcagtggtcagcagagaatgcagagacccatagctcgtctcagtactgagataaatggcttttaaatacccagccacaaatgggactgctttatcattcttcccaccaagacgtggggacatcatggaagaaaggtagatgtaagagccaggggaaggaatgggtgaggtgtggggtgctacctcagctacggtactcacacccacagcagctgtgagcactgcacaggagcctcaagggatggctgacaccctgccatggaagaaccctgcgtctttttccctctaaacaacaagcacaatagggagaaagaaaatttgaaattttctgttatgatggtttttttaaatatatatttacattctaatatgttaagtaaacacccttttttaaatactgggggttttgttgttgttgttgttgttgttgtttttctttttttgtttgtttggtttggttttttttagggggttggttctgttttttgtttgtttggttagttggttttttttgttgttgttgttttgcagggattgttgttgttttaaggaaggttgttgttgttgttgttgttttggtttttggtttttcaagacaggatttttctgtgtagccctggctatcctggaactcactctgtagatcaggttgacctcaaacacagagatcttcctgactctgcctcatgagctctaggattaaaggcaagtgccaccagctccctaatatattaaaatgtgtatctataattgcacatttaaccaggtgacctctaacatgctatctctttgaattgagcttttctgagtacttccgacgggtggtatcatataatatttagccttttgttttggtaagcgtgtgtgttcgnnnnnnnnnnnnnnnnnnnnnnnnnnnnnnnnnnnnnnnnnnnnnnnnnnnnnnnnnnnnnnnnnnnnnnnnnnnnnnnnnnnnnnnnnnnnnnnnnnnnnnnnnnnnnnnnnnnnnnnnnnnnnnnnnnnnnnnnnnnnnnnnnnnnnnnnnnnnnnnntgtcatgatgacaacttctttacaaaactctgctgcacactgttcatcagctcattcactgatggttgcctcagcaattttcacatttcttgctattgtgaaatgtgctttcaggattttaccatagaatattggtctgatcattggttgtaaataactcctagagtcctgttctaaactgtttggggacaaaaataaattagaaatgctaactgaagcttgcaacagttttgttgttggtggtggtagtgttgtttttgttttcttttcttttcttttttttttttttttttttttacttttttattggttattttatttatttacattttaaatgttattccccttcctggattcccctccacaaacccccatcccatcccccttcccctgcttttatgagggtgctcttcttcccacccacccactcccgccacacagccctagcatcccccatgctgaggcatcgagcttccataggaccaaaggcctcccctcccaatgatgccagataaggccatcctctgctacatatgcaggcgacaccatgggtccctccatgtgtactccttggttggtgatttagctcttgggagctctgtgggatctgattggttgatattgttgttcttcctatgaggttgcaaaccccttcagctccttcagtcctttctctaactcctccattggagttcctgtgctcagtttgatggttggctgtgagcatcctcatctgtatgtgtcagactctggcagcgcctctcaagagacagctataccaggctcctgtcagccagcacttcttggcatcagcaatagtgtctgggtttggtttttgctgttgttgatgatgatttttgagattataatttaactaaaatgtttcttccatccctttcctccctccagtacacccttttccactctcctttaaactcatggcctcttctttcattaactgttgttgtatttgtatatgcataaatattcccaaatataacttcttaggtgcacataatatccattgttcatatgcttccagtgatgacctcttggcatggaaggaccggctggcacgctcttctctgggaaggaccacctctttcactgctagctttgctcaggagcctgtagctctgtgtgtagggttgagccctcacaggcctttgtccatccactttgacatgtttgttggtgtcatccttactcagcccctgcttaggcagccatgtggcaagacaataatgggtgtcacttctgacatccctaggagagacaatctcacagcaaactctctaatcctctggctcttatggtcttttccccttctcttccctagtgcttcctaaaccttacattttagagtattctctacatgaatccactggggatgtgctccacaaatctgcattttgattgnnnnnnnnnnnnnnnnnnnnttcacagtgtagaccaggctggccttgaacccacagagatcttcctgcctctccctcccaagtgttaggattgaagtgccaaagtacatataatttcttacactgccacactgtattccataatggctctagccacttccatccccacaagcagagaggagggtgatgtgtcctcaccctagacaacactggcttttggataagtgtcaatcaaaaaagtaagccataacaatctcttaattttgaaattcatgtttcctttttcatgtgtgcttctatagcactcctgatggagtcagcactagtctgccatacagttttcttcctagagctgtttatttttagctcttgtttataaagtaggttctacgggcccagctctgtccctttgtaaatgaatacctgtgttttcacagctccatcagttgaaaacattcttccttactctttgccttatcttgaaaataactgacttggtcaaaagaaaaaccaagcactaagtcacgcgtgtgcaggtgtgttttttgtgctccttgcacagttcttagtaatacagctttgtagtaagtttgtcttgggaagggccagccctacaatttagctctttctcaggattgtccttgtagctcaaagaggcttataattctttatgaattattaatctgtttttttttttagtacacgttacgatttttctcagggatcacactagattcatactgacaacttcggacagaattatgttttcacattatgaagtcctgtgagctatgaatgcgagatgcctttccatttatgatttctttactgtctcttagccatatttgtttaggtttggggtttttttgtttgtttgttttcattttctcctcccaattcaacccatttgtaaacattctattattgtttgtagtgcctcgtgagttatgtttgagtgtggctctcggtccagttatctgaaaactataatcatattttgctaatagaactgaaaactccagagactggagagatgactcggtcgtgaagagtgactgagctctcccagaagacataaatttgtaatttaccagcataaattatcagcacccacgacgctttcatccctctgtagctacagctccagagtactcagtgctcgttcctggcctctgcaggggcctgctctccaatgcaggtacctacacacaaagacgcacaggcataaaagtgagtcttgagttttccttaagaactgaaacgtctatgacggaagcatggacaccatatgcagattatgatgttgcacatcatagacaagtgggaaggcaccttgcacaccgccatcttgcccttttgaaggcaagacataaaggggcacgtgtttcacagggtcatccagagccattcagggcttctggactcagttctgaagagcaaaggcctctggtaggcaggcttgtcaatcacttgattctccgtgatgttcctctttagagtgaccccagacagcctccagagatttaacttttaagtatggaaacagagggaaggcctctattctagacctaggtttataaaatttatctgctgcaagggttttgttttggtttttttttgttgttgttgtttttttgtttttttgagaaaagtaaattttttcttttttttttattacatatcttcctcaattacatttccaatgctatcccaaaagtcccccataccctcccccccacttccctacccacccattccctttttttttttttttttttttttttttttggccctggcgttcccctgtactggggcatataaagtttgcgtgtccaatgggcctctctttccagtgatggccgactaggccatcttttgacatatatgcagctagagtcaagagctccagggtactggttagttcatattgttgttccacctatagggttgcagatcccttttgctccttgggtactttctctagctcctctattgggagccctgggatccatccaatagctgactgtgagcatccacttctgtgtttgctaggccccggcatgtcaatattttttattaaacatttttaaagggtttcaagccagtgagatggttcaccaggtaaaaagtgtttactgtctaaacctgacggcctgagttaatacctggagccagtactgaaagaaaaaaactcaactcctaaatgtcatgtgatcaccatatataccccatggcacattcatgccttcgagcacacacacatacacacacacacacatacatgcacacacactacaattatatgataaatatggttgttgttatataagagctgagtatcatatctgtaaccccagagctgcagagggacagaggcagcgggatcgctagggttcattggccagccaccctagccctgtcaaggagctcctaattcaatgacagacttcaacttaaaatataaggtggagaataatgagggatgatagctgttgccctccattgaccttcaacttccacaagtgagtgctcactcaacctgcttgcttactccctccaccagaaaagggcttccctgttgtgctggcaacaggtcccagtagctaagcagagtgctactgatgctggcaaataatgctaattacaagggccacaaaaagttgtttatgcaccaggagccagtgctttgcatagtctacctcttttaatcctctaaacaatctcagaggtgccatgacatcacacccaaaggcccagtgacccgtgccttggaggcccttggtcacttgcctcagaccactccctagaagaagtgaggagctgagaattgaatactggtggtcacattcacatgcaaggtttctcacatggtttttgtctttattatctaatttgttggtattctttatttttctttgtttttagtttaatttgcttttcaatttttaggtttttttaaatatcttttttcttttgtttttaagattgttttttattttttattatatatatacatatatgtacatatgtatcatatatatgtgtgtgtgtgtgtgtgtgtgtgtgtgtgtgtattttataggcacatttcagcagcattacacactatttaagttttaaatctacttttaaaaaatagaatatgatgtgttataatgatgtctttgcacagacatagcatgtgcatggctaatattctctcctaaaattaccctgtatttctctctctctcttttatttgccctcaaaatagttccttctaattttatgtcttttatgtatatattttaatatctccattctacaaatgaaagaaaatcctcatagatatcatttggtttttggactctggcttggatctcataatacctgcagtcgcatccattttccttcagatgacaaaattttgtccactttataactgaataaaatatatgatatatcatatatcacatatataatacatgtagtatgtataatatgtatatatcccatataaaaacatgtgtgttttctaaaggaagttagcaacagaaagattatacctcaatatagtggaagcttcatgcagcagacttataatcatcattgagatttataaacatttctatttatataaagcacactttccttatccactcatcttttgatggacatctggcttgatggaacatcttgtgaatgctggtgtgatggacatggatgggaaggttctgtgggatacagatttatggtccccggggtgcatactcaagagtggtacaagtagatcacatggcgtttatcttctttttccatatgtgttctttcatccaactttatatatgcattacatgtgtgcagtacccatggaggccagaaaatgtcatcagaccacacattgatccatgttcccaccggcagtgtgactgccacagtgcacacagtgatccatgttcccaccagcagtgtgactgccacagtgcacacagtggtccatgttcccaccggcagtgtgactgccacagtgcacacagtggtccatgttcccaccagcagtgtgtgtgattcctttcctgcacttctttgccatcatttactgtcctttgccttgatgacagccactctggtggaaactcaatgtagttttaatttgcatttccctggtggctaatgacagtgactttcctatacttttgcccacttgtatgctgtcttctgaaacctgcttgttccatttatttgtccatttgatgactggatctttttttaagcaccatatagagcaagactgcagatggtagacactgctgtctcattcctaatgttggagtaagtcctttcagttttcactaatgtcctataatgtataatataataataatagtaaccatgtataatgtaggttataagtccattacatgaagtctccattgtgttgaggtatagtctttatggtttaactaactccctttaggaattttatgatgaagagatattgaactgtattagaggccttttctgcacttgctaagaaaatatgctttctggccctggccatttatatgctgttttttaattggattcttgcatgcctagaatggaatcaatttgattgtggtaagtgacctgtacgattttcttgtgtctttgtctggttttagtatcgggataaagctggcttattcaacgagctccttagcactccttctctttctgtttgattgagaagtttgaagtgcattgatggtatttcttctttagaggcactgtggaaatcaatggcttgttcttgtccttagctttcccttgctaaagaccctattcagcatccttgctcattatatagatcttgatttaattttgatagatcacgtgtggctggaaaattttatatatatatatatatatgtatatatgtatgtatgtatatatatatatatatatagttataaacacatacaatttctagaattttgagtggcttgtaaagggtttttaagtattctctaatgtttctctatattttacttgtatctattgtatttttcttccattcacctgcttgcttgtgtctctctgaaatcatcaatcattttgactcctaagcttttgagttctatttctggcattaagtatctttggtttcagttgctgagtagttgttggtttttggaggagtcacatcacattgtctgttcgtgtctcttatatttcaatgttgcaattggttcatgtgttggatgtttctcctagttttatatgtctcttagttgaggttttactgctatgaacagacaccagaactaaggcaagtcttataaaggaatacatttagttggggctggcttgcaggttcagaggttcagtccattatcatcaaggtgggaacatggcagcttccagtcaggcatggtgcaggtgcagctgagagttctacatcttcatctgaaggctgctaacagaatactgacttccaggcagccaggatgaggttcttaaagcccactcccacagtgacacgcctactccaacaaggccacacctactccaatggggccacacctactaatagtgccactccctgggctgagcatatataaacatcaaaatatgggaatcttctgctaattagcctctttttcttgagggctcaatcttcagtaatactcacagaggggaaaggtcataagagcaatgtcaccaagcccaacctgagatagaaatatattaaatctattaaaattggagattactttcatcatcagtgaccttaaaataaaataaaaataataatgttataaatgaaagtataatttagagtaaaaactaaaataatgactgcaataaatgaatgggaagacagacacaaaattaaatttttaaaaattaaattgaaaaatatttgaaattgagagaacgaatggccaaaggtggcataaatctgattgcacaataaaaatgaaatatattaaaaaatggttacagatgaataataggaaacaaaataaaagctttttaaaaaataaatttaaaagcacactaagcatacaataaaacaaacataaaggataaataagaaatttaaggggaatgtatggatcagttctttctgggtcctctaaaactgaagtttgctgggcagagggaacaacgggtttggagtttcttgtttttcccactgttgaggctggtccatctggatcagttgtcccctgagactacaggccccttaagaacctccttcttgtgcaccagcaccctctgctggccagccagggacttgctcgctctggagacttcccctattgtgaacttcattgtcaacttcatgtgattggttttgagttgcccaggagacacacctctgggcatgtcattgagggtacttccagatgtgcttaacttaggggacaaaatcctgagtgtgggtgacccgactgcgttgtgagaggccgtccaatggacccacactctccagctgagtcaaataaacccttcctcctccctgaagttgcttttagtcagatatttgatcatgatattgagaaccataccgatagaacctgttaacctgaaagtctgagtgtctctcaagtgtgattacaggaaggggaggaaacagcccccatccccatgggttcgcggtcctgcccagtactgagctcgctgtggtgtggggaagacatggaggcggagttctaccttaactgagcttcagaattttctgtcctgctgaagaccatgtggcagagaggcagctccagatcctgtagccaaccagagcacgcctccaggccctccatctccccaggtgatacagtttgctccttgccatataaggcagagccaccaaaccaccttgctgcttacaaccagagtcccccttaaggctggatttctcaacatgtccatgtcccaccttctccctctccacagacattttgtggggccatcttccacccagagactatatcaggctacccccaggttgtctaacttgttagttgtccttgtttttaggattccagagaagttcataaagttccccgtcaagatgtccgcgggataaagctcgctgaggtgtggaacgcgatgagaaggattgcttctcctaaactgacttggacataggaggcatgaagtcacactgaagcccccaactgggcttatctgaggctttttccagtacctcagactcccaattctctttgtactggggtctcctggcttgctgtgtgggcgtggcattagctttctttctttcaaaagggaactggtgttagtgggtaggctgcttccggtttctatagctggcttttgcttcacaaggctcttcagtttgtctagtcacatctttcgttgtgggagtcacatccttccctttgggaatagtctatcatagttatcttgattcttctcattcatgatgccacccaaaggcagcttctgatgtgccattatgcacacacacacacacacacacactatgtgtgtgtatacatatatgttcacatatgtacattagaaatatattcatatatcatatatactacatatatacattaccaatgtgtctatacactataatgctgtctccatatttctctcttcaaaatagcctttcatttcttctaagttactcatacaggttttcttaattttactaagtaactcaaagtttgttaacatctaaacaatgatgtgtttgctcttgcttttgctctgcagctgatctgtggtgtgtgagtcctagctacttgtactcagttgaatatcatatttgagctatatcccagcatgctatgtgtgnnnnnnnnnnnnnnnnnnnntgtaaagagtgccatagataccactacccttggcactgagggcagagtctcatcaactcccctttttgttttataagataagatttgagtgtgcggtgggcacgttccacaatgccttgtccttgagaattacaaggaaggccagtcaagtgagtgacatccatttgatgacaaaattgttgaaatttagtagaagtatatgctggcccattatccgttttaagaattgtgggcttgccccaagcactccacgcttctaggcagtgctgtataacatgagaggctttttcacctgttaaaggtgtggcaaacattacaccagagcaggtgtcaatagaaacatgtaaatattgatttctcccaaaggaggaaatatgagtgacatccatttgccagacctgcaatggcctgacgccacgagggtttactcctacatgaggagtaggtaaaaattgactactacctctgcacataaagcggaggtgcactaggaccctgaagctgacagtccggaggccgagcagcaagctggctttcgccagcagcttttggcctttttctggactgagtagcttacattttatcttgctggtacctttctcccttataacgaactgcttcctcctccgagtccatttcttcagaggcgctaactccttcatctggttctgagctactaagagttagctgcttaaattcacccagtggcgggtagaggctcctttccttatgtgcctctccagctcgatctcccttcttctctccctttccatccctttttctaatctctcccaaggcattctttcctttatatctcttttcctcgggctcaaggcccgtggaaaggcctaaattcttcagtgcactttgtttcctctctacttttactctctctccccgctctacctctgatagactttcttgaatttcgtccagaactttctgccctgcttctaccatttgctgacaatcctcataatcgccgtgcaaacaatcaaaagggcttctaactctggagaaatttcaagattgtacgtaccttgtagagccttttgtcccacggttctgattctgccccgcgaacgagggatcttaccttgcgccggtgtgatgacagttcccgggttcttcggcgccacttattgcgtcccgctcgaccggcaagaaagacgcaacaaaccagaatcttccgcggcaaaagctttattgcttgcttgtcaggaagatcccgaaccgggaaaatggcgctgcttttataacccgcagcatgnnnnnnnnnnnnnnnnnnnnttctttgaatctatgttctgggtgcacatacattcagactcggtacttctggcctgatggattgaccttccttctcattataaagtatcagtgattttcttgtgatctctgttttgaaagctcctttggtgatacattgtattaatatagccataatagctttcacctgcttgcttgtctgttactgcttttctcatccgtctgcctctacccgctctcctttctgatactcagaggtgtcggctgtaaatagtacatagttagttcttgtttctttatccagtttgcctttctaattctctcctcccaattaagaaggaaataatctgtaagcttatttcaataaaccctgctgggaagctcagatagagtaaacagccccaacattctctggttgataattggactttctgccttggattttctttcgacacctatttatatatattgcccaaatacagatgcatccttctagcattataatgtaacttttaaaaataagatttacttttaatttatgtatgtgtgtggtaagcatgtatgcttgtggacaggtggccacaggacaccagaagaaggtgtcagatctcctggtgtaggagttacagatagctgtgagccctctggtatggtgattgtgacccaaactcaggtcctctggaggagcagtccacactcttaaccactgagcaatccttccagcctttgaaatagcttttgactaaagccctaataactctatgtatcactttactaacctaatctatgtcttagagacccttcccatgataaatcttttattaatttgttatgtaatctgaggacattttctaccagtataaaccttagaaagtgtttttttttttccttttgattgccagtctagagatggagagtgtcattctttctagttctgcctgctataactctgttctaggcaagcacagagatgtcccattgttctgtacttgtatgtatccttattcttgggtatctatcctgattcatacacaccctaatgaaacatacaatgctttatatgcagtgatttaaaggcaaataatgccataatgggctgttcctatttttccatgctatgccctgttttgaaagtctgtttatgtggccctctagtgtgctgcttttaacagtgaaagttctctctccctctctctctttctctctctgtctctcttctcctcctcttcctnnnnnnnnnnnnnnnnnnnncttcttggcatcagcaatagtgtctgggtttggtttttgctgttgttgatgatgatttttgagattataatttaactaaaatgtttcttccatccctttcctccctccagtacacccttttccactctcctttaaactcatggcctcttctttcattaactgttgttgtatttgtatatgcataaatattcccaaatataacttcttaggtgcacataatatccattgttcatatgcttccagtgatgacctcttggcatggaaggaccggctggcacgctcttctctgggaaggaccacctctttcactgctagctttgctcaggagcctgtagctctgtgtgtagggttgagccctcacaggcctttgtccatccactttgacatgtttgttggtgtcatccttactcagcccctgcttaggcagccatgtggcaagacaataatgggtgtcacttctgacatccctaggagagacaatctcacagcaaactctctaatcctctggctcttatggtcttttccccttctcttccctagtgcttcctaaaccttacattttagagtattctctacatgaatccactggggatgtgctccacaaatctgcattttgattgcgtctgtattcccaaagtggtctccatctattgcaaaacaaccccaaaaaacaaacaaacaaacaaaaaactttctttaatgaaggctaaagactgtacttatatgtgagcttaagaatccatgtttataaatttttgttagatttttttttttttgagacaagatctccctatgtagtcctggctatcctggagttcacagtgtagaccaggctggccttgaacccacagagatcttcctgcctctccctcccaagtgttaggattgaagtgccaaagtacatataatttcttacactgccacactgtattccataatggctctagccacttccatccccacaagcagagaggagggtgatgtgtcctcaccctagacaacactggcttttggataagtgtcaatcaaaaaagtaagccataacaatctcttaattttgaaattcatgtttcctttttcatgtgtgcttctatagcactcctgatggagtcagcactagtctgccatacagttttcttcctagagctgtttatttttagctcttgtttataaagtaggttctacgggcccagctctgtccctttgtaaatgaatacctgtgttttcacagctccatcagttgaaaacattcttccttactctttgccttatcttgaaaataactgacttggtcaaaagaaaaaccaagcactaagtcatgcgtgtgcaggnnnnnnnnnnnnnnnnnnnnnnnnnnnnnnnnnnnnnnnnnnnnnnnnnnnnnnnnnnnnnnnnnnnnnnnnnnnnnnnnnnnnnnnnnnnnnnnnnnnnnnnnnnnnnnnnctccacatacacccacccccgccaaaatgtaaaaaaacaaaaatgtaaaaagcaacctcctacttattttgccttttttttctcaattatattcaggaccacatacctaaaataaaacatattcattttaaatgtactgcttgctgtattgttgcaaatctatgaatcactaatgatagtttatcatttgatcctctgcagttctcctgcttaaaatgttttatgtgctttttctccagaaatgtaaatttgttctagaacattgtgtaagtatgtaatggcatcatttgttccatttctttcctatatttcctataatatatacatacatatatgtgtgtgtatgtcatatatatatatatatatatatatatatatatatatatgcatgtatgtctgagattgatccatccgttcttgagataggggtgtgtgtgtgtgtgtgtgtgtgtgtgtgtgtgtgtgtgagagagagagagagagagagagagagagagagagagagagagagagagagaccttggttttatctgtttgctgtttcccagttggggctgtcatgaaaaaagctgctatggccatgacttaccaggtttgtaaccacgcatgcttttcacactttcctttcctagagacgagtcagagggccagtggattttttaagtcttcccacgttagtcttccttgtcagtatgcaatagtttggttgtggtttcagtttgtacttccacagttaactgatggcagcagcaagggtctcttaggtgggaattggttctttctgtgcttattcaaatctgtttcctcttgttgttgttgtttattttttgttttttgtttttgtttttgtttttgttttaacttgggtttgtttcctttaagcttgtgggaacttgttctgtagcccaggctcactttcaactttattttccctgcttcagacatctgagtacctgaatgcagtggttacagatgtgtcgcacaaggattagctaccggcttttaccaaagagaaactgagttgccgagctgtgtgagggctcctgagcgaagtgctttctgcataaatcttatgacctgatccatccttggctcccacacaaagcaacgactgccacagatttgacctatgacctccacaagtccatcccgatttgcannnnnnnnnnnnnnnnnnnnaaaatgggaatgggtggggggggagggggggacttttgggatagcattggaaatgtaattgaggaaaatacataataaaaaaaaagatttaaaaaaaaaggaaacaaacaaacaaacaaaagaaaaaaactcaaaggattgtaatttcaacatctattttcatttatcagtgatgttaatcatatccccttctcatatattcctcatgattcatattctggttaattttgaaccccgtggtcagcatccacctgaagatatccttcaggtaaaacctttagactgaggttgtggtgccttgagaagcaaatcacagggcagaggaccgttgccatgacactgtgtactttattgtcccactgttccacaattggtcgttaggtttcagttggtgtgggttcacttccagtttttatttggttgattgttgaatgtaccccttaccttctggcattccaagcagcaccaggctcatctagtgtagttcccactacaggcctggagtcagctgtgttctaggaatttgtggttccttctattttagaatagcatagaaactaccccgcctataagggcccatctcagcatatcctaccaacggcacatgagatgaatgtgatttatcaacgatgatgctgactttgatactctaaacaagataggacttagctccttcactgtagagataatgccctctcccctcttccatttggactctttggaaggacattattgggcacaacacacacataagaactagagagctatgatctacattcttacataaatccttatgtaaggttttactattcctctatttatcaggttaatgcagattcatagctgtttgttttacagcttcagttgtgatccgtttctctatgcatgctactgtagctttggctagtaagattttcagtgtgcctttcatgcccctactcacaggtaggagatttagcacttggtttgctttggtttctgagcacttccctgctttctagacttacaaaatatctcagagaaacctggcatgtttcttactgaggcctaaaaccagctatttatttacatcagtctggttccttttattggaagacagtataagaacaagatttgtgttctaattgtgctcaaagctaccagcatatcattgcttctaaaccnnnnnnnnnnnnnnnnnnnnnnnnnnnnnnnnnnnnnnnnnnnnnnnnnnnnnnnnnnnnnnnnnnnnnnnnnnnnnnnnnnnnnnnnnnnnnnnnnnnnnnnnnnnnnnnnnnnnnnnnnnnnnnnnnnnnnnnnnnnnnnnnnnnnnnnnnnnnnnnnnnnnnnnnnnnnnnnnnnnnnnnnnnnnnnnnnnnnnnnnnnnnnnnnnnnnnnnnnnnnnnnnnnnnnnnnnnnnnnnnnnnnnnnnnnnnnnnnnnnnnnnnnnnnnnnnnnnnnnnnnnnnnnnnnnnnnnnnnnnnnnnnnnnnnnnnnnnnnnnnnnnnnnnnnnnnnnnnnnnnnnnnnnnnnnnnnnnnnnnnnnnnnnnnnnnnnnnnnnnnnnnnnnnnnnnnnnnnnnnnnnnnnnnnnnnnnnnnnnnnnnnnnnnnnnnnnnnnnnnnnnnnnnnnnnnnnnnnnnnnnnnnnnnnnnnnnnnnnnnnnnnnntgattcgttctgtccttgcttaagttcagctcttgctgatgcctttgaagaagtcatttcagtccatgggatcaggccagacattcttcaatattccctcataacaccattccctttataaccttaaccagaaaaatacatacatgactaattttgcaaagggatcatataattgctttctctctcttaggacactggctttgtgaagaccttacatcccttgctcagagctaagcatgcattatgtacacatgtggtaaacattaaagaggtgttgaagtcatagacttgttcttctgcccagtgagacaggaaaaaggctgagaatgccatcttaaggccatttctgctttctggcatttttagatcctcaaaataatttgcttatgcatctccaaagttcacaaagtagaaatggcactatatggaagttaaaaataggcacacacatacacaaagagtcataaagtcattcagaggacaagattccatgtgggatgaatagcactgagataagcaacaactagattaaatgttccagtccctgagtgtgcctgtgttagccattgggagggaccaaaatgtcacattttaaagcttcagaaagatatatgtctcatgatacaggagttggatattggtaagagccaggcatcatggagtgtatgggtggtgcctttctccttccctagaggagatgctgatgtaataaaaagtgtcactggattttgttttgttttgttttggtttggtttggttggttggttggttggtttacattccatttgcctagaatttgtttttatattattatattaagttatattacattatattatgtactcagattcctgttgacagaaaaggaggtagattcagatggaaagggagatcaggaggaagtaggagatgtagagagaaaagtgtcactaaattttgttttgttttgttttggttggtttgttggtttacattccatttacctgtaatcaaaagaaaactgtaataaaaaaaactgtaatcaaaaaacccagatgtccctcaacagaggaatggatacagaaaatgtggtacatttacacaatgaagtactactcagctattgaaaacaatgaatttagctaggcatggtggcacacgcctttaatcccagcacttgggaggcagaggcaggtggatttctgagtttgaagccagcctggtctacagagtgagttccaggacagccagggcgacacagagaaaccctgtctcaaaaaaaaaatgaatttatgaaattcttgggcaaatggatgtatctggaagatatcatcctgagtgaggtaacccaatcacaaaagaagtcgcttgatatgcactcactgatacgtggatattagcccagaaacttagaatacccaagatacaatttgcaaaacacaagaaaatcaagaagaaggaagaccaacgtgtggatacttcattcctccttagaatagggaacaaaatacccatggaaggagttacagagacaaagttcggagctgaaatggaaggatggaccatccagagactgccccacccaaggattcatcccataaacaaccaccaaatccagacactattgcatgtgccagcaagattttgctgacaggaccctgatacagctatctcttgtgaggctctgccagtgcctggcaaatacagaagtggatgctcacagtcatctattgaatggaacacggggtcaccaatggaggagctagagaaagtacccaaggagctgaaggggtctgcaaccctataggaggaacaacaatatgaactaaccagtacccccagagctcgtgtctctagctgcatgtgtagcagaagatggcctagttgaccatcattgggaagagagaccccttagtcttgcaaactttatatgccccagtacaggggaacgccagggccaagaagtgagagtgggtgggtcggggagcagggcggagggagggtaaagggaaattttgggatagcatttgaaatgtaaatgaaaaaactatctaataaaaaattttaaaaagaaactgtaatcagaacatattgtatgaaaaattattttcaataaaagaaaaattaaaaattaataaaaatgaaggttatattcatgtaacctttcttatagtaaattgttacaattgcttagggaaaaaaaatctgaggcaatggcaattgtatcttgtttgtcttttgtagccattgagggtgggggaactactctgaacatacatttagctgtttagcattgctctttagaccttgaccatttaattgaaagctttggcaggaggattagctgacagagtaatacattggtattgaggaaataggaagagtgagcctttgggggccaggcctgttcatattaaaactcctcccctgcaagctttgcctcccgtttatactgggactcaaaccaggtgcctgaaggagtgactgttatgtaaatgctattttgcattaggaaagtaacaaagctttaaaacatggaggatattttagttattagagggtactacttgcggtagtaacagttttgctactaaggttactgtaacattttcccccttctgagccaagtgcagccagagaatccttaaggaacgtaggctgagtgaaaggacacagaacaaaggttagatcccaggagggaatgaagaagccccacaatagctgtgctattttcctttgaaatgtcctgtgctctttagaggacagtggtcctgtatgcagggactgcgtatctgattctgtgacagtgccttcgccatttcatctcaaggcaccgcccgaatgccagggcttctggacacactcagcacttttnnnnnnnnnnnnnnnnnnnnagatctgcaaccctatcggtggaacaacattatgaactaaccagtaccccagagctcttgactctagctgtatatgtatcaaaagatggcctagtcggccatcactggaaagagaggcccattggtcaggcaaactttatatgccccagtacaggggaacgccagggccaaaaaatgggaatgggtgggtaggggagtggggggggggggcttttgggatagcattggaaatgtaattgaggaaaatatgtaataaaaaaagattaaaaaaaagaaaacaaacaaacaaaagaaaaaaaactcaaaggattgaaatttcaacatctattttcatttatcagtgatgttaatcatatccccttcccatatattcctcatgattcatattctgattaattttgaaccccgtggtcagcatccacctgaagatatccttcgggtaaaacctttagattgaggttgtggtgccttgagaagcaaatcacagggaagaggaccattgccatgacactgtgtactttattgtcccactgttccacaattggtcgttaggtttcagttggtgtgggttcacttccagtttttatttggttgattgttgaatgtcccccttaccttctggcattccaagcagcaccaggctcatctagtgtagttcccactacaggcctggagtcagctgtgttctaggaatttgtggttccttctattttagaatagcatagaaactaccccacctataagggcccatctcagcatatcctaccaacggcacatgagatgaaggtgatttatcaacgatgatgctgactttgatactctagacaagataggacttagctccttcactgtagagataatgccctctcccctcttccatttggactgtttggaaggacattattgggcacagcacacacataagaagtagagagctatgatctacgttcttacataaatccttatgtaagattttactattcctctatttatcaggttaatgcagattcatagctgtttgttttacagcttcagttgtgatccatttctctatgcatgctactgtagctttggctagtaagattttcagtgtgccttttatgcccctactcacaggtaggagatttagcacttggtttgctttggtttctgagcacttccctgctttctagacttacaaaatatctcagagaaacctggcatatttcttactgaggcctaaaaccagctatttatttacatcagtctggttccttttattggaagacagtataagaacaagatttgtgttctaattgtgctcaaagctaccagcatatcattgcttctaaacccttcacttccagcacaagaaaatatgtgtgtactcactggtgtacatctgtgtctatcaccatcttcctataaccatgtcatccgcatcaaactacacaatgttcaaaatgaagttggctgctctcctccattacaggtgaaacattcgagcctctattttaaattatcactccagggactgaagtccctagtgccaatatctgcgatcaatcattcatgaaaagtggaaacacggtggtgagatgtccctttcagaattcctaccataggcttagtgattcgttctgtccttgcttaaggttcagctcttgctgatgcctttgaagaagtcatttcagtccatggatcaggccagacattcttcaatattccctcataacaccattccctttataaccttaaccagaaaaatacatacatgactaattttgcaaaggatcatataattgctttctctctcttaggacactggctttgtgaagaccttacatcccttgctcagagctaagcatgcattatgtacacatgtggtaaacattaaagaggtgttgaagtcatagacttgttcttctgcccagtgagacaggaaaaaggctgagaatgccatcttaaggccatttctgctttctggcatttttagatcctcaaaataatttgcttatgcatctccaaagttcacaaagtagaaatggcactatatggaagttaaaaataggcacacacatacacaaagagtcataaagtcaatcagaggacaagattccatgtgggatgaatagcactgagataaggaacaactagattaaatgttccagttcctgagtgtgcctgtattagctattgccttgggagggaccaaaatgtcacagtttaaagcttcagaaagatagatgtctcatgatacaggagttggatattggtaagagccaggcatcatggagtgtatgggtggtgccttcctccttccctagaggagatgctgatgtaataaaaagtgtcactggattttggtttggtttggtttgttttggttggttggttggttggtttacattccatttgcctagaatttgttttatattattatattaagttatattacattatattatgtactcagattcctgttgacagaaaaggaggtagattcagatggaaagggagatcagaaggaagtaggagatgtagagagaaaagcgtcactaaattttgttttggtttggtttggtttggttggttggttggttggttggttggttggttggttgaaaaaagatttcagagcaaggaaacaatgttaaaacttgcaagaggaaaatgacaactcacaagggcaaattctttttgcctcagagcagaaaccctaactgctacagaagcatgtaaggatnnnnnnnnnnnnnnnnnnnnnnnnnnnnnnnnnnnnnnnnnnnnnnnnnnnnnnnnnnnnnnnnnnnnnnnnnnnnnnnnnnnnnnnnnnnnnnnnnnnnnnnnnnnnnnnnnnnnnnnnnnnnnnnnnnnnnnnnnnnnnnnnnnnnnnnnnnnnnnnnnnnnnnnnnnnnnnnnnnnnnnnnnnnnnnnnnnnnnnnnnnnnnnnnnnnnnnnnnnnnnnnnnnnnnnnnnnnnnnnnnnnnnnnnnnnnnnnnnnnnnnnnnnnnnnnnnnnnnnnnnnnnnnnnnnnnnnnnnnnnnnnnnnnnnnnnnnnnnnnnnnnnnnnnnnnnnnnnnnnnnnnnnnnnnnnnnnnnnnnnnnnnnnnnnnnnnnnnnnnnnnnnnnnnnnnnnnnnnnnnnnnnnnnnnnnnnnnnnnnnnnnnnnnnnnnnnnnnnnnnnnnnnnnnnnnnnnnnnnnnnnnnnnnnnnnnnnnnnnnnnnnnnnnnnnnnnnnnnnnnnnnnnnnnnnnnnnnnnnnnnnnnnnnnnnnnnnnnnnnnnnnnnnnnnnnnnnnnnnnnnnnnnnnnnnnnnnnnnnnnnnnnnnnnnnnnnnnnnnnnnnnnnnnnnnnnnnnnnnnnnnnnnnnnnnnnnnnnnnnnnnnnnnnnnnnnnnnnnnnnnnnnnnnnnnnnnnnnnnnnnnnnnnnnnnnnnnnnnnnnnnnnnnnnnnnnnnnnnnnnnnnnnnnnnnnnnnnnnnnnnnnnnnnnnnnnnnnnnnnnnnnnnnnnnnnnnnnnnnnnnnnnnnnnnnnnnnnnnnnnnnnnnnnnnnnnnnnnnnnnnnnnnnnnnnnnnnnnnnnnnnnnnnnnnnnnnnnnnnnnnnnnnnnnnnnnnnnnnnnnnnnnnnnnnnnnnnnnnnnnnnnnnnnnnnnnnnnnnnnnnnnnnnnnnnnnnnnnnnnnnnnnnnnnnnnnnnnnnnnnnnnnnnnnnnnnnnnnnnnnnnnnnnnnnnnnnnnnnnnnnnnnnnnnnnnnnnnnnnnnnnnnnnnnnnnnnnnnnnnnnnnnnnnnnnnnnnnnnnnnnnnnnnnnnnnnnnnnnnnnnnnnnnnnnnnnnnnnnnnnnnnnnnnnnnnnnnnnnnnnnnnnnnnnnnnnnnnnnnnnnnnnnnnnnnnnnnnnnnnnnnnnnnnnnnnnnnnnnnnnnnnnnnnnnnnnnnnnnnnnnnnnnnnnnnnnnnnnnnnnnnnnnnnnnnnnnnnnnnnnnnnnnnnnnnnnnnnnnnnnnnnnnnnnnnnnnnnnnnnnnnnnnnnnnnnnnnnnnnnnnnnnnnnnnnnnnnnnnnnnnnnnnnnnnnnnnnnnnnnnnnnnnnnnnnnnnnnnnnnnnnnnnnnnnnnnnnnnnnnnnnnnnnnnnnnnnnnnnnnnnnnnnnnnnnnnnnnnnnnnnnnnnnnnnnnnnnnnnnnnnnnnnnnnnnnnnnnnnnnnnnnnnnnnnnnnnnnnnnnnnnnnnnnnnnnnnnnnnnnnnnnnnnnnnnnnnnnnnnnnnnnnnnnnnnnnnnnnnnnnnnnnnnnnnnnnnnnnnnnnnnnnnnnnnnnnnnnnnnnnnnnnnnnnnnnnnnnnnnnnnnnnnnnnnnnnnnnnnnnnnnnnnnnnnnnnnnnnnnnnnnnnnnnnnnnnnnnnnnnnnnnnnnnnnnnnnnnnnnnnnnnnnnnnnnnnnnnnnnnnnnnnnnnnnnnnnnnnnnnnnnnnnnnnnnnnnnnnnnnnnnnnnnnnnnnnnnnnnnnnnnnnnnnnnnnnnnnnnnnnnnnnnnnnnnnnnnnnnnnnnnnnnnnnnnnnnnnnnnnnnnnnnnnnnnnnnnnnnnnnnnnnnnnnnnnnnnnnnnnnnnnnnnnnnnnnnnnnnnnnnnnnnnnnnnnnnnnnnnnnnnnnnnnnnnnnnnnnnnnnnnnnnnnnnnnnnnnnnnnnnnnnnnnnnnnnnnnnnnnnnnnnnnnnnnnnnnnnnnnnnnnnnnnnnnnnnnnnnnnnnnnnnnnnnnnnnnnnnnnnnnnnnnnnnnnnnnnnnnnnnnnnnnnnnnnnnnnnnnnnnnnnnnnnnnnnnnnnnnnnnnnnnnnnnnnnnnnnnnnnnnnnnnnnnnnnnnnnnnnnnnnnnnnnnnnnnnnnnnnnnnnnnnnnnnnnnnnnnnnnnnnnnnnnnnnnnnnnnnnnnnnnnnnnnnnnnnnnnnnnnnnnnnnnnnnnnnnnnnnnnnnnnnnnnnnnnnnnnnnnnnnnnnnnnnnnnnnnnnnnnnnnnnnnnnnnnnnnnnnnnnnnnnnnnnnnnnnnnnnnnnnnnnnnnnnnnnnnnnnnnnnnnnnnnnnnnnnnnnnnnnnnnnnnnnnnnnnnnnnnnnnnnnnnnnnnnnnnnnnnnnnnnnnnnnnnnnnnnnnnnnnnnnnnnnnnnnnnnnnnnnnnnnnnnnnnnnnnnnnnnnnnnnnnnnnnnnnnnnnnnnnnnnnnnnnnnnnnnnnnnnnnnnnnnnnnnnnnnnnnnnnnnnnnnnnnnnnnnnnnnnnnnnnnagagggagagggagagggagagggagagggagagagagagagagagagagagagagagagagagagagagagaaagggaatggtagcagaacacacaggtctacacttggtgtcttaaagatataaaccattctgataatgaaaaataacacatacgtaccaaattgaactgagctctctgtgtatttgaaagaggaggatatatttgacctgtctcaagtacgtaaggaggaagcgcttggacatgcagtgaattggggtaagggctatattgtgaaaaccttggtaattgctctctgtgtttatttgtttgattgtttgtttaaaggtgcagctctcaccaaactggtgtgtcagttctatactgaacagtcaatgctaaagttgacagaatgtgaacttcacatagaaatgcaaaggacacagaacagtggaaaaacttcagaagtgaaagaagctgtcagaggactgccaccacatggccagggattcacagagctgtgacagaactccaaatgtctggccccaaagttaatacatgtacagacaatagatccaagtagacgttctagaaggaaacccactcagatgtgcacaaccaactgtttttagcaaaggttcaaaagtgcttcagttgtaccaggtacatttatagcatatagatgtctatagacaacagaaaagaaatgaaaagcctaataaggcatattaaatcagctgtacagatactctgacctgtatacaggtcggaagtggactctagcctatatgtgtgattactcctgctgcagcaacttagaactcagtagacctttaaaaaaatcatcatgaaagttgatatgaactagcacagggtaattgtaaatgatttagtataaaagtaacagaaactattaaaatagtcatttcccactcgagggaaaataacatactaaaacttcctttgcctgggatgcttcccacccttaaatccttttagaacaaggtgggttgtgaacaatgagtagagttggaatgatggaagatctaattacttcacgctcagggcacgacttgcatccccatcgcgtttgaaaaatcctccaggcaacccacttctcttcctttcataaaattatttctcagtttacaatcatttttattgtcacttttgataagttctttaaaattagcatgcattaataatgagggtcataatgacactgtcaatcatgtgtgtctttgtacttcactcctagtcacagctcattatcttcccttgtttgccacaccctcccactgttgcccatgtgtccctgttctttcttgtcctgtcatccatatgtgtatgtatgtagaaagatagataggtggatgataaatagatagatagatagatagatagatagatagatagatagatagatagatagatagatagatagagcaagctatacacatacatgtatacacatatatgtatgtatgtatgtatgtatgtattttgtggggcatttagttatgtatctacattaagttactttgcccattgcttacatagaatataaggcaaaggcaacctaagacagcaagggtttgttatggtttctggggacaatagaacaaagcagggacatcatggtagcaagagcttgaggcagccgatcacactgcatcctctctcggggaggagaaggaaatgaacacttggttcagctgattttctccttttctctggagtccttccctacagcacaggggaggcactgcctacattggagtggatctttccacttcaatagttcttgccaaagtaaccccataaatgtgttttaaaggcaacactgacgaagaactacttaataggtttgtttccttggcagctctagataaagggtcctcagccttcctaatggtgagaccctttaatacagcccctcatggtgcagtgcccccccaaccataaaattatttcattgctacttcaaagctgtaatcttgctattgttatgaattgtaaagtaaatatcggataggcggggtatctaacatatgacccctgtaaaggggtctttcaactcctcaaaggggtcatgacctttggttgagaaccactgtcctacatcctgtcatatgaacagtcaggtgattttgcaaatactgtcattgtaaagcaagagtttgttatgtcttctagttttctataacttccccagatagtctatggacccctcccctgaacacatcttctaactcctgctttttcacagcctatacagggacatttacagtctttacaattgttctctatacatgtgtttttagtacaccttttaaatccagagttcacttatgagaaaaaataaataaataaaaccatgccatttgtagttctgagtctggctgattgaacttgacaaaatgatctttggtttcacctattttcctgtgaatggcatacaagttgtgttcttgatacttcacatttctttatcaattcatctgctgatacacatctggacagacagcatacgtgagtagtgctacagtaggtgtggtcgggcaagtatgtaagcgatgccagtcccttcagctatatgcccagggactgtatatctaggtcaaagggtagatacatctttaatgtttttgaagaatcttcattctgatttctccagtgtcttgactgatttaaattctgagcaatagtatatgagggtttcctttgtccccacccacattcttgctaacatttccccattgtttgtagtcattgtaactattgtgagatgtaatctcagtgttgatttttaattttatttatttattttgagaaattgtcatctttacagttcctcattacatttttaacagtagattaacaatgtaagctttcaaaatgtattatatgacattgtccaaccattaactgccttttaaaatgtttatttactttcatgtgcattgtgttttgcgtggatgtgtgtctgtgtgagggagccagatcccctagaagtggagctgccatgtcggtcctgagaattgaagctggatcttctggaagagcagccagtgttcataactgctgagccatctcttggtattcatgccaataccatgacatctttgtctctgtattataatttgatatctgatattatgatatcgaccatgtttttccttctgattaggcttgctttcactatccttcttctgcatttccctatgaattttaggattgggtaatttggttagttggttgggttggtttcgttttttgtttttgtttttgttttctctattcttatagagaatgtgtggccttagctagtctgaaacccattctgtaaaccatattgccctcttacgcacagagatccaccagtatctgccccccattcgctgggatctaagcctacaccaccatgcctggcttgcagtggagttctgacttttcatttccccctggctaaggatgttaaatatttttctcatgtattagttgtttctgcttttgagaatttccagttctattcgttttcccacttattgattggatgaattgttttggtgcttaatttttttaggcctttacagatattaatcccttcacagatttacagttgacaaagatttttctcccattccgtaggctttctcttagttctactggaagtagtgtctttccagtacagaagtttttaatttcatcagatccagtttgtcaatccttgccactatttcctgagtgtctagagtccttctcagaaactctttgcctgtgcctatattgtgaagtgttttccctaaattctaatctaacagttctgatgtttcattttcttgtattaacggctttggcctgttttgaccttcagtgcagggcagatgtagacttggtgtcattcttctgcatgtccatatccagcaccgagtctttcttaatgaatttttattatttttcagttatgtatatgtatgggggaggggcagtaggatacacatgtgaatgtggttgcccagggaggcccagagatgtggaatctccttgaaggtgaagtcacatgcagttgtgattccactcctaacccctgagacatctctctaaccccatttcttgaagtaacacctctctattttaatgtactttccatctttgtcaaatgtcggtggctgaggcttggtgaaatttcttctgggtactttttccatttgtccacatgcttcaccttggtaccaataccctgccatccttgtctctctgcattataatttgaggtcaggtattatgacgctgaccacatctttccttctggttagactgcttccactatccagagttttctgtgcttccctgtgaacttttgttttctcttctctgttcctatgaataatatttttggatgggacttgtgttgggtctgtagattgcttttctgacatacagctgttgtcatgatgctaactctaccaatctgtgagcattgagagtctttacctctctccaagttcttccttcataatcttagagttttcattacacaggcttcacctgatagacctactctttaattatttttttaggttactgtggtgtcttagttaggtttttattgctgtgaacagacactgtgaccaaagcaactcttataaagaacaacatttgattggagctggcttacaggttctgagagccagtccattatcaatcaatgcaagagcatggccgcatccaggcaggcatggctcaggaggagctgagaattcttgatctaaaaccagacagaagactgacaaggctcatcccacagtaacacagttcctccaacaaggacacacctcctaatagtgccactccctgttggccaagaattcaaacactcgagtctatgggggttaaacctattcaaacagctatagtgagagtgattgtgtcctaatttctttctgagcaagttcattatttctatatagaaaagctactaatttttctgttgatttttgtgctgggtagttttatgtcaaattgacacaagctaaagttgtctgagaagagggaatcaaaagtaagaaaatgcttccataagatggggctgaaggcgagcttccagggcatcatcatcattattattattattattattattattattattattattattcccaagctataggtcccttgttgcttgctgtttgtcatggccattcacttctggtcaatggtggttccttcctcctctgtcttcctctcctctttttttctcaaacttccagttccaccttttccctccactgcccaatcacagtctctatccttttattgaccagttagattgggaataaggttcacatggcattactttatgcgatctgctcatggggcaaccacatcttaaggaaccagtatttagcattagaatacaagccgcaacagaacaacccactacaggtatccctagctggtggcactctttgggaaaatttaaaaactttaggaggtggatcctaactgtaagtttttaggaactcccttgaggttttactacccagccttacttcctgctcaagtctgcacacgatgtgactgaccaacctcctggtcgtccaccaggcctcccctgcctgatgtcatttattttttctgttatgatggattctaactttctggaactgtaagccaagataaaagtaagccctttctctcttaagtcacttttgtcagtatattttatcatagacatgataaaggaactagattatgttatgaatgaaacaatgtggtgttttatagaatgtttcatagaatgctgagaggaacatctagtgtgcacaccaacagaatatctgatccatttgatctagggtataattaactctaaagttggctgttttctgaatgacctatttggtgatagttactgaatcagtgattattatgtctggccccttatgtgtaatagtacttgtgttgcagaattggatgtcagtggttgatacttgtatttgtaattgttatatattttatgggttattctttctttgtctcctctgaccaatttttccttctagtctacttctttgatatattgtatggcttggttttaattgtcacctttcagcttgtcttgtttccctttgtttggagtataattttccaaccttttgctttcagtttatcattatcaatgagacagtttttgggctttgttgttgttgttgttggtggtggtggtggtagtagtggttggttggttggtttggcttggtttttgttttgttttgatttttgttagtttgctttgattggttggctggttggttttggttttggttttggtttttggttttttttcaactagccaatcttcatctcttagggggaaatgttaaatgcatttacattaagctactatcatttactgatttgtgtaataatgcttttaagttggttcaaatataattcctttactttcccatatccatcataaatttttatgaagtttatgaaagaatgattaatttctcctgggttttcatttgtttctcatattgttctcatgaaatttattataacacaagctcttgttagtgtttcttttctctctgcatataattcccttaagtttattctggagtatgtcgtcaccttaggttgtttatttgtgcttatcttagaaggtctttatttcctcatcacttttgaaagataactttgctgggtataaaaatcttagttgtcagggctgtttattttcaagacttgaagtacatccttacatgcttctgtagcagttagggtttctgctctgaggcaaaaagaatttgcccttgtgagttgtcattttcctcttgcaagttttaacattgtttccttgctctgaaatcttttttttttttatttagacagttctcactatgttaccctggttaacctggaactctttacttagaccaggcttgccttgaatactgagatctgtctgcctctgcctcccagccaaggtatgtgtctatagaaatgaaaagtttggagaaagtcattctgaatgacatcacttactaaatcatgaagtttcctagggaataaaatgactcactttaaaaaacaaaacaaaacagggagttaattctttcttaaatagattcaatctggagacaaatgagaagcatttgataattacaggttggcttcaaataagtgatattggggcactgacacctagtttctttctttctttctttcttcctttctttctttctttctttctttcttccttccttcctttgtttctctctttctttttttctttcttcctaaagacagggtctatggagctctggctatatagacctggcctcaaatatagagagatccacctgcctctgcctctcaagtgctaggactaaaggcatgcactactatgcctttgtttctctttaagtcttgggccatctgcatgaacagtgaggctaaagacactgagaaagtcaaaatgacagtgaactggggacaggggggtgggcagggagtggatattccctttggaaaccttaaaattttgaaaccatagtaacttcattgtttacatggatcactacatattaataaaagttactctcatctcttttcccttttgtagatgaggaccactcgcaaggtttctgtctggcctgtgggactagttggtgggcgacgctatgaacgtccgttggtaaaaaatggcaaagttgttggctggtacaccggatggagagaagacaggccttttgccattgacatggctggtgagcagaatgcatgggacatttgtccctgtaggatggggcctagaagaaactgggaaagaccaattttcataaaacccttaagtgtacttcattcatcagaggaaatattaatattcaaaatagattctttgatggttcaagttgaagttgattttagaagtggttagaaaatactctctatacttttgtctaacaaagtttatacatcagtattgggttgggcatatggggtttagagataatggaaccatagctcccacctctgtgtagtctattagctaaaaccttttggtgcctctgtctaggaagctgataaattaaatatgtcatgtctagtgacaaatttggtaataaattaaacttgacaagtcattttaatgtttattgataaatttagtggtctactaatatatttaaaagctaaaacataaaattgggttctggttttccatatatccattattttttgaagagaactatcttttaaagttttcatttcctgaccaaccaactgaattgaattagacccatgtggaccacaaagttttcaaacgctgctttgtcaagaagagattcattttctgtgggctctagaaagtgatgcttttgattgctgtggaaggatgggatgtggaacctgagggttagagggaagatgatcgctaccatctataactgacaaggtgaagagaaagcttttagaatctattgcatccatcaccagcactgtcttgtcagcttgggctctctcacttctttcatgtgtatttctcaaccacagtcagagactctctgctctgatggtaagaatactatgctctaaactggactcgccacccttattctgaaactataaatcttgaggcaataagattgtaaaaaataggaacaaagtatccacaatttggtcttccttcttcttgagtttcatgtgttttgcaaattgtatcctgggtattctaagtttctgagctaatatccacttatcagtgagtgcataccatgtgtgttcttttgtgattgtgttacctcactcaggatgatatcttccaaatacatccatttgcctaagaatttcaaaaattcattgtttttaattgctgagtagtactccattgtgtaaatgtaccacattttctgaattcattcctctgttgagggacatctgggttttccagcttctggctattataaataagactgttatgagcatagtggaacatgtgttcttattacaagttggaacatcttctggtatatgcccaggagaggtattgctggatcctcctgtagtactatgtccagttttctgaggaaccagcagactgatttctagagtggttgtataagcttgcaatcccaccagcaatggaggagtgttcctcttctccacatccctgccagcatctactgtcatctgaatttttgatcttagctattctgactggtgtaaggtggaaactcagggttgttttgatttgcatttccctgctgattaaggatgttgaacatttttttcaggtgtttctcggcccttcggtattcctcagttgagaattctttgtttagctctgtaccccatttttaatagggttatttgattttctgaagtccagcttcttgagttctttgtatatattgaatattagtcccttatctgatttaggattggtaaagatcctttcccaatctgttggtggcctttttgtcttattgatggtgtcttttgccttacagaagctttgcaattttatgcggtcccatttgttgattctcgatcttacagcataagccattgctgttctgttcagaagtttttcccctgtgcccatatattagtgtggatacttctgttccttcttagaatggggaacaaaatacccatggaaggagttacagagacaaaattcggagctgagatggaaggcaggaccatccagagactgccccacccaaggattcatcccataaacaaccaccaaacccagacactattgcatgtgccagcaagattttgctgacaggaccctgatacagctatctcttgtgaggctctgccagtgcctggcaaatacagaagtggatgctcacagtcatctattggatggaacacagggccccaatgaaggagctagagaaagtacccaaggagctaaaggggtctgcaaccctgtaggaggaacaacaatatgaactaaccagtaccccccagaacttgcgtctctaggtgcatatgtagcagagggtgagctagtcggccatcaataggaggataggcccttggtcttgcaaagattatatgccccagtacaggggattgccaggccaggaagtgggagtgggtgggttggggagcaggatgggggagggtataggggacttttgggataacagttgaaatgtaaatgaagaaaatatctaataaaaaatctgaaaaaaaaagattgtaaagaataatagaagttgagaatgaaacacacaaccatggtgtatctatcgcaatgaatcatgggaaaaaacaaatgagttttgagcctcattttacagactacaaaagaacataaacttgaggatatttgccatggtctctggaaccttggctagtctagatctcttgttcctgcctcatggcccaaatccactgtccatatttttaggttttagtttttaaagccccagagctgtgcaccacctcatttagctggagcggctaagaggtaggttcactccatgcatgggagaacccattggttcttttttttttttttttaataaaaatgttgagaactccatctatttcattctcaagcttcctttgccccctccagctcctccagtggcccccaattcctgacctcttctctaattattactcatacatgtatatacatgtgtgtgtgtgtgtgtgtgtgtgtacatgtatatataacctactgaatgcatttagcattgctcatatgtacatgtgtcctaggctgagcagcttctccatacagtaatctaattctccctctcagcagccaatgattacctgtgggtggggccacatgcaattctttgtccacattggctcgtcaatgatgttgctcctacgttggccttgtttagtcaactatgctgttgagagttcatgggcacacttcccctgtcatgtctagggaacactaatgctcttttcacctcctcttctgtgatttctcttaggtgtagcgttgcactgcagttgtatcatttagggttaggcatcccatagtcagttattgatcctaggggttatccatgtctcatccatggctctgaaaattcaagcctaaaacatcatgagtgttagaaaaactaaacatcttttttgactatgatgtaagctagagcagtcaacttggagaaaccagggaaagtccctccatttctctgggatgcagtgtcctcctgtggtgagaaagggggctacatgagagtcccactgcctgcctgctcctagtgccacaccttggtaaacacagagagaggcttacatgctggacagccaagtgacaattcaccaccattgggagagaagccagctgacacacgttcgtttggtcctgaacatccatggatcttgtttcatgaccattcccagacagcttccaggatgcacactaccttacatgagcagtttggtgagggcagcttggataatttctagcattcgtttccaaattgatatttctgaaatacaaggaagacatgcaggcttattcactggggactttcattgtaagacctgagagatattgtcactactaaaattctatgaaaatctcttccccgtgacaggactactgtttggacttttctgcccatttcagtacatttctaaaccacgatgaagcatgcatatcataaatttgtctgatctaactgttgtcttggaattcttacttacaataagtataccatgtcaccttcaagaaaacttcactccccacttaaatttgctatgtatcttagttttcaataaattattgatatttctggaagcctaaaaatgtgggtaatctggttggcaagataacgagtctgggtttgaagaactctgctctcattctgaaactttaaaatgctcatcttagtttagactttacttgtgcagtctccatagaaatggggagaagtggacatatacccaaaagatttttcaacatatatcaaggacacatgctccattaggttcataacagccttatttataatagccagaagctagaaagaactcagatgtccctcaacagaggaatggatatagaaaatgtggtacatttacacaatggagtactactcaactattaaaaatgatgaattcatgaaattcttaggcaaatggatggaactagaaaatatcatcctgagtgaagtaacccaatcacaaaagaacacacatggtggtatgcactcactgttaagtggatatttgcccaaaagctccaaatacccaagatacaattcacagaccatgtgatggtttgtatatccttggaccagggagtggcaccatctgaaggtgtggccttgttggaataggtgtgacctggttggaatgagtgtgtcactgtggttgtgggtataagatcctcaccctagtttcctggaagtcagtcttccactaggagcctttggatgaagacatagaactctcagctcctcctgcaccatgcctgcctggatactgccatgcatccaccttgatgataatggactgaacctctgaatctgtaagccagccccaattaaatgttgttttattaagacttgccttggtcatggtgtctgttcacagcagcaaaaccctaactaatacagaccataagaagctcaagaagaaggaagaccaaagtatgggtgcttcagtctttcttagaaagggaaacaaaatactcatgggagcaaatatggaggaaaagtataggacagagactgaaagaaaggccatccagagactgtcccacctggcgattcatcccagataccaaacccctacactgttgtggatgtcaagaaatgcttgctgacaggagcctgatatagctgtctccttagaggttctgccaaagccttacaaatacagaggcggattcccacagccatccattggactgagcatggggtccccagtggaggagttagagaaaggactgaaggagctgaaaaggtttgcaaccccataggaagaacaacaatatcaaccaagcagaccccccagagctcccagggattaggccaccaaccaaggaatacacatggctccagctgcatatgtagcagaggatggccttgtcaggcatcaatggaaggagaggtccttggtcctatgaaagctcaatagatgccccaatgtaggggaattgagggtgaggagacagaggtgggtggtgggtggaggaacaccctcatagaagcagggggaggggataggaagtttctgggaggggggaaactgggaaagaagataacatttgaaatgtaaataaagaaattatccaacaaaaaaaaatggtgaaaaaaaaaaagaaacagggagaagagctctcaggtccttaggcccatgaattaggtactttcttcctcattttcatgttagtatggagagggaggggagaaggaaagggaaggggagagtgaatgagtgaatgaatgaatgaatgaatgaatgaatgaatgaatgaatatgagaatgaatgaatgaatgaatgaatatgagaatgaatgaatggctatggatgaataagtgtgcgtgaatgataatctctaaagtgggagaaggaagccagaagctgcatcctgcagagaaaatggtgttcagtggctccgtggcagttgtttatgacaatgttttgcacttcgggtatctctagtatttatcaggctgactgagaagccatatagcgtggaatcactgtggactatattgcttttgctcctgagcatggccagcagcagtgctcagaacccagcatgctggtgttttggtgaagccatagcttagcccagcactgaagctcctgtaaatatcagatatagaggagagatgctcctgcctgcctcgtgtcctccatacagccttcagactgtcttctggtgtcgcattggactttcctgatgctgaaaatctgtcagataacgtaagacactgctttgaagttttcctgtgtgcatgatgttagacagaagcagacgtggcatgatattttcttgaaggtgacatggtactactattttaaaggaaaggatctgctctatagggcatttttaaaactctctaatcattaccccttaagttaacatccctctgagatggagaggaagcattgcaggaggccggcctgtggcttgctgttggctttgggtatgcactgctctgccaagacaatgggaaccctggagtattctacagggctgtgcctgaggcttctattcccagaataactctggcatctgacaactgactcaaacaggcagtccacgcagcattttaggtctgctctgtgggcagggaattactttcaagtgacagcctcatttcggccacttctgcggaaatgtcagtaacgaacattgcttgaaagagctgagctgaaggtaatttgaagccactccagggaatccagatttgcttaaattcagaacttaatgctgagagccttatattgaattatacatatatgttatattaaaatgtctatatttcatttttatattaaaatgtttccataaagtatattttgatcatgtttatgttgaccttacattaccttagcattaactccaggaagcagcaaggcgaacattgtactcggttaataacggcatgaacaatttctgggtgagtgtctggcgtgcagtggatactctcttctgataaaaacaccaaactgaatgtgccacatttctggtactaatcagctaaggctggtgcatgttccataaatttgagcttttcagacagacacacaagccacactttgggattcctaggccaagtatggcttctgagactccattgtactgatgtgttcatatacaaagccagacgcccgttaagtgatatcccggtcacttttgatgctttagatatttcatgatggacacaaaatgatcatgaagtgtttctcacatgtggctttccaggtacatcttcctgatgcctgaaagtccaaccaccatgagaacatgaaattcctgagaaaggactctttcattcagggaacatggagctgcctggggttgtatcctgggagacagaaccagggaagatggtagaggaaagaaaggacagagaaatagattgtgcgtctggttgttaaataccacaggcgtcacaggctgtaggtgatggtgaatgtagagtcaggagcacgggcagtatggaagacaggagtccacaggggcgacacccagtaagaacaaactgtcatcaaaatggaggaaagttggcttccagtagagcagacaggacgttttatctctgaagagcatagaggtttggagagaacaggaacatcaagggtgttgtggatatatgaagccaaaaggcctacaagaagaggttcctgggagaggttaggatagaatgactcctgagattccatcaacgctaggtgtgttatttgggcaagttctggttttaggaactggagttattagacactaaacctctgttcacagtgtagtttctgttgacacaactttttctaaccattaggcttcatcatctaaccaggtggcaggggatttagactctggggcccatcctagacctttgggggaagtgggttgataatgggtgtgggactggaagggccaagggtgaccaagaggtaagagaaaggcggtgtcagtttcagaagccagagactattatctccttccctctccctcaccccacctctatgtgttcatctccctccccctctccctccctctccccctctccctctccccctcttttcctctcttctctctctctcaggtggccatagtagaacaggcatgtaatcctattgtttggaagatagagtctgaaggctcaggaatccaaggtcaactttgactatgtggcaagtttgaggctggtctgacctatgtaaaacactgtctcacatagtagggggtagagggtataggagggatagaaagagggaagggaaagttttgaaagctccaatggaaaggaaattagggtggtagacacaaggatatgtgatggaccagttctcctagttgaaaacttttacttctggatgaaggatgacattagttaaaataataattaataataataatagtgatctaggactggaaagcaggaggtctggctgtcaaggtgggggtggggtcaccagatgagtggtaaagtgttatctgtcccttttccacactgattgagcaacacactcagcattttagacagttcatgactgacgcaaacgtgatgagaccatgaagtgtttctcacatgtgacttaccaggagtgtctcctagatgcttgcagttctctgaattccctgcctggagttcagtggtcacaagtgtgtgaaagccaggaaaagggggcctttgtttagggagaatagagctgcctgagattgtatccaggggacagtcacctcacctggccacagaagcggttgggggaggagccagggaagattgaaccagcagagaggatagaccaaggaagggagagatcacaagacccaactcaattggtagcatgcaataggaaatgtatttggggctaaattttgtgtacacagagcatctgtttcatcagattcaggacagatgtggtacaagaggtggcacttgagagtcaccttattctgctggctcggagcaaacagggatcagtctcaatgggacgcatcttgggaacaacagatggggaaaggcaacaggggtcaaaccatgaggacttagtgacgatgcagtacaatgccctgtgcttagtggagagtctgaaatgcttcaaataggcaacttgtgttattagacatatatttgcagccacatcagcagatacagtgtgaatgatggctgtggctgatgactctgcagctctctgggtaggagagagatgaggacagggtaggaggtaagaggtgagaggtggccttcaatacccagtcaccagggacataacatcctaaggagccatttcattttactgtcataaatcagcagacatgtagcttgtagcactttttctgtatgtgtcccagtggtaactgatgtgttaaactgaagtttgctttagctttaattgatgtggtttgtattatcttttaagttgcaattttttattgtttggggtggggttgttttgtttgtttgttgagatgtttgttttgtacaccttggctaagagccatctgggatcaaatggccaccaaagccagaggagcaatcgcaccaagacatttacttgctttctgtgtaaaatggttgcaagaatatacgatggcttccttgttcctttggggccatttgtcatccaagcatgctgttttccatgcatgaaagcccggtaaggtttagaaagtcccagaatgtccacagagtggctttatgtgtgttgtggtgtctactagcccaggctttggtcttgggttggtgtgaagtggctgtcactggagttgtgtgtgtggggggggggagtctctaggagaaaacttcagtgcagagcagggtagcggcaaagtgttcctgtgatcggcaacctgctgcttgtttcttgcccatttgcagctaagatgctctatagagatgttcacagggaacttcagctcccagggcacttcagtcatgactgtgtggagtaaaaatgggtacccagctccgtgcaactgggcgctcacaatcagagaaactctctggtgcagctggtgagggggcagggcaaggcagtagaggaggggcagggagcaggttccagagtgcatgtaccacttcaattccagctgctctgtttatatagtagaagatcagaagatccctcgaggtattgatacaataaaccatttcttcaaaactaaggatacgggaaacctatattttccttatgtctttgaaatccagccaactcaataattacatgttacttgcttaacatttagcaggcattcatcggtccctgtgtgcatcctcacttttaatccactcaacagtttgctactcgtcttcctcatttcagcacacagacctaatacttaaacgtgatcggtaacttgtatggggattaagcgattaagagctgggaattagttatgtccttgtggctacagaggcagccttcccactttgtttcaaatcccatatctctgcttacagccataggaccccagtctttgatgtctgggcctccatcttctttctctgcagagcagagaaaatgaaattcttaaggtgtagcatacaagcacccagcagaacactgtaaatactcaaaggctgtaatgtgtcttaaccaagaaagatgaatgtgactcagaggtcacctgattttagatgaatctggttagcgctttgattaatacagcagtcggatccatgcaggcagccgtggataggtgggtcactgacctccaggtcccacttggacatcagcaggcagcacatggtaaagatctaacccagaaacacagtctgcttcctgatctatcgatgagggtcataccacctgccctctgggtgatgggaagttcagatgagaatgtgtgctcagatgtgcctgctgttatgtgaatgttggaacctatacctgcatttggctatttcaattcagtccaaagttggtaacttcagagcacgcaaactccactttagacctcatttttctgctggctggtggatcttgctcactatcattcttgctcagcatgcagactggcacgctgaggtaaatgttggccccagcttttagatgaaacaccccaagaagagagtgatcaatgagagaagagaaccataaaagatcattaaagagctgttcagaagcacgtatgtgttcatttttataatttcccagctgagtaagccaaccaagcaaaagcactcaagcttgcaaaagcaaaggccatttgtaacatttagatccataagatgtctgtctgatgccactgcccctgtgattggtcggcggaatccagctgcccctgtgattggtcgacggaatccagctgcccctgtgaatggttggtggaatccgctgccccagtgattggtcgacggaatccaggcatacctttggttgctggatgtactcataacctgtggggaaagagttaaaagaattctccctctttttatttttttttctttctactgagtcacaggaagaaatgttgatcactctgtcaccctcattttacagagaacatctgcagatacaactcagatctgttaaagaggtatagcaattattcatgtaaataattagaattaagatgttctctctggttaaaccaagagctggcacggatgccagcttttctttggaacatggattggctgctgtggctaccatgcttctctctgcactggcttatgaagttaaatttaggcaatgatctcttggctcccagaccacccagacaccctggtccctcattctaagcacagtagacaccaccaactaccagggtcagccattgctgccctttgttactggatggcccggtcatcgagagtggcatgcgctaccctcagcccaagggtaggatgtctccttgccttcctgtatttgccggccaatttctagttccttgtacaaggctcatcgtggatgcagtaatggctttctctgggtgatttttcttgatcttagcctctggaatcctacatttatttatgtgtccacaaggtggcgcacatgtcactgttctcctgacctcagctaggaagggccccagcctctactccgtgtctccctccaggtgaagcttctgttcctggaagtagcagttgaagtgtttactgaattcattaattttaacttttctcccttctccgctctaaggagtttatcaaaatgaagagttaatgccctgttattggttctgagacaacactgccactgtttccttacaaggaaatttaaacagcaaagatgctgagctcgactgcagaacgcaccgagcatagtctggtccacgggtcctcattgggctacacatcaaaatcaccaatatgctcgcctctcattggttaggggaggagccaggtgctggtgtgggagctggtgttttgttgttgttggtggtggtgggtnnnnnnnnnnnnnnnnnnnnnnnnnnnnnnnnnnnnnnnnnnnnnnnnnnnnnnnnnnnnnnnnnnnnnnnnnnnnnnnnnnnnnnnnnnnnnnnnnnnnnnnnnnnnnnnnnnnnnnnnnnnnnnnnnnnnnnnnnnnnnnnnnnnnnnnnnnnnnnnnnnnnnnnnnnnnnnnnnnnnnnnnnnnnnnnnnnnnnnnnnnnnnnnnnnnnnnnnnnnnnnnnnnnnnnnnnnnnnnnnnnnnnnnnnnnnnnnnnnnnnnnnnnnnnnnnnnnnnnnnnnnnnnnnnnnnnnnnnnnnnnnnnnnnnnnnnnnnnnnnnnnnnnnnnnnnnnnnnnnnnnnnnnnnnnnnnnnnnnnnnnnnnnnnnnnnnnnnnnnnnnnnnnnnnnnnnnnnnnnnnnnnnnnnnnnnnnnnnnnnnnnnnnnnnnnnnnnnnnnnnnnnnnnnnnnnnnnnnnnnnnnnnnnnnnnnnnnnnnnnnnnnnnnnnnnnnnnnnnnnnnnnnnnnnnnnnnnnnnnnnnnnnnnnnnnnnnnnnnnnnnnnnnnnnnnnnnnnnnnnnnnnnnnnnnnnnnnnnnnnnnnnnnnnnnnnnnnnnnnnnnnnnnnnnnnnnnnnnnnnnnnnnnnnnnnnnnnnnnnnnnnnnnnnnnnnnnnnnnnnnnnnnnnnnnnnnnnnnnnnnnnnnnnnnnnnnnnnnnnnnnnnnnnnnnnnnnnnnnnnnnnnnnnnnnnnnnnnnnnnnnnnnnnnnnnnnnnnnnnnnnnnnnnnnnnnnnnnnnnnnnnnnnnnnnnnnnnnnnnnnnnnnnnnnnnnnnnnnnnnnnnnnnnnnnnnnnnnnnnnnnnnnnnnnnnnnnnnnnnnnnnnnnnnnnnnnnnnnnnnnnnnnnnnnnnnnnnnnnnnnnnnnnnnnnnnnnnnnnnnnnnnnnnnnnnnnnnnnnnnnnnnnnnnnnnnnnnnnnnnnnnnnnnnnnnnnnnnnnnnnnnnnnnnnnnnnnnnnnnnaactctttcttctgtaggtgccttggtcatagtgttttatcatagtaataaaaaaaagtgcctaatatggacaggatttccctggtgactgtacactatactattgttagccagagtcccccttcctgtgctgtacaatagtggaacttactcatcccgacagtaattctgtggccattaaccaacctgcctccccctctcatacacacacacacacacacacacacacacacacacatactgctctctccttgtgtatcttcagtggaattttttttgttgttgttttttggtttttcgctgtatagccctggttgtcctggaactctctttgtagaccaggcaggcctcgaactcagaaatccgcctgcctctgcctcccgagtgctgggattaaaggcatgcgccaccacgccaggcttcagtgggattcttgaggctgtgaaatcataaaacaagagctggcagctatggtgaaacatcacttagagactagacaaggatgccccaagggtactgagtatccaacccaaggtctctgcatgccagccgggaagcaagggatcttgtacagcaagatcaacagcaggaagtctgaacagtcccatgtgaggcggcctcggcacagtggctccaggaatatggggctgccaggaagggttccctactcaagagtggatggaacgctaccactggggagtctacagaatggcagccaaacaacagagaaagctgtggggtacagaggaaacagtacaaatccaatgggttcagtgagagttcgtgatcagaaaataaaacagatctgtgtgagcgagaaatcaagagaaatcgagtacctttttcctttgacactggctcatcacccactttgaatttgagctctgacccctctaggagggaggcattggtaagtccacttcccctgccaggctgtctgctgtaccaccacactgggtcctgtatcttgtcgccacctcttacacaggccaggagtaaggttactggttccaccgctcctgtttgtgtcccagctgagccagtaggttcccactccacacttcagtagtgatttcagtagcttcccgaggtgaagcaggcccatggtcccacatcaccacaggctgtcacatataccatatgacctgcaacaaggaatgtgtccccctctccagataccacttcattgctcttgagacctgccagccaccatcagatttcctcttggagggagaactgtgaccatagtgtatggttacagtcaagaatggcattgatcacacccccagccccgcccccaccctcaccccgccccgtccccaccccgcctctgcctttcctagcattttgcctttgtatgtgtgctttttgctcaatgaatgaaaaagccctgagtttaaagcaattgtgccaagatttacaaacaagaacattcagaattttattggagtagcctgcctctgtgcaggggcagttatcagactggctttagatttctgagactcttgtagtatggatttggctgaagaagagcccagagttctgagggagaaatggaccctagacatttgtatccagtgatacctcactttctcaaagaaaaattaccaaaagtatgttgccaggacatcccaggagaaactgcgagtccacagtgactcttggtctcttccctgggtaccatccacatataaccccatttcccctctgggcatctacataccatgcagaggtacagccccaggcaagcagaatccggtctgatttagagggagggtggagcttctgatgggctggagggagaaagtctttctcaggagtcttaagcatatggctctttaatcgaagcccactcccatcacctccccaccccccatggcaatccttaatgaagcagctgtccgagacaatccttgtttgtattgttttatttgatggtgtaacagatacactttattcgtggtgaaccagggattattatatacctcttatgagaaggaatacccaggaagggaaggtcattggctgaaagctcacggctatgtagatatctcattagcatggagaagcactcccgatgttaggctatgtgactgagtgcccagagtcctcagagggtgtcatggttacatgttccacagtaggtagaggtgggtaggggaaggctccactcctgcccatctcagttccctgagagtcctgggattggagctcattcatcctggtagcatggacccacgtgccctacaaaagtatagtagctaaagtcaattagaagaaagaactaaataggaatgggaggtggcttgccttagggttctattactgtgaagagacaccatgaccacagcaagtcttattataaaggtaggtatctaattggagatggcttacagttttagaggtctagtccattatcatcatggtgggtagcatggtggcacataggcagacatggtgcaggaatggtatctgagagttctacatccagatgggcaggcagaaggaagagacagtatgccactaaacccagcttgagcttctgaaacctcaaaactcacccccccacaaatcacacttcctccaacaaagccatacctactccaacaaggccactcctgatgtgtcgtgaggacgggcattttcatcaaaccatcacatagttaaaccccgaagaggagtgagcagtgaggtcagcagcccttaccattatgaatgatatctattactaatttaaagcacttggttgttagctaaattgtcacaaagaccatgtgctggaacttgactgctagctgatgggctctggggaactaactggatcacaaagagtctgacctcagctgcaagttgatccatgagtggtttcataccagggagactagaataggagatccagtggaaggcaccgggtccctgggtgtgcccctgggggattgcttatccttgactccttctcctttaccctctctgcttccaaacttcatgaggaaaacacttttgcttctaccacacattggctgccatgaagtcagggtcaagcaaccatgggccttgagccttctgcaaccacggaaatccaatggaaatccctcaatgggaaatcaatggaaatcttaagtagcttttcttgggtgtttttgtcagagctggaaaaaaaaaaacccactaatgtttagtatacagaaagagaaatgatacaaaaatcgagttttgaattaaaatttgagcactttaataatgcctggtgtgggggcgcagaaggcagtaaacattgtgtgctcttccagagagagatagattagatggctgcagattaaattaaatttgtgataagaaagtagagtcaactcattgtgccataaacatttaataatatagtaaggattttataacatagtagattatgttttgtattattagaggaaggaaaaaagaaaaagtcaaactcataagaaggggaattagtttaagacaaaacagcaataaacgtgcaaaggctgattagcaccaaggtcaagcacagcaacaaaacttgttcttctccaagattattttaaaatgtgaaatatgtctgtgtgtccatgtgtgggtatgtgcacttgagtgtagctccctgagaagggccagaggcattgcatctggaagctggagtccatggtgcttatgagctgggtaacgtgggtcctggaaaaccaaacttgagtaccttacacaagtgccatctatacataagaaccaagccatctctccagccccagaacgtgttcttataaaaaggtgcacttataaaagaatcactgatgatggccaccagcctatcaccaggatgaacaagagaccatgtctccaaggaaggtagcaaggccacctaacagtctcctccagcttcctaatgtgcagatgtgcaggaccctcacctccatgtatacaccgtatgtatacacactcctaattaaaaaaaaaaaattctggtacaaactcaaaatgagcattaggaatgagtacacagcaaactagactaaaactttaaagaggcgggttaaggagccagagaactgtggtggcagagcttaagacatcaagctggtatcctgagttctacctcagctaatccggaaacgaccacgagacacaaaggccctgggtgtttacagaagcgcagggtgaatggcagaatgtctgcccatgctgctcttaggttttgcctctgtggtcctgagagggagtcttgataccgccaggccacagaatacaagggaatcacggtgtaggagggctgttttgaggcagaaattgaggactacgcatgctcttaaggacaaaggccttcaggaggctcctggcatctgggtcaaacctcctgtggccagactgagataaagctttgactgtgggattctgcatgaagtaacggaggctgtaagcgacgtccttaaagaggaagaaaagtgttttcacagagcaaactgcaagttggatgcccaagacttgggacaacgggtggcccatgggaaatgtccagggggagccctaggcctacctgattaggagtgaggtctgtctatattgttcctttgcctagtgagcgacaagaagtctaaaatgctttccaggtctgtgcaagtcccacaaccagatcctcattactgtctatgctagctagacaccccagcctgtgtgcgcccatctgtctcttctccctggaccacctggtgtaactgccacacctgctgtctttgtattgtggccacagaactttcctaaagctgattatcagtcaaggagccgctagttcctgctgaagagcaggaaaggctgtaggaaaggcagtgtgctcaaggtgagatgaaagcttggtcctcccaccacagctcgcctcaagcctcccagcttcctctgggtggatggtggggggcttcaacagcttccagatccacctcagatttccctctcggagaactccctcattgcactgatatcctcgcctctccttgttctgagtccacaggctttcacctacttctgtagcattgacgacctggccctatttgtcttgattttcctaactggactcggacttaccagagagttaggaccatgtcttacatagtagcatcatcagcactaagacgagccagcaataggtttgggaagggtccttgttttgaacttgctgtgcagccaagtataacctgcacgtgtgtgccacagtccctgtaaaggttttctggaacaatgaacaatggcccaatgaaactgaaaactgaaagatgatgttatttcatataatcttggaaatgaggaatttacagctggcctggggaaaaagagaggtcttttattctggtggttggttcctcagctgcagcgctgtgtgtgctacctgccttaagggctcacaagagtaaaagaaccttctccatttcacatctgaagagaatgtggcatgcacggtgcactgacagcacttcaccaaaccgcctttaaataagtgggaaagaagagatttgaacccaggagcattgggttaaacattttcccacagtgactgtcctacactgccattccatttcattacaggaggtcattaggaaacttcttacagcttagaatcagaacccaacaaggctcccactaagcgctgggaacggatacacgtaatagctttgttactgaacacctcaagcaatggcttcactgctattacccagggttagaacaagacacaagttccttttttttctgttctagtagagtggtgtagcatgacccactaaataatgccatggagaatgcaaatctctaatttctcccaactgaaacatagttcactttttgctgccagttaaaaataactaccagagcttgagaacatgaaacagcgccggcatgcacctctgtggttgcatctgcccttcacaggatggagcaggttgtgttctcagccgtctctgaacccgccaagtctctccacctctaagcttcaaaggcattcttgctcagaaaacataggtgaacatttgcacacttcggttacttgaggccgtgtgattcacaccagctctcaggctttctgtccacagtcatcctgacagaggccggagactgtggttttgttgtctccagattagagatttaaataatttgcccctaaatagcatttctcttcaaagtactttagttccccggccccacagagaacaatgactgctaagtggtttttgtttgtttgtttgtttgtttgttttaagagtacacagtaattaaaggcgctggagaggaatggagagaggcagagcaagccacagcgcgcttgaggagaggtccattagtctgctctaggatcccgactgggaactttatgctcttcagcagaagagaatgcgtctaaattgatgagaagtaatatgccagcagctctgtctgcttgccaggcatggcagattcgaaaggagcctttgccatggtgtgttttgtctagcaggggggtgtgaatggccaggcttagaaccatggcaacgggaaacaggcagaagttcttgctctctcaaaactgggttagttgctaccagagtgtaacaggccacaccatccctcgtatgtctcttccacgtgtgcctgcttgccttttagcctcctgtggcatgttacgatgctactgccttcatggtgtccttgaccctccaggctaaggaaactccagttgtttacaagtgaagtcctgggtttgttatcacaacagaaaagcagctaggtgggaagggaagttaaatatcaatacgcataccacagggagtttgtgaaatccatgcctataaaaattagacagcacatttctaaataaccagttagtcaaataagaaatagtttgtaaaatattttgagatgaatgaaaatagaatagtagcatcctagaacctcatgggtgcagctaatagagtggttaaaggtctttaaatgcctgtgcaaaaaaataataacaatgtaaccttataggatacctggaaaagacgaaaccaaggtaatttgaaaatgattaaagacctgataagtaaatgaataaaatgaaccatatgcagactagaaaagcaaaccagaaagtcacactaaagatccttttgacatataaactaaggggcttggcttggtaggtaagagcagttgctatgcagtgtgagggcatgcgttggaatccccagttctcatgtaaaaggtgagcatgcgcatgcaaccagtgcagggaaggacataggcagagcccaggagcttgcttgctggccagcctagcgaacctgcccagactcgggtgagtgagaaaccctgtctcagggaattaggtagaaggcagtgggggaagacaccagcgtcttctgacctctgcaagtgcactcttgtgggaagcacacacatgtacgctgagtacacacacacacacacacacacacacacacacacacacacttttcaatgggatgaatataacccatcaaccttacagaaactttgaaaaaattcagagaattatgaaaaaaggcatctgaaattaaggaaccaaggtgataataaattcacggttaaactagtaaaactgacttaagaagaggcagaatctgagccaatccataaatacacacacagtgggtaattggtagtcaacaaacgtacagcgcaaatggcttctcctgtgatttctattaaatatctaaagaaaaattagtaatccttcacaaacatttccaaatttcagagagagaattagttttgagccatctgacagaccagtatcactttgataccaaagatgtaacaaagcaattataagtctgtctcccttttaaatatacatgcaaaattgtatattatatgtgtgtgtgtatagagagacagagagactgaaaaacagacactagcatcattttaacaattttttgtcatggccatccaaccatgatcattttggattatccctggaatgtaagctcagatacaacagtcaacattgatataccatgtgaatgaatataaaagagaaaagccatgtgatcttgttaatagatgcaaaatttaaaaagcagttgacaaaattcaaattctctgcatgataaaaacacaaggcaggagttggagagatagctcagtaagagaatgaaaaagcagcatccacactgggcgaagccaggaaaggaggaagtaaaacgctatcaggagaaataccaggaaacaggtaaccttaccaatactatgcgatagataagggagtacaaacgccagctgggtatgggagccacctttaatcataacacttgggagtctgaggcaggcagatctctgagaatttcaggccagcctaatctatatagcaagcaagttccacattatggctacatagtgataccctatctcaaaaactaaaaacagaaaaatcagttataaacagtgacagtgaacagtcagaaaatgaggccgtttcacttttatgttcattaacagatatgtcaggaataaaatgctgaaatgaagcatcaggcccttgtgtaatggaaactaaagtgaaacaacgtaacttaatggaaagacttctctaatggattaaaaaaaaaaaaaacgaatgcagagaagactgtgaggtccttcagagtaagtcacagctgcagaataatcttgtcaaagttgtagctgtgcttctggtagaaattaagagagccatccagttcataaagaaaggaggttgagaacggctaaaacaacctctggtagcagggagtcaggggaggggggatacaaagctagaggaattatacttcccaatttgaaaatgtattttatatcttcagaagtaaaaacacactagggcagtggttctcacccttgcaaatactgcaaccctttaatacagttcctcatgttgtggtgaacccccccccccccaaacacacaccataaaattattttgctgctacttcataactgtaatttgctactgttatgcatcctaatgtgaatatctgatacgcaggatatctgatatgtagtccctgtgaagggttgtttgagaccccaccccctacccccaaagcggtcatgccaacaacacattgagaactgctgctctggaggcaggagaggtggctttagttcataaagtgcttgcctcgtgaatgtgggacccaagtttgaccctcagcacaatgaaaactgtaagcttggtggcattcactttataaccccagagctggaggtggagacagatgtatctctggtacttgctggcaagccagtctggtctaatcaccaagttccaggtcctccaaaccttgagtccttgccttagaaaacaagatgggagctctgaagcccaacacttgaggttgacctctgacctctggcaaatgtacatacatatatgcacccacaaatatacatatgtgtgtatatatgtatatgtgcatgtgtgcatgtgcactatacacctacacatgtgtactcacacacacacatgcacctatacttagcatatgttaagtatatacattaatgaaacataattggcaaccacagaaattttagttacaggtcaaatgattttgctaaagaaaccaagaaaggtcaatggcaaggattagttcttttaaagattagcactcagacttggggatgcctaaacacaccatttgtagtaatttgagtgagaatgacggccccaataagctcatctatttggatgcttagtcactagggagtggtactatttgaaaggattaggactaagagtctttcttcttcttcttctttcttcttcttttcttcttctttcttcttcttccttctttctttctttctttcttctttcttcttctttcctcttcttcttctccttctcctcctcctcctcctcctcctcctcctccttctctctcctctctctctctctctcctctctctctctctggatctgactgtagaactctcagctacttttccagtgccatgtctacctgcatgccaccatacttcctgtgatatgataatggactaacctctaaaactgtaagcaagcccacaattaaatgcttttttaaaaaaataaaataaataagatttgccttggtcatggtatctcttcatagaaacagaacagtgactaagaaaccattttaatggctacatatgtggttttacattttaacacatattttaaccaggaacagtattgaaattaaaacatgcaatattccaagaggcagtgtatgctctgacaggaagagctatgagagacagatactccagagagaagtggtaccacatataacttcctttttccaaaaagttctgactatagtgtctgtatatgtctgtgtttgtaagcatgtgtgtgttttattttggatttgaaatcatttttttcttaagttgatggagagtgatttttgaaattaattgctattggcacattgaaggaacatgtctagggcctggagagatggctgagttcttcaagaagaccctggattgatttacagtacccacaagattcacaaccatctgtaactccagtttcaagggatccaatgttatcttctagtgtctgtaagcactaggcatgcatgttgtacatgtgcacagatatacacgcaggcaaaacacttacacacaatttttttaaaaagagcatgtcaagactccattatccccagggggtaatacagaaagttagtgtctcatgatcaggctatgaaggccttgtagccatgtcagctgcaggaagtgggagtatccttgatttgcaggacatagattattttctttgcagattaagagaagtgtgcatgcgagtgggtcaggtacatggtggtgagaccaagttggtggctgtccagcaggagacatggcaactgctattgatgttactgagaggggaggggggctctgctttgtggactttatgtcacctcttttgttaggagcaaatgggggtgtgcttcttccatgcatctccactgcactgctgaatagtacacagacaagagcagctgtctgagtctcatgagcacctacaggagcttaggtcagcctgcatcttgagggaaaatgtcagttgttttctctgttctagtttttctcctcctcttcctccttcaaatgcccttcaagttgaaaacttcacatttgtaattggttaagtgatattcacttccaacctgagtcacaaaaagattttgtgagtgttgaccatctatcaagatagttttccatttacattctctaatagtgaagtatacagttgagatcatgacaagtcccatccttgagattaacatatgtggccgtggcatcctgcctttttcatgctggctcgggcttgtggaagcttgaggaagctttctgccattcctcatgaactttgcttgccgttttcttgtaatgcttttgcatagtttaggtgtcagggcaaggcaggccttcaggataatttaagggacggttccttttttttattaaaagtaaaaattaatgtagcacttttattagtcctttacatgactactgggattcacaccgagggctgtctggccctagaaagttactgtagtattggaaggtagctgaaccataaaccataaacttctttgttagacggttctaggttgtccacatctattttaatctgagatgtctgaagcttgtcataaagctaatactttttgttactcctgtcactagaccctgttctctccatattggtggtttgtgccttctacttctcgagaacttgtggatagatgcttatctgtgtactagtgacttttctgttgctgtgattaaaacatcatgactataagcaacgtatggaagagtttattgggtctaacaattccagaggaacagaagtccattgtggtgggcaggtgcagcagcaaacagcaggcttggtggcagtagaaagccaagagctcctaccttcaagtcaggaaactacaagtagggtgtggctgtgtactttcaaagacctgccccagtgacatattccctccagcaaggccaaaccttcccaagcagcgccaccaactgagcctatgggagccatttctcatcattattcttctgcattctctcttcttccctctatctcctcttacatttaatagtacttgggttttatttacatctagcttataaaaatgtgatctctcatctttctagtttagtgtttaaaatattttggaaaacatttttgccatgcttgctgtaatgatagatagactgtgtgtgtgtgtgtgtgtgtgtgtgtgtgtgtgtgtgtgtgtgtgtgtgtaatctcagcttcttaagtggcaagactgtgtgtgtgtgtgtgtgtgtgtgtgtgtgtgtgtgtgtgtgtgtaatctcagcttcttaagtggcaagactgtgtgtgtgtgtgtgtgtgtgtgtgtgtgtgtgtgtgtgtgtgtgtgtaatctcagcttcttaagtggccaaggcaggaggtctcacactagcccactggggtaacaggacaacacaggaagaatgaaggctggacatttttagtcatcatttccttccatttttagacctccctctcacctttcattctgactctcttgtcttctttttattgtggtttattagttttgttactttctcacttccctttctctataatttactctttgatcattttcatatatttgaagttatttcatctttggtactgaacttttgaagatcatccttgctaacctttctgtgtctcagatgttagttctacccaggatacttacatcttgtcgttctgtcactgtgatggccttgtcagtcttctctcacagcatgcccacatctcttcagccttcttgaaagtaaaacaataattcagccatgcatatcatttctggatttctccttgctgcagtatttatattcctgcttctttgtatagcaaagaagatctggttctgcgacattttgggttctaaattgttgggtaatgattgatatgcatgtgtatgtatatgtaatataaacacacaaacataacatatactgtattataaatagatattcttgagctctttctgggacatgaccaagttatttggaggcactctagcttttcaaggtttgtttttaagtttaggcaggagcatctgagctttcagagctaatctgacccgacactagccagtcaacatccacgttctgtacagaagctgcagctactactagactgctgtgctcctcctgatgagaacatgaccgctcctgggctgagtgagtcaggatagctgatccacctcctcctttctacttctctacatggtctgggtacttctgtgggcatcagctgacaacactgaaggcttgagaacctctgcccattatcagagctttttgctctacaaattctcactatatagcttcctcacactgttgtcatccaaaggagacagcagagtttgggggttccttgcctgtggggtggcctcttcagagctctggcaggttgaggcctgactctcttggagagtctatcatatgtgtttcaccccaaatgactaaacactcttcctgttgttatgaaaccgtatgtcttttgttaaatagtattctgcctgtatgtacatacatgctcccaagtgcatgccaggtgcccacagaagtcagacagtgccgaaagcctgggagctgaggttacagacgattgtgagatatgacacaagtgctggcaactgaacttgggccctctggaagaggagcaaatgctcttaaccaatgagccatctcttctccaactgtcctgtgggtttatcttgtctggattgttagactctgatgcattcagcaagcatgtaatctactgaggcaaaccctgtccctctgcctagtgaggatgtgccctcagatgctaaggaagacctgtcttcacagccaacagtcccttttcactggcatagcacatttccccctaactgacccagacagaaaaccctacttctacgggttttgtaagaatcctaatacctcaaaagacctttaaagccaaatccagtaaggatataatgctcgaggcaaatacaactgaagaaaacccaagacacccacagcagattggaaatcaatcgtcaggagctaacattgctgcctctttccaagagacagcactttagctcagcatgctatctcatcagggcagaggatttctcctggagcaacccagcttggcctagttaccatatgatgcctgcttgctgtggatgtgccctcccttcccttcctgagcagagaacgagcagagccccctgaagtaggcaaagaacatctggataatgtcctccctcctccctctagccccgttttttaggagctaggttacttatgagccctccctaagggctctgctgttcaggtgcagatcactgcacaatgagggcaagaaggcacccaacaaaaacaatggtagcttcagggccagctgtggcctgtgcttcattttgccatatagatctatgccgtgatgaaatattcctgaaccagggaaatggagaaaatagtcatctaatctgaacctttcagtggctgcagacggcgagtttaacatcttaagggacgatgaaggaaatcaggtctgaatggttttatattttcagaattacctctgcatcatttagatcattgtgtgtgctatgaaaatagggatataaaaagcagtgccttgaagccacataaagaatattccagaagctccagtatgattgagaagggcagacttgcatttagataaagcatgaggcgcatgaaataaaacaagacatcattaacatgaatgcgatctggtctgatgcgaaaaggcacggtctcagcttcaagcttgggttgtgttgctcaggtcttatgctgtagcagctctgcctatggaagactttagaccccttaccacagtcctatgacatacctgtggcctggctctgcccaccagaacgttcacagccacgcaacctgtcacccagggttcttgcagtgtgaatggaggctggtactgcccacccttcttgctactgcttacatggtggcatatttatttacagtcgtttgcacagtgctctgaagttggtaaaatctttctgtgtgctatggtttcagacttctcttgcagactaagaaatggcattacagagttaacagaagtgatttagccagtgtcccaaatgcaaggatctaatgaaaaacaagactagatgctccaaattaatgttgcttactagaacacacggtgtccttccacacagccttagtggaggacactggagtctggaggccactttatgggttctgttgtctgattttgcttcactcagcacttcctagagtactgtctgtgcatagctaagcattagcttcctccaagaggcagcagggtccagggcacgtgactgtgacacttcttcaaaaagtagcattcatctgctgctaatggaagagtagacacacattcctacgaagaagttcctagcttggctctcagctcccgagtttactgtcaagagcaaaggttcaggcttcaggtttctaaactagtcacacatgcagtcggctgttgagtgcgtcgggagtgtattgcagcagattaaacactggtgattctgtcacagaaccaatcactggagggagctggctttttgtctctgcagtgctgaagggtgaaatcacagcctcctacatgtgagacaaatgttctaccgctaagctagatcgttttgattttaagcactccaatacaaaaccaaacttgtcaaatgacccaataaatactgcctagactgatctctaagctccccacttcatgcttaaagagtgaaactaatacttatacattaaatatttatacattaagtaatacttgtttcacatgatcatcagtacctctactaccaaggttgtcaatgtcaagttgtttggaacagcgctgaccttgatgataaagcacacattgggaaggctgggctagcactggaccaccacaacgagagctaataattcttcaacagcgtggagtgttaaatgtggagctgtgctgactccactgaggcaatccctgaaatatgattatcacaggcttcagattttacggcaggtgtcttcagagtgtccaaaccatggactgattttcctcagagagtgtatgcaagcaacgctcttattaaagagtcaataccaagatctaaccacatagcaggttgtactttttgatgtggccacaattacaaagggaaaaagtataccaataatagcatttttctctttacttcatacaaagggtttgctgtgagtctgcaagtcatcttgtccaatccgaaagctgtatttaagcgccgtggatcccagccagggatgcaagaatctgactttctaaagcagataacaacagttgaagaactggaaccaaaagctagtaactgcaccaaggtacctcttcagctccctcatgggctgaccctcagaatgctgccagtgcagctgtttaaattctccccttcctctgcaggttctcgtgtggcacactcggacagagaaggtcaatctagccaatgagccaaagtatcacctggacacagtgaacattgaggtgtagccgccaggaccagcaggtgaggacaggaagtctggagcgtgggctgctgcccattcaggtactgttcctttgccttcagcctttccttaccgccgatggacggccgtttcgacagctacctggatgctacaaaatgtgttgtcttcatttgtctgcatgtgttttctgaactggaagagttttgtagagtgaagccacatgtcactgaaaaggacaacgaagtatctcacactgctccctccctccctccctccnnnnnnnnnnnnnnnnnnnnctccctccctccctccatccctccctcccacaagccatctcaatactgctagaatgacaggttttagaagctgatgaggagtactctgtcaattaaatattcccagttaaattcttggcttcacaacatgaactatttggaaagctgatggcagtgtacactgtaggaaataaaacccacaaataaaaaggtgtgtggattcatctgtttaatatagggaaataacattttgtcaatactaggcaccataaaatgtaaacacaattactgtcataaacctggatataccttcaaggattaaaagtggctttgttttagttaccctgtgtgcatatagtgcagaaaaaggtcttcatattagcactatgtacatgagaagaggcccacattacaagaggcaatggaaatttgaattctgaaaccttcattgagttttacagtagcatccaggtttatctccgttcactaaccacgttccctgttaagcacatcataacaacagcacagtggagtgagtgatgaataaaagaatttgatacactagaaaacagtgctcagtgatacatttacattctatttatatgattaaacatttgatcatacagtacctttctacaggattactggctaatttgggggtggggtttatactgttagaggtattactaacatgataactacttcccttatatgcaaacgttagagctataattttgcaaataaaactgattatgcaagttaactgagcagcttcccaatgtggcttaggacatcatggggagtatgagcaaagctgccctccacacagatggtttctcaacctgctttcacatccaatttaatcagcacagaccaacacggtcaatcaggtcattcttaatgtgagcaaatgggggaaagaaaaaatacgttatgtacatgaataaatgggaactagatgcctttgcagcgaggaatgttggggtcggttctggatggaactctgtgacagcttcttacttccacagctgtgtgctcagcgtctgccccgatgagcttccagaccaccctgctgtcgtgctgggaggctggccaaaacctgcactagcgttagcactactgaggttcatggcagccatctgctgattcatctgcgaaacacaaaaggcttggtttacaaggaggaccctcttttcactcctgactccttagctacagccagacacttcatcagatgtgaaaattagtccagacactggatgtggactacactgaagtctttctactgaaatcagttacttttttcttacttttttctgagttaggtgttacttataaagtaatccataattagttcactttctagattaaccacaactgaaaacacatcaaagtaatctttgagtttatatctgagaccatcactcttctgtgactccaagactgagacattttagaaagtaaaacatctaaaattaccctaacatttacaaaatactcatacctctctattaacatcctaaatgaccttaatatacttcctaaacattaaaaaggtcatatagcatatgttttaggtttatgttataataacataaacagctaaaattaaatttcattatatgctatacaataaacaactacatgtacttttctttcaggctaaaatccagtatatttatcaggctcttagcacagtagttctcccactacccagtttggtgacggaacaagagatgcaggatttacctaaaatagtttcaaacctatgttcaacattatctgtgttctttgtgcaaattttttttaaaacccaagacataataagcacacatgtgtctacagacaggtagcttccatcttcccttctgctcactcttgtggccttgctgttcttcactggctctcctgtactctaacctgagtcatgtgagcctgagcatcctggtcacagaaaagctgttcctagtatctgacatcattcccgaggtttccaatgcataagcagtgtgtacgtatatacctataaaccgcagctgtcacagcacacgagcatttgtaagatacacggtgattctgtgaatgttagttagcagacattgttctgaaggtaaactaggggtcttagtggtcctggttcctgtgagatgctcggtggaccatcatgcaggaatgggaatgggaccatgagcactaagtcaaagcctctgatgtggggtaacagcagaaatgttactctaacctaagccagacagacatggaatttatcagtgaatacctgagggaagcagggtttacattctcaccatggggattcctgagccaatggatgttcctcatacatcaacaggcagtaaccacatgacagcggcagccttgatccctcataaaactgtgctttgaaaatatgaagctggatttctatctcactgataagaattaataaaaaaaaataaaagatgcaaactatcagtgaagatactctggtctaagtgaactatgaagagatcccacccaggagccaagtaagcatggctggcaccaagcctgacaggtaggagctgaggtatgtcttagatgctgcccaagataagactacttctagctagtacaggcatgttcaccattacaacttggttacagtctgaaatgaggaaaggaaagtcctaacatttatatatagaatagtcttagtaaggacagtaactagtcatttatctataaacacttggatctggccaaacttatccctttcttttgttccatcattagagttcaaaacaaataaaagtcccaatatacaaatgtggtttcttagatgttaaggtggtagaagctacaagagccttacctgtgagaggttccactgaggctgctgggcttgtggcaagccgaacttactctgtggtgcacccatttgtcccaccattcctccctgagggccaacaacattctgaggaagtggcatcactccagtctgtgcgtttcccatgaacccattgtgcatgggcatgcccaccatcatgccagtattctgtcccatcatatttcctataagaccgggagctgcaggcactgggacgcccatggaaggaaaaccttgaaatgcagtcggtgcttgtgaggtaaatggtatatttgtgggtcccataaacacacctgtattttaagaaccatgaataaaaaaagaaaagaacaggtcaagaagaggctctttatatggctgcactcctctccggagaaaggggcagaaaactcaaaacaacccatgcctcaaccttcagagctgttactccaggacacagacagacgcacagcctagaggacatgctgctcttgctgactggtaccactgctctcacaaaacccaaccaggcagggagagaagtggttctttgttttatgaagaggtaggtgggtggccacacagtttcagcctatatatgaaataagcttattttggaactaagggtctgatgtattaaaactgaataattatatgcttatatttcactacaatgaaagacagttccaagttttgcataattatacatatgtatagttctgactgcttaattgtttactgcagaggaaacaagagtttacacaaagtcaaattcatgtaaatccaatccagttaattcctgaactcctgtcttataaacttgtagaacaatatcaaatgatatgtgaacaacttgttatgtctcaagtgaataaagttctgtgaatcctatattgtttaattctgatgcttcattcatttcagttctataagctgcaacagaagcatccactggtaccatagaaaactgtaactgaggtcatttcagaggatgcactctacaacaccgtgtcactgtgtgcaagtggagcgcaacatcaattaccaggagtgctttgctgtgctcctgtaccatacagagataagatggagtctttggagagttgtttctttgctacttcttctgactttgtagtttgctcagtaaacagatccaggtccccagatgtaacggtagacagggtagcaggtgctggtacggaggcagtcccctgggcaaaacaccaacagaaacttaatttctacaaaggacagcttatctaatactaaagttcacataaaattatgaaattggtagtatataataagaggaaaagggtgacatctctgaagatcattttccagacacacacacacacacacacacacacacacacacacacacatataatctagaatgcagaaaaaatgtcacgacataagctgtagtgaagaccaaggagcacggagctcctccacagccacgctaagcagccaggaaagagcaagttttgctcatcatcctggaacacagagggtatgacaacatgcagatccagtctgaagactccccagcacgtctctcaagaactagcgtcacttggaataaagaatgttacaccttgcagaagcaaaggctctgtaatgggagattaaaagcttgtatcttttcaaaagctataccgtacaatgtttacacacctattctagaactattttagcaatactagaatgcatctactccagaaaataagtacagaaaactggctacctatattcagccataactttcatgctgttcagaggcaaatcatacaagtaatttagatattgaatataaaacaagtttcccattagtcctctatatcttacacagagatagttttacataaccacaattgacattcttccttaatcattggttttaaataatgaaaaaaaaaaagatttttctggagtctaataaatgctggctcctactcttccggaactacagatagaggtgggtagcaagcagaggctgagcccagtcgcagtcctgctgtaaactaccctcaaagcacttgattcagacctacataggtagaaccatattttgactctgactaactgagcaagacttgtaaaaaacatagaaaaggctgtcttattttgcaaaaattctaaaatatgtaagaaattagacatgggggctggagagatggctcagaggttaagagcactgactgctcttccgaaggtcctgagttcaaatcccagcaaccacatggtggctcacaaccatccataatgagatctgacgccctcttctggtgcatctgaagacagctacagtgtacttatacatatcaataaataaatctttaaaaaagaaaaaaagtaagacacgacagactacgaaacctaacagtgtcttttaatctgactatactttagttcctaatgaagaagcatacaccccagcggccaatagagtggaccctgaccagctgggccggactggatcgctaatcctcattcttgggatttatatgtcgcctgactctgtcctacaaaatgaggacaggcttcgttaccacgggtgctttgtaatggaattaacagtgataacaaaatgacattaccatatggcccttccaacacgtcgcttctatgcaacaccagaatctactcagcaccttgggtttcattcatgatgaatgagacataatcaaaaagcccaaatgtttagggaaatactaattttggtttcatagtagaacagtctaaagaacagcctcatggtctaaatattatataagtaaatatgaacatctacttcagcatagatactagctaatggccagcctcagtggcatgcctagcaagcacctgaaatctggtagtttactggggtgtgtgtgctatcatttcaccttcagagtgcctgttgttttataactcaggctttctggattttccagaatcccagggctggtatcagcacttgtacatattcattcgcatatattcatattctgtctgtctccccactccctcccttcctggtgtatatagatagaaaaggactgctgaacccagttcctcccaccatctactgtacactctggtcagctatttccaagtcgatggtaaacccaagctgtttttatacatgggtaaatctctgactaaaatttacatatgctcagaaaacagcaaaagtcaaatagggttcagagtaatacattatcttggtacttaaactcaattacagcttaacttcatatactaaaatcctaccagaattagcaactttcaccctttcaggactcatatggagacatacatctaagttatactttattggcaaaggcagtattttgaaaatgtatttggattttaatcttagcatgtagtttggataataggtaattcttatcataaattatcttacagggctctgtaattacagagcctacaactggcataattttggtttataaatagtgttcaagaaaagaattaagatatgatttttaaaatgaaccatgttggggctggagagacacatcaatggttaagagcatttactctcaaggctcaaatctagaagatctcttctattctgcccttgtgccttaaggcaggaaagttccctctcacagaatagcgggttgggtattgtgcatttattgtttgttttagtttgttctgaattgaaagtatgtagaataaaaagatgcagggaaaaaagagagcatttgcggctctcctggaagacccatgttaacttccccagcacctacatggcagctcacgacctcctccagttctgggggaagttcatgttctctctcagactccttgagtgtgtgtgtgcgtgcaaacaaggcttctttaaaaaggaagaaaagaaaaaaccttaccatcctatgagtgcctaatcagcaaacacaaggcacaacagtttgtctttgtaacttgccaactggctagaacttgattagcattaaggttagagcttggggctttccagctggctagccagtcaagtttcaggaatctacctgtctctctaccactcccagcactgaggttataggcatatgcagctgggcccattttatgtgggtgctggggatcagaactcatgacctcatgcttgcaggtatctcatgcttgtatctccacagtcccctcagtccctgttttcacatgagggccataaggactaaaaaggccagagataccactgagctagctacctttcctgaaacacacactattgctatactcaaagttgatgatgactgtagcctaactaattcccaagaaatttacttgttaaattcaaggcaagtacacagttactttaataacgaaaatatacataataaaacattattagtcttcctgacacatggacagttatgaaaatctttacatccacacaactcagatgtggctccccttttcatatagaaaagaagtacttcatctcaaatgttttccaggaaaccaactggctatctgtagtgttccagtgtaatagggagtgagagtgtttgtagcaggcttccaagtgactttaaactgaaccttgaaagttaatgtttcatctgaaggaaactctatgtaatgtcacaaaaataactgaatttcttaaccattagtactttaaaaatcttactgctgtattcaatggtttttatttaatcattcaaaaatagcaaggttcattttaagactagcttaaaatatattttaccttcagaaagatacaaacatttaatttgccagaacttatagaatcaaatatattagcatcaacaatgttaataatacgggcttgtgaattaaggtcagattgaaggttgtctcacatacccccatacatatattctaaattgttgttctcataaatttttaagaatggtaaagtctgcttgtatgggtcataacagactctactgtaaccatctctacagctatgtcaccaaagtagctgaaaactataaatcaatagaaatggctgtgtttgaataaaactatctgtctaaacaaaataaaattgcaagatgagcttgctgaatgctggcctaaagcataagttttcagctcagggacaacaatttcaaagttaaacttgtgaagcttttcaagcagagatgtcaccaagagagaacacggtttgctgcttacctgagccgggggcatgacagctgcaggtaaagggttagaaatcattggtccaaaaatgtccagatcatcactcagggctggcgctgtggctgggtttccattggtcacgggtgcctcagcaggaccatctgaaaggaatgcacacttctgtcaatatagaatctcttagttacaggaaacagggagctattttaaaattttattttttaaaaataagaacaattcaaaagaaaacactgtgttccttgctactctagaaccgactccccatcctaaagagaacacttcggtgttgcttcctctccagaagtagacttctggtttcaggcataactccagccgctcctggacaaatgggagcacaccactcacaatggcctgaagacatactttttaaaatcactgattgttttacctacactcatgccacacacacacacaatatagcagctccagaggctctctatcctagacttctcattatatggtcttttaatggtaagctcttgatatcattcccataaatattccttattactacacatacacaaaattattgaaaacccaattcttaataacctcttaattgaaacatttcaacctcacacttcagtaaacacaagctcccaatggattttaaaacatgctgtcattgctcaccaccttcgacaggtctcacagaaattgttttaatctattctgaagatcagtttctaattttcagtatttgaaaaagacagataaagattcattattatgatcacattgtcctagatgtttttaaagaatgtttgcatgttgttggtttctgtcccctgaaacatgatatctgtcttcaggtgctggggtagagatggaaggctgatcctgagggcctcctcagtgtggatcatctagttcagtagctatgtttgtacgacttaactatgcaacagtcttctgatccctagactagtgagctgtctgacctgtctggaaaccacatttctgtaaaagccatagggtcactgggatagaatgttggggaaaaaacaggtagtaacagcaggctgtatgaccaataatatatgaaaaatgtcatcttgaaatgcattattttatttgtttgatacaatactttaaaacccacataactacaaccatgcctaaccacaaaggattacctaaatttttcaaaattaagactcaatcttcaaatatttaataattccttgcactaagtaaaagaattaaatatttgaaaaatcattcatactgattctctatctttctattccactgtccttatacaaagttcagtgatgtatagaggaatacaggtggatatggtcatcaataaacaagcagaaggaaggaaaaacaactaggatatgatgagccctcaattaataaacaatattacaaagtagtagaggttaaatacattctcctgatcaaaggaccactattgtatgttctttactgatggaataaaggctaagatgttgaaaatatagttactaaaattaaacatggtaaatcataataaatcaggatatgttgtacacacacttaaaattaacctttagcattaatccagatttcaaactaagtcctcagaagcaacagtatccatcacacttttcttcctttaaaaatgcacctcagtttcctgtctgcataaatgcaaataccccagattccattcctcatgtttactagtgttcaacaaactgctgctgctcaataaatactaactgcattcaaagtttacttgaatagcagagttatcaggtggtcacaatctatttacagagataatgaaataatgtcaaagagcaacatgaaattttacgcactgccaatctagtttaaggtgagtaaaaaggtgataagctaacagatgttgtatttttcattaccatttttgatagagcatgaacatccaagcctttagtacaacctatcacaatgaactgtcaagtccaattcctcagttacctactgagccaa

SEQ ID NO: 562 - DNA, 1940 bp, Mus musculus
acacacacacacaccccaggcagaggtcgcgcaacccagcagagatcctcctccctacccctgcctctgcccgcaggcagcgcctggtgccaccgggctcagaccccgcagagagccttggcccttcccgcctccgccccgcagcccctctccgccagtagcagcgctgctatcttcccaccggagcactaggaggacgccggagtctgcagcgcccccgccccctcgctttttctttctttccctgctttgggatcttgctgtctggagccgggagaggttccgagaaggagagagcggcacaggtttctgccgcggcgctcgaacgggagcttagggacgcagcatcctcggtgtccacccgggatcgcagctgcaccggccgacatgtgacggaggaaagccctcagcattcccggcaaccgccttcaaaggggtcccggaacgctcgcccaggccagcagctggatcctcttagccctcagcgacgcgggacaggagcgacaaggtacaacgcctggtacgttccaggctcgcactcgggaaaagagcgcagcggggaccgccgcctggcttgcactcggcacaactccgggacctgcggagtgcggctggaccgtgtccagattcccgccgacttcatccagagtgacccaagaccctagccggtcctcctgcaccccctggagttctagcttgccctgcatctgcgccgaccccacaacgcccaggtccccgcaacgccccagtccggaaggggagcgcgcttgcggcttctccctgattgcagacgctgccgctgtcctaactgcacacagaggtcccctacccggagcctagtccttgcagggggtggtgtccgagacgctggggagcgcgcaccatgaagtccgcgctgtgcagccgcttcttcatcctcctgccctggatcctgattgtcatcatcatgttggacgtggacccccgcaggcccgcgccccaactcacttcccgtccctacttctctccccatgcagtgggctgcgggggctcccgagtcccgctccgacggagtagccccgggcgtgacgctgccgagaagcggaacgagtctcggcctcagctgcagccggagccgcgcttgcccaccatctatgccatcacacccacctacagtcgcccgcgaccgtggctgccgcgcgccaccgaacagcgcaacgcgggcctcgcctggctgcgccagaggcatcagcatcagagcgcgcaacccggcgtgctcttcttcgccgacgatgacaacacgtacagtctggagctcttccaggagatgaggaccactcgcaaggtttctgtctggcctgtgggactagttggtgggcgacgctatgaacgtccgttggtaaaaaatggcaaagttgttggctggtacaccggatggagagaagacaggccttttgccattgacatggctgggtttgctgtgagtctgcaagtcatcttgtccaatccgaaagctgtatttaagcgccgtggatcccagccagggatgcaagaatctgactttctaaagcagataacaacagttgaagaactggaaccaaaagctagtaactgcaccaaggttctcgtgtggcacactcggacagagaaggtcaatctagccaatgagccaaagtatcacctggacacagtgaacattgaggtgtagccgccaggaccagcaggtgaggacaggaagtctggagcgtgggctgctgcccattcaggtactgttcctttgccttcagcctttccttaccgccgatggacggccgtttcgacagctacctggatgctacaaaatgtgttgtcttcatttgtctgcatgtgttttctgaactggaagagttttgtagagtgaagccacatgtcactgaaaaggacaacgaagtatctcacactgctccctccctccctccctc

SEQ ID NO: 563 - protein, 290 aa, Mus musculus
LHTEVPYPEPSPCRGWCPRRWGARTMKSALCSRFFILLPWILIVIIMLDVDPRRPAPQLTSRPYFSPHAVGCGGSRVPLRRSSPGRDAAEKRNESRPQLQPEPRLPTIYAITPTYSRPRPWLPRATEQRNAGLAWLRQRHQHQSAQPGVLFFADDDNTYSLELFQEMRTTRKVSVWPVGLVGGRRYERPLVKNGKVVGWYTGWREDRPFAIDMAGFAVSLQVILSNPKAVFKRRGSQPGMQESDFLKQITTVEELEPKNCTKVLVWHTRTEKVNLANEPKYHLDTVNIEV

SEQ ID NO: 564 - DNA, 116297 bp, Homo sapiens
tccagaaacactgttgaagacacatccagaaataatgttttactagttacctgggcatcccttaacccagtcaacttaacacataaaattaagcatctcattccttctctcttaagctttttgccctattgccatccccaattatatctctgccattcagcctcctctcatataactcatatatctttgtctataactgtgaaaactgtaaaaaaggtatagtttgtatcacttttgtcaaaaatgtaaggttgcatgctgtcaaaaagaactagagttggacaatagttaaaattgtaaaaacagatattatttagaaactattgcaataggagaaaagagacatcagtaaagaactgggctcaatgccaaatacagcatggataagtgaggattttcagctatggaacagggcgggaagtcagtggatgaaaaattatgaagaggaaacatcaggggtagaaggattcttactaaaccgacctaagattattgcaaaaggcaagccaaggccatcagatatctagggtgcggaatgaggaatttgatgagatattgagagtgatcagatatgagagaaattctctctcaaccgatttagcaagattcttgctaaattgggtgaggaatacttgagaacagagtccaaggatgaggcctagttgaaaagagggctcaaaggagcctgtctaaagtttggtcaaggagagagcctttgtctgtacattaacaagtatgagcctcataacaaccctttcaagtaggcacagctggctagcacagtttgccactcctagtcaatttctctaaaaataccagtaataataccagataacacaagtagccctcagcaagtgcaagcactatttgaagaactccatatatatcaaataatacactaaattaattttctaaaaatttatattattagagacttttttccccctcttgatagtcaattgccctcgttaaaaagaaagaaaaagaaagtcattcctttgaacccacagtttgtatcccacggtacatcaattacagatgatccagtaaatacccccttcttcctccagttatagcaagtctgatgctggcagcaacaaagaggaagcatggagtgccaataaatccttagtctcaaaaaatattaccttctctaaatactgactaaaatttttatagagctatccctattacagatagaatttcactcaaacactatagaaattaattctatgaactaccaccacaagttcttattgttatgagagacaaaataggaggggccagaaatgggactttgatcttcttaccccaaattcaggcctctttactaccaatttgtgcttttacattacaatgaccacttgattactaatttttaaaaatgcaagcaatcagtcctattctgattgtcactgattcactgcatattcagaggccaaaagtggatcctacacaataataataataataataccagcagcaaaagcttactgaatacttactatattatttgatatagtttggctctgtccccacccaaaatctcatcttgaattgtaatccgaattgtaatccccatgagttgggggtgggacctcatgggagatgattagatcatggcggcagtttccccatgctgttctcatgatagtgagtgaattctcacaagatctgatggttttataaggcactttccctgcttcactctgcacttctctctcctgcaaccatgtgaagaagaacatgtttgcttcctgttctgtcatgattgttaagtttcctgaggcctccccggccatgcataaatgtgagtcaattaaacctctctcctttataaattaccaggtctcatgtatttcttcatagcagcatgagaatgcactaatagattattgttctaaggattttacatgtatcaactcatttaattacaacaactttaaatgccgaagtcacttatgtttagagatctattatctattcaactctttcacatttgtggaagacagttatagtggcaagaatgttggctttggaataaaaaaataggattggattcaaattctgtctctgacatttaactggctgtgtgaccttagaaaagtttcttactctacctacttttcagggttattgtattttaaagtatgttcagtgcattgaacagaccctggttcatgatcattcatatacagtgtctcttagttataggagcattatatttatttgacaggtgaggaaacaagtttagataggtaaccagtgagtggatacctaggatatggactcaggtctcctgattccaatgcaactctttttcccaggtaccatgttgccactctcttgacaagactgacctggatctcaagtaacttctaaagactgtaataactatgtcaggtggacagcgtttgcacacttaggtttctatgttttattaccaccactttctaagtaatcaaggcctaccagaccatatagagtgacaccctgaggcctagctgctggacgttatattagaatatgaatttcatctggaatttgagggcttttgtttttggttagctataatgtgactgttagaaatcatactatagtttgggaatgatgattttgctagcttaattgcattttatttgagtagaattccaagcacttttctttaaaaataatggactcaatttttcagacctcgtgctatttctgcttcagaaccaaactttcttaatgggctccttttctgggcatcccttaacccagtcaagctgacacataaaattaagcatcccacccttctctttgtgtggttaaattcctaggctggggctataaattgatagaggaataaaggaacaaccccccttttaactttaagagatttatatttcacatagaacaccaaatatgtgcctaagccaagtcatacttaacttggcactcaagaagcagaaattaataaatgtagtcatttcaatggtccacctgcaggctcataaatgcacctgttataaaaataataaaaaaattaattcaagccactgaactaccacatttagacaaaaatggaacttaaaacattgacaatgttccattattttaattattatattttggaggtaggttgctcatataacatgtgtttacctacaggaactagatttacttttgagagagtggacaggagatactttcttgtttatgaagatacacaaaccttctttaattatgtctgcagctactagataatatgcaactggttataagatttggtaacacaatatgatattaatagtgtaatgcaaacccatcaacagaactggaaaaatattcaaagtacatttcctatggagtttaccaagaaaccacctacactcattcattctacatacaagaaaactgaagaccagagatctgagacttgtccaagagctagtcagtaactggaactttctatggcctttatcttatacccactccccatattcatattgtttgctcccaatatttgtactcaacatatccaagaaaaggcatccaactaaaccaacagccatttggaaagaacatctttatttaagtaaacatagatggtttggatgcagaccctgctttcgctaaagtttatttttaaaatttgtaccctcaccaatcttcatacagaaaaactgtcttgagacagggtctctgtcacccaggctggagtgcagtgatgccatcatatttcacatatttcattatagcctcaaactcctgggctcaagcgatcctcctgtctcagccccccaaatagctgggactacagccatgccccaacacacccagctagttttgttttgttttgttttgttttgttttgttttgttttgtagatagagggtcttcctatttacctaggctggtgtcaaactcctggcctcaattacaggtgtgagccactataccctgcccaggggttgtatccttgatcaagatgtatccttgagtgaattacagatagatgtgatgaaaagctacattaatttttaaatttcatctaaaatagtaaaatggcttcatgataaaatgactgtaaatgcttctactatcttcttgtggaggaaaggcatggtgacagcagtttctgatctggctgcagagatgcctgagcccacggccaccaatatggcttacggtggccagtaccaatctgttgggggtgacacatctgggcaaaaccccaactggcactacactggccttaaaagccatagagtggggttagatgattcaactagtatttactgggaaaggaggttttcccgtggcagaaagttatgtcagttacggaagacagtattcacttagtaagccttctctttagtctcctccgtcaagcctgttgcctgcttaggcctctcgagtactgcttaggcctctcgagtaccatcaatcataccatagagtctggatttgaaatcccacccatcaatgtttcactttgaagctttgaggaagctgatgagttctgtactcagtgttcttcacctattcctttgttcccatgcatgcgtgtgcacacaaacacctgttggtttcatcctatcattatgcacaagttcctatcagattataattgcactaccaccatcacttcctatctgtattagtttgctacagctgctgtaacaaagttccacaaactgggtggcttaaacagcaaaaatttatgtctcactgttctggaggccaaaggttcaaaattaaggtgtccacagggccgcactcacttcaaatgcaccagggaagtatctgttccatgtgcctcccctagcttttggtggtttttttggaaagctttggcattccttgactggtggcagtatagctccaatctccacgtggtgttctccctgtgttcgagcccctgtgcccaaacatccccttttaataagaacaccattcacattggattagggatctaccctactccagtattaactcaccttaactgcttacatctgcaatgaccctgtttccaaatacggtcacattctgaggtactgggggttaggactttgatgtatgaattttgaggggatacattcaacccataatattttgcacaaatcaggcacttgatgtagttcttaaaacaagagcagttggaagcagtattatcttggcaaacaagtggtagaacataacctgttttacatattttaattttttatcatgggaatgttgacacatacgcaaaaataggcccaataatataaggaaccccaggtcttcatttcctagtttcaacaattacaacccatggccaatgttgttgcatgcccctcctgtaagatagagggagattctcttacaggtatgaactacagtgtctaaaattacattcatctacattatcttctttgattttcataacaaccagaaaggtaggttatgtagttttacaataaaattcatgtctaacaaattactattttaatgtaaatgccaatttttaagatagtgaggggaaaaagaaagaatgccagtatgtctttatgcatgttttattggtttttttgtgcattctaatccgttaataaaaggaaaggaaggaacactggtatgctatatcgtcagctcttattcacactgaatggaattagttttcaatggaattgttaaggtaaattgccaatttctacttttctagaaaatcacttttactgaaaaaccttgttcctaacccatcctataaaaatgggattttactgaactacctctaatgtcacattttgtacataatggctgcaaatgtctaaaatgttaaggaaacattataatttagaacaattctaggcaaaaagagatatttgtagaggatccggatgcataaaagaacaaatgagccatttaatttgtagtttagatgtcatttttctgacagttatcaatgaaactgtcatgtatccctggaatttggggctgttagaattatttattttgatatcattctttcacataattgtgtctgatattttaacagaaggtatttatgttcgcatgcatgtggacattatcaatactttcacgttacattattactcatacatgcattagttctgattctcttcaaaacctaatttgcataactacaatattatatatttataaatacttaattttgtacaatccttttcctacttgactaagaatatcaaagatgtccccaaatgcttacttgaaggttgatttagtcacactagcagaaccccaggctcaaatgtcaaatgggatcatttctgtacagtgcagtaaccatattgcagtctttctgctgctgaagttacagttgcatattactcatcaaggcaaaatgtaaatgtttagtgattatatgatatggtttttgttaattccccaaatgggattttttttacctttgtttatttgagaacaacaactgaatgctgaaatgcagtggctgatgccagcaatctaaggcttcattagtacagacgaagcaatgctcactttgctacataaataattagagagattaaatgaaaataaacactgagaggatgtgcagacgctccgaagttaggtaattattttaattactctagtgacttccagcaaccttcattatcagccacagatcaagcttaaattgttttatgtaagaatatcataagctatatggaaaagtaccatagcttacttagtgattatgcttcataaaaatgacattttctccaagctcccatttaaaggagttgtttccattccagcccctgatagactcgtgacatatttttaaagtataagtttttgcacttaaaaatgttttgccctggttttgtacttctaatggacatccttaatgataattttcgtatctttatatctttgctcagatttgatcataagagattcggggccacatattgagtggcttaatgtaaaacaatatggcatattcagccatctgaaataaatgtcacttggaatcatgtcatccttattgcatgacaagctataccttgcatttggggtaaatttatttcttctttcttccactccctagaccaacttgggaagactctaacatacactctaggaattatcttcattacaagcagaggtactatttagaagcattatcagtcctgtttagatttcattttatattcatttgataacgatgatccatcaagatctcttgtgttaaggtgttcttttgaggaagggttatctgtattgaaatatcatttattgactgcctgtgtaataatggctcttcttcaaactacccaacatacaccatttaatccttgcaagattcccatggagtatgtattattaaccccattttccagatgaggaaacaggccttgggaggttcactgattttctaaagttgcacagtagaaagtatcccagaggggactcaaacccaggtctgcctgactccaagaaccatgaagctccccaacagatgactgaatgaaataaacctgggtacaaatgctaagggtaatagaaaaaaatgaagtgacagtctgtgatgtgctaattaagtgttgtgttttatgacacccatgaattctgggcatgagctaaagtctcaaactgcaaattcaattgattttgaaagtgctttgggctaggcacaatggcttacatctgtaatcccagcactttgggaggccaaggcataaggactgcttgagcccaggagttcaagaccatcttgggtaataggagaccccagtctacaaaaactaaaatgaaaaaattagcagggtgtagcagcttatatctgtagttcctgctactcaaaaagctgaggcaggaggattgcttgagcccaggacatcgagactgaagtgagctgtgttcaagtcactgcaccccagccttggcattgaagagagaccctgtctgtctgtctttctctctctctctctctctcacacacacagacacacacacacacacacacacacacacacacacacagtgtttcatctctgaatagccctggttcctggagaggatgtaatagcaaataggttttatggcatagttggaccaaccaaaagttccccactaacaaaggttagtgatgtttttagtacaattcagtaacaacatgaattttattccagcaaacacaaggcattttaaccaaatttaaaatttccaacaggatgaaccagacttcagtaacttaggggagaggggtgcactgcttcctaagaaaaaccttttcttaaagggaggccttgacttctttcctcttccccatcctggcatgatgctggtgcagaatacatttccaaggttgtgttatattcagaggcacattaggctattcgagagaatgggaagaggtctaatggcttcgttgttttctatgtttaggatgcactaatctgcagagtttaatgtatgagttgtggatggcacagggaagttgggacagaaggctagctctagggagttgttggggtggctgggtgttagtctgaaatttcactctcacgtttcagaatctgaagaggaagttagggaaattcacagatgagccaatgccttttaacaggtggggggttcaggggtaggactgggagaagaggagctgtcagaaaagctggagagccattcgccccagagctctcagttgcaccagaacgcacagtcggagagagatttatttgtgaacaagcccgagaaaggcagacaacccagacaagatgggctcagaaattatttatcataggctagggcagaacagtctggagctttccttctgctttgcaagcacttccctgggacctgcctgggaagcacagcccttcttcctggtaagttacagaaggtcaggcactcagctagtaggccagctagacagcaaaaagtgtctaaactaagtgccaactgtttacttggggtcttccagaccctatcatggttctattcgtcatggtacactctgtttgatttcaatcgcaccatctttatatgtaggaaggccaaaccggcccggctgtgttgggtgggatttctgcaggccatgcagtgaggacgccactagctatagacacacgcaggagacccacgttctatttccatatgccacttgccactgacctcagagaaatcattttaaaccctgaacctcagcttccttatcctgaaaatgaaggccattctacttcttaggccttcttgacaggagccttgggagagccaaacggagtaattccggtgacagcgaagaactgggagggaccgtgactccaaattactgaagaaaaataagttaaacatgctcggctggagttttaggaattccacccgcccccacccgccatgatcaaactgcagtcaggcagcagccctccgaattgattctttcttatggactgtctcacatgccaaacacctatgtgcagcacccctccatctccgtgggctcctattgatgtctgccttgcagtgaaagcgctttttgttgccgctgttcgatacaccccagcacatcaacgcagcagctgggagcaggaggaggaatcccttcgctttctcccctcctttcactccgaaccctaggcatcagcagcaacgcgcgtagcccggcaaatttccgcacgtgaatggattttcctggctcatctccaaagaccttgcggtatttcacaaagctgaagagaggtgaacgagcatcaccccctccaggaggtcgtgcagccccgcggggacgctcctcccgctcctccacccgcggtgcagcggccgcctcccgagcttgctcgcggggccgttagcgccagacccggcggagagccaaggggtccctccgcgcctccctctcgcagcccctctccaccagtagcagcgctgctgtcttcccacaggaggacttgggaggacgctggattctgcagcgcccccgccccctcgctttttctttctttccttgctttgggatcttgctgctggatccggagaggttctgagaagacaagagcaagggactgagagcaggcttccgctgcggcgcgcgaacacagccgggacacaacccccagcgtctccacccgctcctcgccaccccggcgggaatgtgaggaaggaaagcccccagcgccgccgcccgccctcgaaggcgtcccagagagcgtcctgggggcccgcggctggagcccttgtgcccgcagcaccgccggactggagcggcgaggcgcaccgggtgccgcttctcggcttccactcttcagaaagagcgcggtggggatcagcgcctttcccgcactcggcacaactccgggaccggcggcgcgcggctggaccgagtcccgcttcccgccagctcacctggagtcgggggcagcccctgcccgcccgcctgcaccccttgtcgctctagcttgcgcgaacctgccgctcctccacgcccaggtagtgagccccgcggctccaggtctctgcagcgccctcggccccatggacagcgcacccatcaccactccctaagtgctggcgccgccgctgtccaagctgcgcactggggtccctcggctcgcccctctctggggtgtccgagaggccagggagcgtgcaccatgaagtccgcgcttttcacccgcttctttatcctcctgccctggatcctaattgtcatcatcatgctcgacgtggacacgcgcaggccagtgcccccgctcaccccgcgcccctacttctctccctacgcggtgggccgcgggggcgcccgactcccgctccgcaggggcggcccggctcacgggacccaaaagcgcaaccagtctcggccgcagccacagccggagccgcagctgcccaccatctatgccatcacgcccacctacagccgcccggtgcagaaagcggagctgacccgcctggccaacacgttccgccaggtggcgcagctgcactggatcctggtggaggacgcggcggcgcgcagcgagctggtgagccgcttcctggcgcgggccgggctgcccagcactcacctgcacgtgcccacgccgcggcgctacaagcggcccgggctgccgcgcgccactgagcagcgcaacgcgggcctcgcctggctgcgccagaggcaccagcaccagcgcgcgcagcccggcgtgctcttcttcgctgacgacgacaacacctatagtctggagctcttccaggaggtaaaggccagcctgccccgctgggtgggcgagggcgggagtgggcctccgggccggccgggctgcagtcacacgccccttgcactccgggtgcacttttgagttctcagttctccgtgcgcgcattcggggcaccgagtggagccgctccttgctggcactccgcagcctccgctggccgtgggggtggaggggctgtgtgtgagaggatcactgtggcttaaggggcgggagtctgccctggggcttttctgtgtggagattgtgtcaagagaatagcacaggtgtgaggcgcgggaatgatttccaggggccaggctcctgacgacctgaggatggagcttagacctgcaggcgctggctgcgataggagatcagggagggacctgcaccgtagcgggtggcggtggaggggtgggggtggtggggacgggtaggctaggtgttactcgaggcttttcagtgcctacaggtgtgattctcagtctaggaccatatagggagaaaggtggagatagcctagagagaaatttgactattgcggcccactggcacggaaatggttgttagaagaaacactgacttctatggaggtccttcctctctttcccacacctcacaaaagtcttttctgaccctcaagattactttttttttttttttgcaagaaaaccctttctggaaaataaactgttctgccctgtggttacgtcttttttgcagcccaaggtaaacatctgggctgcctgatcccttttcacaacctttctctaaggcctctttttggcgagttagccaggacacatttggcggggccttttgcgtctttctggtgcagccaggtcctgagtgcatccgggctccctgctgttgagatggcccatgagttccctgggatggccacgcgcgcaccgcccccccccgccgcccccggcaggcacagggttagaacaggtgttcttccttgaggctggtatcttgcggtgtgtgtgtgtgtagcctgcaaatgagactgagtggcatgggttttctcagttttcttctgtctacgcaattacagccaaagaaaatcttcttgattgatttgacgccctgtgagactgttgccttcctccacctgaaatttcttgacgtcctgcttcagagactccccctcaattccccttctcccaagtaaactggacattgggaaaatactatgtgtgagttggacactgaactgctaaaataatctgtgtgtctggtcatcagataccctaactgcttcccacactttcatcctcatctctgggttgctttcttaaccccagggcagagctattctgtactcttccagtttaatttttctgtgtggctttaaaaaaattttcttaaaggtaattgccgccttcatttctattcatcctctctttcatgaataaaaggcacagtaattgtccttcatcttttcttttccatcctttcactgtagagggctttctttccacgtttctccaaatgaataaataagcttggcattgtatagtatggtccttactcaacccaagattagagataccatctgacgtttttaactgggcttttaatcctgcatcagtgctcccccctccaaaagaaaaaagtggcttgcatctgaagcaaagactgtacatttcaatgcaccacaatttttaaaccgcaaggtctttttattttcttctacaacttcgaagttgcctcgtctgtgacaatatgtggtcttgttgaagtaaaatagtgcacattactgttaatgaacactgtaggaggctagattgtgaaggaggaatgatttagtttattccgagcttctagcctcttggtgtgaggtgttagaagaattggcacacgcaggcagtgaaatgattcaggacacagccttcctttgatgcttcccaaactgaaaggagggtttgttggtgggggatattaagcatcaggagaaaattccagtaggtttttcattagtccatatgggggaaaatataaaatgaggagagggtaaggagaaaaaaatagtgttgtcagagaggacattataaaggaaaaacgcaaaactttcaagacactaaacttttgtacaattggaagtaatgcaataaaataaaataagagcatatgcaacattttttaatggtgaggtgccacatatacaaaaaatacaacaggtttattgtttctgttgtcattttaagcataataggcatgacatacttagaatttaagttttctatctcctggaggtcactcccagacagtaattttatgactagtacctttctctaccactcccccaccagcattgtttttggacagattaggcctttgtttgacatatatgtatgctgatacattcagttttctttattataacattttccatgcatggcaaacattattgaattccatcattaggctagtggaatttatgaattcttagtcttgtgcattttccagaatttggaaatccgtaggtttatttgtgagacagcctaccatacacccgttctcagattaatgattccgtgtaaattatagtttagacattgttctctggagaaaacgtaggaccagataaaacattgaaaatctacagctccttgggggaaagcaaagatgctgattaggaatgctatagggctgaggcatatatctcagccctttatattgtgcatgcacaccaattagtttttcagtaattcacagtacttaaggaaagaataccccaagtcaggtttcatcttttattcatggtgcttctaatttccatggttgatgttaaagtggataagataaaaggaggaaaatgaaccacgtacaaattagctccgtaagtattggctgcaaatgaaggaaagcaaaggatgaaaggtctccaaattaaattaaagacgcaacaggcaatctgtgttcaattattcctccctggtaactggaatggtgctttgtcatctcatacagctaactaattttcagcctttcctttcaactgatctgcattgccaggaaagaaatatttgcattgaatactcttatgttaacagccaaatccatttgcaaatgaagtttagtgtgaatcttagctacagaaatgggcctgttcattggagaaggaggtggtggggtttttcaggtttcaaaaatctcaacagctactcctcttcttcctgtggcattgatggggttttgcactgtggatcacaggtaatcctgcctccctgtgcatcctatccatctccctctctggaaaagcttacttgcaaaggatttaagctgctttaataaaagccacaactacagataaatgtgactttatttttagtcatgttttcaataacactattgatcagatttctgtttttcaccagaaaaccttcaaagctttcttaaatttaaaacagatgcttttcaggtgaagttggtttcacctctggaaatcaattgaattgaaatactaaaaaaaaatagcactttccaagcaagaaaaaaaaaaactttagaaattttgaagttaatgaaataagactggaagacaggctggctctcagacacttaaggggttatcaaaggagtcagtgactgagattgcatctagaagatgtttctggaaagcaatgaactaaagaagccccttgcttgaatcttttgttgggtgctattcagctatttgtgtactaggcagataaaggagttttgaggattaattctgtcttgcttttttttcagaagtatttgtgtgctttccctctttacctgctgcttattggagtcataatctgaaggatatacgagtttacaatgtttggccctttcccccctaaatagtacttctatttatgtttcctgaaaggaaacatgagatttaccttttacccttggtacatttactttatttagggtaattctttttaaagtgaaggaacctagaagattttcttgggtggaacattaaaagaccattttacctgaaatgtgccccttgtattttatttctttccctctgaaagctattaagagtcatgccataggtctgataaaatgtgagaattttatagaaatgtatatatgaaactacagccaattttcttaggctataaatgttaggttttctttattctccctgggtgtacagtatttgaattatggttcgtttttgataagagttttctttggagaccagtagttttcatttggatgttgatattttaatggaccagaaataacaatttgggcctaaagatgttctcccttctgcctcttcctattgtctttttccatcattcttcctctctcaacctacttttcactgatgattctgtctcgtgaatagacatgaaaacatgttcggattattgcttggtgcaatgaatgttgtatcttttaaacatttaggctgttgctgcttcttggaaaccattgtgggtggctcccttttttctgtctactctgcttgcctctaaattacaagctggtaaattttctcttgtgtgaacagtaatggaatagtaattgcttttaaggcatgctgcaaaagcaaaatagaaaatccaaagtcaatggtcttatttattaactatttcaggtggtattcaagtagtggtaggttttttgttgtcgtcattgttttttgcacagaattcaatattgtacagatatgtctatttaaatgttttggactctggaatattcagcctgtgtaagttaacacatatatatttgattcacagtgcttgtgaagcatgaaatttaagttttgcatggagctcaaattctcccaccaaaatacaaataaaattgttataccagtacatagatagatgcataggtaggtttagaatacatctccaaagcacagaaataaaactaagataatttgttgttcatgcctggtaatttttgcatacaattttaaataaatgttaataccctatatcatggatacaagcaaaatatagttgacataaattgagcatttactataggcaaagaagtacccttagggttttacgtgtattatttaatcttcataacaccctgaggtaggtaatagtactgtctctgtttgtttgctgttttaatactaatgctaatatttagttatggacgcagtcccttggtgagtacagaggacttaaacaaatgcaacctgacggtaatatagttgtttacctctgatctatataatcagtatccccgtttttaacagaagcactaggaagtaacttgaaaatgtcatgtagctgttatgtggcagagatagaattttgaacccaggtgccctggttctagcgcctgcattgttgactgtcctgaaactcatgtcatttaacacatgaaaatatgtcatcattataataagtaaagcacctgattagcaggagccttgtgatattattactgtcttctgccatttttgaattcaggtctttcttcttggttatgtcaactcttagctttctcctttgaccttttgttacttttttcctttttgttgttaatgtattacattgaaaaataaaattttttttttttgcaagaaaatgtactttattagctttctttgttctgtgggttgatcttcctggatatttctttattttattttattttattattattatactttaagttttagggtacatgtgcacaatgtgcaggttagttacatatgtatacatgtgccatgctggtgtgctgcacccattaactcgtcttttagcattaggtatatctcctaatgctctccctccccccaacccccaccccacaacagtccccagagtgtgatgttccccttcctgtgtccatgtgttctcattgttcaattcccatctatgagtgagaacatgtggtgtttggttttttgtccttgtgatagtttactgagaatgatgatttccaatttcatccatgtccctgcaaaggacatgaactcatcattttttatggctgcatagtattccatggtgtatatatgccacattttcttaatccagtctatcattgttggacatttgggttggttccaagtctttgctattgtgaatagtgccgcaataaacatacatgtgcatgtgtctttatagcagcatgatttatagtcctttgggtatatacccagtaatgggatggctggatcaaatgatatttctagttctagatccctgaggaatcaccacactgacttccacaatggttgaactagtttacagtcccaccaacagtgtaaaagtgttcctatttctccacatcctctccagcacctgttgtttcctgactttttaatgattgccattctaactggtgtgagatggtatctcattgtggttttgatttgcatttctctgatggccagtgatgctgagcattttttcatgtgtcttttggctgcataaatgtttcttttgagaagtgtctgttcatgtccttcacccacttgttgatggggttgtttgttttttcttgtaaatttgtttgagttcattgtagattctggatattagccctttgtcagatgagtaggttgcgaaaatattctcccattttgtaggttgcctgttcactctgatggtagtttcttttgctgtgcagaagctctttagtttaattagatcccatttgtcaattttggcttttgttgccaatgcttttggtgttttagacatgaagtccttgcccatgcctatgtcctgaatggtaatgcctaggttttcttctagggtttttatggttttaggtctaacgtttaagtttccatcttgaattaatttttgtataaggtgtaaggaagggatccagtttcagctttctacatatggctagccagttttcccaacaccatttattaaatagggaatcctttccccattgcttgtttttctcaggtttgtcaaagatcagatagttgtagatatgcagcgttatttctgagggctctgttctgttccattgatctatatctctgttttggtaactgtagccttgtagtatagtttgaagtcaggtagtgtgatgcctccagctttgttcttttggcttaggattgacttgacgatgtgggttcttttttggttccatatgaactttaaagtagttttttccaattctgtgaagaaagtcattggtagcttgatggggatggcattgaatctataaattaccttgggcagtatggccattttcacgatattgattcttcctacccatgagcatggaatgttcttccatttgtttgtatcctcttttatttcattgagcagtggtttgtagttctccttgaagaggtccttcacgtcccttgtaagttggattcctaagtattttattatctttgaagcaattgtgcatgggagttcactcatgatttggctctctgtttgtctgttattggtgtataagaatgcttgtgatttttgtacattgattttgtatcctgagactttgctgaagttgcttatcagcttaaggagatttttggctgagacaatggggttttctagatatacaaccatgtcatctgcaaacagggacaatttgacttcctcttttcctaattgaataccctttatctccttctcctgcctaattaccctggccagaacttccaacactatgttgaataggggtggtgagagagggcatccctgtcttgtgcccgttttcaaagggaatgcctccagtttttgcccattcagtatgatattggctgtgggcttgtcatagatagctcttattattttgagatacgtcccatcaatacctaatttattgagaatttttagcatgaagggttgttgaattttgtcaaaggccttttctgcatctattaagataatcatgtggtttttgtctttggttctgtttatatgctggattacatttattgatttgcgtatattgaaccagccttgcatcccagggatgaagtccacttgatcatggtgagtaaggttttgatgtgctgctggattcggtttgctagtattttattgaggatttttgcatcaatgttcatcaaggatattggtctaaaattctcttttttggctgtgtctctgcccggctttggtatcaggatgatgctggcctcataaaatgagttagggaggattccctctttttctattgattggaatagtttcagaaggaatggtaccagttcctccttgtacctctggtagaattcggctgtgaatccatctggtcctggactctttttggttggtaagctattgattattcccacaatttcagagcctgttattggtctattcagagattcaacttcttcctggtttagtcttcggagggtgtatgtgtcgaggaatttatccatttcttctagattttctagtttatttgcgtagaggtgtttgtagtattctctgatggtagtttctatttctgtgggatcggtggtgatatcccctttatcattttttttgtgtctatttgatttttctctcttttcttctttattagtcttgctagtggtctatcaattttgttgatcctttcaaataaccagctcctggattcattaattttttgaagggttttttgtgtctctatttccttcagttctgctctgattttagttatttcttgccttctgctagcttttgaatgtgtttgctcttgcttttctagttcttttaattgtgatgttagggtgtcaattttgaatctttcctgctttctcttgtgggcatttagtgctataaatttccctctacacactgctttgaatgtgtcccagagattctggtatgttgtgtctttgttctcgttggtttcaaagaacatctttttttctgccttcatttcgttatgtacccagtagtcattcaggagcaggttgttcagtttccatgcagttgtgcagttttgagtaagtttcttaatcctgagttctagtttgattgcactgtggtctgagagacagtttgttataatttctgttcttttgcatttgctgaggagagctttacttccaactatgtggtcaattttggaataggtgtggtgtggtgctgaaaaaaatgtatattctgttgatttggggtggagagttctttagatgtgtattaggtccgcttggtgcagagctgagttcaattcctgtgtatccttgttaactttctgtctcgttgatctgtctaatgttgacagtggggtgttaaagtctcccattattattgtttgggagtccaagtctctttgtaggtcactcaggacttgctttatgaatctgggtgctcctgtattgggtgcatttatatttaggatagttagctcttcttgttgaattgatccctttaccgttatgtaacggccttctttgtctcttttgatctttgttggtttaaagtctgttttatcagagactaggattgcaacccctgcctttttttgttttccatttgcttggtagatcttcttccatccttttattttgagcctatgtgtgtctctgcacgtgagatgggtttcctgaatacagcacactgatgggtcttgactctttatccccagtcaagacccatcagtctgtgtcttttaattggagcatttagtccatttacatttaaagttaatattgttatgtgtgaatttgatcctgtcattatgatgttagctggttattttgctcgttagttgatgcagtttcttcctagcctcgatggtctttacgttttggcatgattttgcagtggctggtaccggttgtgcctttccatgtttagtgcttccttcaggagctcttttagggcaggcctggtggtggcaaaatctctcagcatttgcttgtctgtaaagtattttatttctccttcacttatgaagcttagtttggctggatatgagattctgggttgaaaattcttttctttaagattgttgaatattggcccccactctcttctggcttgtagagtttctgccgagagatcggctgttagtctgatgggcttccctttgtgggtaacccgacctttctctctggctgcccttaccattttttccttcatttcaactttggtgaatctgacaattatgtgtcttggagttgctcttctcgaggagtatctttgtggcattctctgtatttactgaatctgaatgttggcctgccatactagattggggaaattctcctggataatatcgtgccgagtgttttccaactcggttccatcctccccgtcactttcaggtacacaatcagacgtagattttgtcttttcacatagtcccatatttcttggaggctttgttcatttctttttattcttttttctctaaacttcccttcttgtttcatttcattcatttcatcttccatcactgataccctttcttccagttgatcgcatcagctcctgaggcttctgcattcttcatgtagttcttgagccttggctttcagctccatcagctcctttaagcacttctctgtattggttattctagttatacattcgtctaaatttttttcaaagtttttaacttctttgcctttggcttgaatttcctcctgtagctcggagtagtttgaacgtctgaagccttcttctctcaactcgtcaaagtcattctctgtccagctttgttccgttgctggtgaggaactgtgttcctttgggggaggagaggtgctctgctttttagagtttccagtttttctgctctgttttttccccatctttgtggttttatctacttttggtctttgatgatggtgatgtacagatgggtttttggtgtagatgtcctttctgtttgttagttttccttctaacagacaggaccctcagctgcaggtctgttggagtttgctagagatccactccagaccctgtttgcctggttatcagcagcggtggctgcagaacagcgtattttcgtgaaccgcgaatgctgctttctgatcgttcctctggaagttttgtctcagaggagtacctggccgtgtgaggtgtcagtctgcccctactggggggtgcctcccagttaggctgctcgggggtcaggggtcagggacccacttgaggaggcagtctgcctgttctcagatctccagctgcgtgctgggagaaccactgctcttttcaaagctgtcagacagggacatttaagtctgcagaggttactgccatctttttgtttgtctgtgccctgtcctcagaggtggagcctacagaggcaggcaggcctccttgagctgtggtggcctccacccagttggagcttcccagctgctttgtttacctaagcaagcctgggcaattgcgggcacccctcccccagcctcgctgccgccttgcagtcgccttgcagtttgatctcagacctgtgctagcaatcagcgagactccgtgggcgccatgtgtgggatataatctcctggtgcgccgttttttaagcctgtcagaaaagtgcagtattagggtgggagtgacccgattttccaggtgccctctgtcacccctttctttgactaggaaagggaactccctgaccccttgcgcttcccgagtgaggcaatgcctcgccctgctttcgcttgggcacggtgtgctgcacccactgtcctgcgcccactgtctggcactccctagtgagatgaacccggtacctcagatggaaatgcagaaatcacccatcttctgcgtcgctcacgctgggagctgtagaccggagctgttcctatttggccatcgtggctgccagctcaaaattatatgttaatatatttgttgtgtagactataatgttttgatatagggatacattgtggaattactaaagctaattaatatattcattaccttacaattttatcattttttgtgtgtgtggtgaaaacatttaaaatctcctcagcagtttgcaggtgtacaatacattgttaataactatagtcaccaatttgtgttgcagttgatcttctaaatgtattctttctaactgaaattttgtatcctttgaccaaacatttccccaattcctacccctaccttttttctcctgataatatttggtcttgtgaaaattttatctcatctctcactatctctgatttatagaccatttgatatttatttttacaagctagataaaaactgccaagttagtatataaactgtagtcttttattttttaaactacgtattcttgtgaataagaattgataacttctatagatattaaaattaagtttttcctcatttgctatgtatacatcaacaactctgtctcctaggcgtgtatcatgtcagggcaggcagaactgaacggaagaataattttcagggtagaatgggagaaaatacagaattatgtgaagcaggctcaggggtttattattgaaacagaggagaggagctgggggcctgagccaatttgcgctgaagccaatgtggctgagatggctccttctgggaacagagatgtgcttggaggagccttggttctcctcaccaatataccccttatgttggctgctgcaggcagcactaccaggttcatttgactgctcacttgttggtagaaggtttgttaattttcttgtccgatttcttctgagattaggaatttccttggattaaaaacaaaataaatcattggttgagtctttttgcaggttaaaaaaaacaagaaaacttggaggtggatttgctgaggaggacagccatgttctctaccagaagtcagattgggtctttttcctaaaacaactaaaaacgcagtagtttgtttactttttaaaatccgtctcctccacctgtggaaagagaactttaaacactatttatgttacatgctgaatctaagactgttgttccttcagcttgaactgcagatattcctaaattgtacctgcatctctagtgaaagctgagtgtgctaaatgctgaccattctccattaactgagatttcagttatctaagagatttgcatcttagcagtactactgtattactctgtaagattccttctacctacctgagctcaaacttcatcctattcagaagatgttttaatataacaagtcagtaggccttctctaccacttaacaaatattaattgagcacctactgtgtacaaggcactgtgcttaattaagtcagggagtatttcagctccctgaaacagagagcatctcagccctcccagattgattctctggactaaatatgcatggtagcttcagtgcctgttgagagaaatgaatgtgtctgggagtgtaaagcagaggtccctaatggagttgttgattgtaggagtaattgtggaggaagtgacatttgagctgagaagtaaagaacaacagggcctagtgggtgatgggacagggatgaaggagccctccagagagagaaaaccatatttgtggacctgaatactcagagacctgaaggatgttcttgatggcaagaggctgggtggtgagaagatgaggtggagaaataggcagccacttttccatcttctgcatgtcaaagtgctgttctcatctttgagagaagctgtcctgtaaagaactcttcaggttctgtgtatttggaagtggcatctaaatcatgcccattggaatcttcttcctggatactatcatgtctttatgtaaacttgtgaatttaaaagtatacatagcagtgtcggagcaggctttcctttttatttttttgcatctggttttcagaatgcccattaggcaaatttttgacctttaactttttcaataggccttggataaggtgggtggtaaattgataggaaaactatagataagtatttgtccatctagttgtaccaaagaagtggtaatatagacttttgtggatcctttagagcacctgatatcacattaaataatatgatacctgaatatgtatttcagttgtttctcccactagaataccagggtaggaattttcttttgtttactgttgtatctgtagtgtccagagcagtgcctagcatgcagtgaatgcttattaaatattttttgaatgaatgaattataagacacttggaagctgagggaatttattataaacagagtttaatccctgaaaggagtcctgcacagagattgtcaatcaaatcatagttttgaagtctgtgttgtatgtctaagattgtattgagccctttaaatagaaactggaagataaacgtggtccctactctgattctaagagcttttatactaaaaggaaagagaatgtcatgagcatttatgtatatagcaaggcattaccatcaacagccattaaaaggggaggtttgtcaaggtggtcgtgagtcagttgagtatttggcctcttcacacgtgtgagaggctggaggctggtggggagctcacataggcgtaacagcccatgttcaaatccagcttcactgcttagtgtttgcattacattggcaagggttgactgcctcgagtgattgttttaagtgctctaggcaagtaataaatattagttctttttgccttgttctttccactatgggtgactgccctaattgagggtataccagataattgcactgtcttgatttgttaagtgcctctaaatgttcttctcctgacatctggactatgtttctagaggcctagggggaggaggaggtaaaggcacttgactttcccaaattagtctgtacccaagtggaactgcataaattgggtaccttaattacaccattgggtattactagggtgattacagggacaagagttaaatagggcttgtctacaaagagtcctgggaggaagtgagatgtgagagaactaaaagcatctaaaggacattttagatggagaggaggtgaagggtgttctcctgtgggttctgacttctgatgctaactcctaacggtgaaagctaggaagttgacttacatgtagctcagaggaggatgctaacctggctcactgcaacttccacctcctggattgaagcgattcccctgcttcagcctcctgagtagctaggattacaggtgcaagccatcatgcctggctaatttttgtatttttagtaaaggtggggtttcaacatgttggccaggttggtctcaaactcctgacctcaggtgatgcacccacctcggtttcccaaagtgctgggattacaggtgtgagccacggtgcctggccctaggtgtggtttttaattactatgtaatcccagggcccagtgtggacctaggacatagttactacatgatacagtgattatcgttggcacaaatgaatgaatcaaagagatagtatgttacaaaggagagggcacgaaatagattttttttttgagcacatgattagaagcagtattttaaggtcatttcctgggctgggaaggttaggaatattcttctgaccagcacctgttggaggaggtggaaaggatcccagatgccagccttctctgtgtccacccttctcccagccttgcctggggacactgagccccttgctgggcttcaagtgcctgatgcttttttgggaagccccataagcttgcttctctttttgcaaacattgcttaagttttcattaataaaaacattctaaagcttatttagtccagaatgaggaaaatgtaggagagagagagggtgtgggtgtgtgtgtggggcgagggggtgtctgtgtgtggttttacctacctatgtggttgccccttcttacctgtgaatgcagtggctgctttccttgttccttctccacagaccctgtaccctccatttcagtttctggcaagaattgtggccagacccagggatctgatgcagtggtccccaacattttctggtcacataatttctaaaagaattttgtaacattaaccctctgggatattttttaattgacatctacattttattttttttattattttattattattatactttaagttttagggtacatgtgcacaatgtgcaggttagttacatatgtatacatgtgccatgctggtgtgctgcacccattaactagtcttttagcattaggtatatctcctaatgctatccctccccccaacccccaccccacaacagtccccagagtgtgatgttccccttcctgtgtctgtgttctcattgttcaattcccatctatgagtgagaacatgcggtgttggttttttgtccttgcaatagtttactgagaatgatgatttccaatttcatccatgtccctgcaaaggacatgaactcatcattttttatggctgcatagtattccatggtgtatatatgccacattttcttaatccagtctatcattgttggacatttgggttggttccaagtctttgctattgtgaatagtgctgcaataaacatacatgtgcatgtgtctttatagcagcatgatttatagtcctttgggtatatacccagtaatgggatggctggatcaaatggtatttctagttctagatccctgaggaatcgccgcactgacttccacaatggttttactagtttacagtcccaccaacagtgtaaaagtgttcctatttctccacatcctctccagcacctgttgtttcctgactttttaatgatcaccattctaactggtgtgagatggtatctcattgtggttttgatttgcatttctctgatggccagtgatgagcgttttttcatatgtcttttggctgcataaatgtcttcttttgagaagtgtctattcatgtccttcgcccacttgttgatggggttggttggttttttcttgtaaatttgtttgagttcattgtagattctggatattagccctttgtcagatgagtaggttgcgaatattttctcccattttgtaggttgcctgttcactctgatggtagtttcttttgctgtgcagaagctctttagtttaattagatcccatttgtcaattttggcttttgttgccaatgcttttggtgttttagacatgaagtccttgcccatgcctatgtcctgaatggtaatgcctaggttttcttctagggtttttatggttttaggtctaacgtttaagtttccatcttgaattaatttttgtataaggtgtaaggaagggatccagtttcagctttctacatatggctagccagttttcccagcactatttattaaatagggaatcctttccccattgcttgtttttctcaggtttgtcaaagatcagatagttgtagatatgcagcgttatttctgagggctctgttctgttccattgatctatatctctgttttggtaccagtaccatgctgttttggttactgtagccttgtagtatagtttgaagtcaggtagtgtgatgcctccagctttgttcttttggcttaggattgacttgacgatgtgggctcttttatggttccatataaactttaaagtagttttttccaattctgtgaagaaagtcattggtagcttgatggggatggcattgaatctataaattaccttgggcagtatggccattttcacaatattgattcttcctacccatgagcatggaatgttcttccatttgtttgtatcctcttttatttcattgagcagtggtttgtagttctccttgaagaggtccttcacgtcccttgtaagttggattcctaagtattttattatctttgaagcaattgtgcatgggagttcactcatgatttggctctctgtttgtctgttattggtgtataagaatgcttgtgatttttgtacattgattttgtatcctgagactttgctgaagttgcttatcagcttaaggagatttttggctgagacaatggggttttgtagatatacaatcatgtcgtctgcaaacagggacaatttgactccctcttttcctaattgaataccctttatgtccttcttctgcctaattgccctggccagaacttccaacactatgttgaataggagtggtgagagagggcatccctgtcttgtgcccgttttcaaagggaatgcctccagtttttgcccattcagtatgatattggctgtgggcttgtcatagatagctcttattattttgagatacgtcccatcaatacctaatttattgagagtttttagcatgaagcgttgttgaattttgtcaaaggccttttctgcatctattgagataatcatgtggtttttgtctttggttctgtttatatgctggattacatttattgatttgcatatattgaaccagccttgcatcccagggatgaagcccacttgatcatggtgaataagctttttgatgtgctgctggattcggtttgccagtattttattgaggatttttgcatccatgttcatcaaggatattggtctaaaattctcttttttggctgtgtctctgcccggctttggtatcaggatgatgctggcctcataaaatgagttagggaggattccctctttttctattgattggaatagtttcagaaggaatggtaccagttcctccttgtacctctggtagaattcggctgtgaatccatctggtcctggactctttttggttggtaagctattgattattgccacaatttcagagcctgttattggtctattcagagattcaacttcttcctggtttagtcttgggagggtgtatgtgccgaggaatttatccatttcttctagattttccagtttatttgcgtagaggtgtttatagtattctctgatggtagtttctatttctgtgggatcggtggtgatatcccctttatcatttttttgtgtctatttgatttttctctcttttcttctttattagtcttgctagtggtctatcaattttgttgatcctttcaaataaccagctcctggattcattaattttttgaagggttttttgtgtctctatttccttcagttctgctctgattttagttatttcttgccttctgctagcttttgaatgtgtttgctcttgcttctttagttcttttaattgtgatgttagggtgtcaattttggatctttcctgctttctcttgtgggcatttagtgctataaatttccctctacacactgctttgaatgtatcccagagattctggtatgttgtgtctttgttctcgttggtttcaaagaacatctttatttctgccttcatttcgttatgtacccagtagtcattcaggagcaggttgttcagtttccatgtagctgagcggttttgagtgagtttcttaatcttgagttctagtttgattgcactgtggtctgagagacagtttgttataatttctgttcttttacatttgctgaggagagctttacttccaactatgtggtcaattttggaataggtgtggtgtggtgctgaaaaaaatgtattttctgttgatttggggtggagagttctttagatgtgtattaggtccgcttggtgcagagctgagttcaattcctgtgtatccttgttaactttctgtctcgttgatctgtctaatgttcacagtggggtgttaaagtctcccattattattgtttgggagtctaagtctctttgtaggtcactcaggacttgctttatgaatctgggtgctcctgtattgggtgcatttatatttaggatagttagctcttcttgttgaattgatccctttaccgttatgtaacggccttctttgtctcttttgatctttgttggtttaaagtctgttttatcagagactaggattgcaacccctgcctttttttgttttccatttgcttggtagatcttcctccatccttttattttgagcctatgtgtgtctctgcacgtgagatgggtttcctgaatacagcacactgatgggtcttgactctttatccaatttgccagtctgtgtcttttaattggagcatttagtccatttacatttaaagttaatattgttatgtgtgaatttgatcctgtcattatgatgttagctggttattttgctcgttagttgatgcagtttcttcctagccttgatggtctttacgttttggcatgattttgcagtggctggtaccggttgtgcctttccatgtttagtgcttccttcaggagctcttgtaaggcaggcctggtggtgacaaattctctcagcatttgcttgtctgtagagtattttatttctccttcacttacattttaaaaatcattttaaactgttgcaaaacttttgatttccagtgcattataaatgttgacatttgtaatgaaatttaaatatatccagtagatctataaatattgttaacagtttgatacccaccaccattcatttaataaacatacttttcaatgacatttggatggagatatatatatacacatatatatatttttaagtgagacagggtctctctctgttgcccagactggagtgtagtggtgcgatcacagcttactgcagcctccacctccctgggtcaagcaattctcctgcctcaccctcctgagtagctgggactacaggcacatgccaccatacctggctaatttttatttttatttttttttggtagagacagggtcctcctatgtttccctggctggtctcaagctcctggcttcaagcagtcctaccgcctcatctttccaaagtactggtattactggtgtgagccaccacacctggccacgtttggatattttatattgctcttttttttttctatcttcattcctcctcagaattttatcttagcataatattttgaggttcaaagtcatctccctattacacatatctacaatgacaaaaagaatatagatagaatttaaagttttataatcctgtggctatcagcctctgtcttagaaaagcttcaggactgacttaccattacaattagtattggtaaacaattaatcaaaacaacaataaatgttacagggttgggtaattaactattaaacataaaagctacatttattagatttcttagtgacatggatggagcattttgttgttgattatatattctgtattgacaaatattacagattgctagagatagaatttagtataaatttcattcctattaggtcaacttttttttacgtaaagaagtaattaaggtgggaatcattttcttacagcagtgtttctcagttttttgaactctcaagctttaagccaaaaattacatggtgatctgacagcaaaaactattttaatgatttattaatgatattaggtcacctccagttttgttgaatgcaaatagttagaaacctctggttgccccaaaggatttattacccattcattagagacattggctttcttaataaagatagcaatatttctgattacctttgtttggtgccctggaggttatattaggtgggacagtgcatttaataacaatacaggatgggtgagcagtcaggccctttgtgaagtgggagaagggtgatgtgaagtggggtggggcgggggtggggggcagagcgagagagaagcatggagaacctgcccctatccaagtggatcagttttaggaaagcttatgccgtatgtagggatgccaagggtctgggaatttattccctaacttaaagttatctgcattcacatattccatggagagttgtatgcattcaggtatcatgcactcccagtctgaaaaactgctcttttggttgaaagagtataaggacttggaagatggggcctctaggcctgactgagccaaaggctcccatgacctcaagggaactgactagtgcttttttcattttttactgcgttctgggtcccacccttggcattcagatgtgtgcatgagctgctgtttaattttcatcatctgctttacaaatgaggaaaagccctgatatccagctccctcataggacctgataataatacatatggttctgagaattaaacgaggtaataggtacgtaaagtgggtaaacagagtaacttcactctctatttgtacgtctctcagaagtctggggcaacaggagctgtggaaggctccagaagacaagatgtcacaaagccacctagctactgtggctgtaccaatcctgacagtcatagcggccccaaggtgctgctctgttggctgatgggaatgcagatttacgtatggtccatatatggacgtgttgttttacatctaaataaacttggcattgcaagatgaaaatgccagtatcatttttaaaggtcaagtgacagtttgggaagatttttataactttgataagttcctcagctacatctgttcacactggcaagagtgctagagacattcttgggaagtcttttctatcagaggagctgcagccttgctctgcagaaaagttctgatgacagtcatcagagtatttggggctcatgcactaactgttaattattttcatttttcattaatgaaaatttattttaatttttttcattcttctttaatgaatttaactatttgcctctacctttgcttcctgctttgtatactgataagacaggttttggggtttttatgttttctggtcttgcttttcccctttgttttaggatttaaaaaacaaaaaggttaagagggtaggttgacagtgcttgcagtttctgttttacagcaatcccagctgttcctctgaaaattggttgattgtcctatagtttaaaatatatagatgttcatttgattggctcttgtaaatctagtgacatttaaaagtacatggcagctagtcatggtggctcacacttataatcccagcactttgggaggctcaggcaggaggatggcttagcccaggagttcgagaccagcttgggtaacatcatgagaccccaactctacaaaaatttttaaatagttgtgagtggtggcatgtgcctgtaccctcagctacttgagaggctgaggtgggaggattgtttgagacctggagtttgaggttgtggtgctctatgattgcaccactacactccagcctggatgatagactgagaccctgtctcaaaaaagaaaaagaaaaaagttcatgtctattctgttttttgttatgttactttcctctaaacatgaagaaaagcagtgaggagaaacaaaaattgagtattcctgtgttttttatcatagtaaaatatacatttgccattttatatttatcctgataaccttcagtgttgtaaaatacacattcacaattattcatttaacctgataacctctaatctcttttccatgaatcggactaggtacctcatataagtggaatcataccatatttatacttttgtgtctggtttatttcacttaatgtccttaaggttcatccacattgtagcatgtctcagaatttaattcctttttggggctgaataacattctattatatgtatattccacattttgcttatccattcatctcttgataggaagttgtgttgctttcacattttacctattgtgaataatactggtaccaatattagtgtacacataatctgagtccctgctttccgttcttttgggtatatacacagaagtaaaattgctagacacaatggtacttctatgtcagttttttgaagaactaccctactgttttccatagcagttacaccattttacatttctatcaccagaccacgagggtaacaatttctccacaccttagccaccacttgttattttttgttttttgggtaatagccatgcaaaaaaatatgaagtaaagtgaaatatcattatgaaaggtgtgaagtgatatgtctttgtgattttgatttgcatctctcctataattagtgatgttgaacatcttttcatgtgcttattggccatttgtctgtcttctttggggaaatatctcttcaagcctattctgcccatttttgaattgggttttgttgtttttaggaattctttagatattttggatattagtcacttatcagatatgtgatttgcaaatgaggatggcctttttattttgttgattgtgttctttgcacaatagtttttatttttgatgaaatataattttctattttgtgcttttggtgttatatatctaagaaatcatgccaaattcaatgtcatgaaggctttctcctgttttcttctaatagtgtgtagttttagctcttttgtacgtggtgttgggtaagggttcaacttcatccttttgcatgggaatatccagtttttttcccagctgcatttgtcaaaaagactcttctttcttccgttgaatgatctcagtggaagtcactgatctcatcaaaaatcactgaccatatgtgggagcataaccacctgatgggttcttcttgcctgctgcccaaatatagctggtttatcaagatgggaattgcaatagagaaagagctttacacatgtacagctggctaaatgggagactggagctttattattaaataaataagcctcccccaaaatttggatgctagggttttctctttttttttctttttttattattatactttaagttctagggtacatgtgcacaacgtgcaggtttgttacatatgtatatatgtgccacgttggtgtgctgcacccattaactcatcatttacattaggtattctcctaatgctatcccttccccctccccccaacccactacaggccccagtgtgtgatgttccccaccatgtgtccaagtgttctcattgttcagttcccacctatgagtgagaacatgtggtgtttggttttctgtgcttgagatagtttgctcagaatgatggtttccagcttcatccatgtccctacaaaggacatgaactcactcttttttatggctgcatagtattccatggtgcatatgtgccacattttcttaatccaatctgtcattgatggacatttgggttggttccaagtctttgctattgtgaatagtgccgcaataaacatacgtgtgcatgtgtctttataatagcatgatttataatcctttgggtatataaccagtaatgggatggctgggtcaaatggtatttctagttctagatccttgaggaatcaccacactgtcttccacatggttgaacgagtttacactcccaccaacagtgtaaaagtgttcctatttctcccatcctctccagcacctgttgtttcctgactttttaatgatcgccattctaactggtgtgagatggtatctcattgtggttttgatttgtatttctctgatggccggtgatgatgagcattttttcgtgtgtctgttggctgcatgtcttttgagaagtgtctgttcatatccttcgcccactttttgatggggttgtttgattttttcttgtaaatttgtttaagttctttgtagattctggatattagccctttgtcagatgggtagattgcaaaaatattctcccattctgtgggttgcctattcactctgatggtagtttcttttgctgtgcagaagctctttagtttaattagatgccatttgtcaattttgacttttgttgccattgcttttggtgttttagtcatgaagtccttgcctatgcctatgacctgaatggtatagcctacgttttcttctagggttcttatggttttaggtcttacatttaagtctttaatccatcttgaattaatttttgtataaggtgtaaggaagggatccagtttcatctttctacatatggttagccagttttcccagcaccatttattaagtagggaatcttttccccatttcttgtttttgtcaggtttgtcaaagatcagatggttgtagatgtgtggtattatttctgagggctctgttctgtgccattggtctatatctctgttttagtatcagtaccatgctatttggttactgtagccttataatataatttgaagtcaggtagcaagatgcctccagctttgatctttttgcttaggattgtcttggcaatgtgggctcttttttggttccatatgaactttaaagtagttttttccaattatgtgaagaaagtcattggtagctcaatggggatggcagttaatctataaattaccttgggcagtatggccattttcacaatactgattcttcctatccataagcatggaatgttcttccatttgtttgtcctcttttatttcattgagcagtggtttgtagttctccttgaagaggtccttcacatcccttgtaagttggattcctgggtgttttattctctttgaagcaattgtgaatgggagttcactcatgatttgtctctctgtctgtttttggtgtataggaaagcttgtgattttgcacattgattttgtatcctgagactttgctgaagttgcttatcagcttaaggagattttgggctgagacgatggggttttctaaatatacagtcatgtcatctgcaaacagagacaatttgacttcctgttttcgtgattgaatagcttttatttctttttttaaatatatatttttattatactttaagttctagggtacatgtgcacaatgtgcaggtttttacatatgtatacatgtgccatgttggtgtgctgcacccattaactcgtcatttacattaggtatatctcctaatgctatccctcccccctctccctaccctggtgtgtgaagttccccttcctgtgtccaagtgttctcattgttcaattcccacctatgagtgagaacatgcggtgtttggttttttgtccttgcgatagtttgctgagaatgatggtttccagcttcatccatgtccctacaaaggacatgaactcatccttttttatggctgcatagtattccatggtgtatatgtgccatgttttcttaatccagtctatcattgttggacatttggtttggttccaagtctttgctattgtgaatagtgcctcaataaacatacatgtgcatgtgtctttataacagcatgatttataatcctttgggtatatacccagtaatgggatggctgggtcaaatggtatttctagttctagatccctgaggaatcaccacactgttttatttctttctcctgcctgccagctcctcctggtacctctgatagaattcagctgtgaatatgtctggtctgtggcttttcttgcttggtacactattaattattgcctcaatttcagagcctgttattggtctattcagggattcaacttcttcctggtttagtcttgggaggttgtatgtgtccaggaatttttctatttcttctagattttctaatttatttgtgtagaagtgtttatagtattctctgatggtagtttgtatttccgtgggattggtggtgataccccctttatcattcttattacatctatttgattcttctctcttttcttccttattagtctgctagtggtctatcaattttgttgatcttttcaaaaaaccaattcctagattcattgattttttgaagtttttttttttgtgtctctgtcgccttcagttctggtctgatcttagttatttcttgcgttctgctagcttttgaatgtgtttgctctggcttctccagttcttttaattgtgatgttagggtgtcgattttcagtctttcctgctttctcttgtgggcatttagtgctataaatttccctctacacactgctttgaatgtgtcccagagattctggtatgttgtgtctttgttctcgttggtttcaaagaacatctttatttctgccttcatttcattatgtacccagtagtcattcaggagcaggttgttcagtttccatgtagttgtgcagttttgaatgagtttcttaattctgagttccaatttgattgcactatggtctgagagagtttgttgtgatttctgttcttttacatttgctgaggagtgccttacttccaactaagtggttaattttggagtaagtgcaatgtggtgctgagaagaaagtatattctgttaattttgggtggagagttctgtatgtgtctattaagtccacttggtgcagagctgagttcaagtcctggatatccttgttaaccttctgtctcattgatctaatattgacagtggagtgttaaggtctcccattattgtctcccattattattgtttgggagtctaagtctctttgtaggtttctaaggactcgctttatggatctgggtgctcctgtattgggtgcatatatatttaggatagttagctcttgttgttgaattgatccctttaccattatgttaacggccttctttgtctcttttgatctttgttggtttaaagtctgttttagcagagactaggatagcaacccccggtttttttgctttccatttgcttggtagatcttcctccatccctttattttgagcctatgtgtgtctctgcatgtgagatgggtcctcctgaatacagcacactgatgggtcttgactctttatccaatttgccagtctgtgtcttttaattggggcttttagcccatttacattgaaggttaatattgttatgtgtgaatttgatcctgtcatcatgatgttagctggttattttgctcattagttgatgcagtttcttcatagcatcgatggtctttacaatttggcctatttttgcagtggctggtactggttgttcctttccatgtttagttcttccttcaggagctcttgtaaggcaggcctggtggtgacaaaatctctcagcatttgcttgtctgtaaaggattttatttctccttcacttatgaagcttagtttggctggatatgaaattctgggttaaaaattcttttctttaagcatgttgaatatcggccccctctctcttctggcttgtagtgtttctgctgagagatctgctgttagtctgatgggcttccctttgtgggtaacccgacctttctctctggctgcccttaccattttttccttcatttcaaccttggtgaatctgacaattatgtgtcttgggattccccttctggaggagtatctttgtggcgttctgtgtatttcctgaatttgaatgttggcctgccttgctaggttggggaagttctcctgcataatatcctgaagagtgttttccaacttggttccattctccccgtcactttccaggtacaccaatgaaacgtagatttggtcttttcacatagtcccatatttcttggagactttgttcatttctttttactcttttgtctctaaacttctcttctcacttcatttcattcatttgatcttcaatctctgataccctttcttccagttgatcgagtcagctactgaagcttgtgcattcgtcacgtatttctcatgccatggttttcagctccatcaggtcatttaagatcttctctatgctgtttattgtaattagccatttgtctaatcgtttttccaggtttttagcttctttgagatgggttcgaacaccctcctttagctcggagaagtttgttattaccaatcttctgaagcctacttctgtcaactcattaaagtcattctccatccagctttcttcctttgctggcgaggagctgcgatcctttggagaagagtcgctctgatttttaaaatttttggcttttctactctgttttctccgcatctttgtggttttatcaaactttggtctttgatgatggtgacctacagatggggttttggtgtggatgtcctttttgttgatgttgatgctagttttgttgatgctttgttagttttccttctaacattcaggaccctcagctgcaggtcttttggagtttgctggaggtctactccagacgctgtttgcctgggtgtcaccagcagaggctgcagaacaacaaatattgcagaacggcaaatgttgctgcctgatccttcctctggaaccttcatctcagaggggcacctggctgtatgacgtgtcagtcggcccctactgggaggtgtctcccactgggctactcaggggtcagggacccacttgaggaggcagtctgtccattcccagatctcagactctgtgctgggaggaccactgctctcttcaaagctgtcagacagggacgtttaagtctgcaggtttctgctgccttttgttaagttatgccctgcccccagaagtggagtctacagaggcaggcaggcctggttgagctctggtgggctccacccagtttgagctttctggccgcttcgtttacctagtcaagcctcagcaatggcagacgcccctcccccagtcttggggccgtcttgcagtttgatctcggactgctgtgctagcagtaagcaaggctccataggtgtgggaaccgccgagccaggcacgggttataatctcctggtgtgccgtttgctaagaccattggaaaagcgcagtattagggcgggagtgtcccgagtttccaggtaccatctgtcacggcttcccttggctaggaaagggaattccctgaccccttgtgcttccagggtgaggtgatgccccgccctactttggctcacactccatggcctgcacccactgtccaacaagtcccagtaagatgaacccagtaccttagttggaaatgcagaaatctcctgtcttctgcgtcactcacgcagatgcatgagctgtagactagagctgttcctcttcggccatcttgtaacgatcctgctagggttttttcaaggatagtttggcagggagagagatgacaaaggaatgagtgctgctgattggttggcggtgcaatcacagaggtgtgggaaatgatccttatgctgagtccacttctgggcgaaggccgcaggactggttggcaggtcaggtggtgccatctggttgtcagaattgcaaaagcctgaaaagacatctcaaaaggccaacctcaggatctataatagtgatattacctgcaggagtaattgaggaagttgcgaatcttgtgatttgcagaataatgactggtaattgttcacatctatgtcttagtagaattgaggctcctctcattctcccattctggtggtctttcattagttttacgaaagtagtttagtttgggggaagggctattatcatttaaactacaaactaaatttcttccaaagttagcttgacccaatcccaggaatgactaagggcatttggagggtaaaggcaagatgcaggctggttggatcagatctccttcactgtcataattttctcactgttttaagttttgcaagggtggttgcatagggtttatttctgggctctctattctagtccattggtctatatttctgtctttatgccagtaccacattgctttgattaatgtagctttgttataagttttgaaattggaaagtgtgacttacttattcttttcaagattcttttggctattcagggtgccttgagattccatgtgaattttaagatgtattattattctgttactgcaaaaaacatcattgggattttgatagagattgcattgactctgtagatcttctttagtagttttgacatttagcaatattaactcttccaatccataaatatggaattttgttccatttatctttgtggtctttaatttctttcaccagtgtttcatagtttttagtgtatatggtttttgcctccttggttaagtttatttatgattttttatgctggtaggttttattttttaaattttgggggaagtgttttattaatacaaatgtatgggttacaagtgcaattttgttacatgtatagattgtatagtggtgatgtcaggacttttatggtatccatcactcaaataacttccattgtacccattaagtacaccccactcccacctgttaagttttaataagttggtttagtctctgttctgtctctgaaaaatgtcagatactactaacagaactaaaaaatccaggactgagagaaactttaagtacatacaacaatataaacagatcttaaaaatatgatacagcatagaaaaatggaaaccaaaacatattccacaatgtcattcagtacttttaaattactacacagaaagtgttatacatttcacaaaaatgtataagaatagcacacacaaattatcaacaaaataatacagggttttctgaattgtctacctgtgagatgtttctaagcagggttttattattgattgattgattgagacagggtctgactctgtcgcccagattggagtacagtggtgcaatcctggcttgacctcctggctcaagtaatccttccacctcagcatcccaagcagctgggactataggttcacacaaccatgcctggctacttctttaaaaaaatttttgtagagagtctcactacactgctcaggtggtctcaagctcttgggctcaagcaattctgacacctcagcctcccaaagtgcagggattacgggtgtgagccgttgcacctggactaagcagggttttaagtgacttggttcttgtttatgttgacactaaacatgcatcaaagattaaccttctaaattctggaacacagaaagaagggcagcccttatttcagggctgggctgatgatagaatttacttgatgcagtttttcatagaaagatatgtgtctttttgttttaaacatataagaaaagagtttccactgtttacctggtactaggtcccaatgtctaaaccaagtttggagaatcacatcctctgagcagcctatgttgatgatgatgctgatgacaatgatgacagaagacacttatatggtacttatttatgtagcagaaccatagtcctttatatgttttaactcatttaatattcaaaacaaccctatgacatggtacattgatgttgttatacccatttatatgtgtggaaatggtcatacagtgtcttattaatttgcctgaggccacacagctaattagtggtggatctgaggttggatttctaggagccagattcacaaatccaacactgcactttgctttttctctattgtctatcgctcattgatttttttattctcaattttatttccttcctttatttttggtttaattttctcttctttttttagtttcttgagatgaaaacttagatctttgatttttctacctctcttcttttcaatatttattatgcttaaagctttacacttcaccctaggcattgtttttgttgcatcccacatattttgatgctgtatttttatattcagaatattttctaatttatatttatttgttcattttaaaaataattttactaaataatataaaatgctaattttgaaatacttaggattttcttacatttggttttgatttctaatttaattctatgtggttttaaaatatagtttcactcaattgaaatttattgatttactttatattcctgcatatggttgatactggtgcatgttgcatgtacacttaaataacatttattctgcgattgttggatacagtgttctatatttgtcaattagattgagtgctgctcagatgttctatattcctacagatatttcatgtgcttattctataaaatacaaattgttaatgtttctgattaggactagaagacttttcttttaccttttaaatatattttttattttatgtattttgaaactatgttatttggtgcctatacacttagatttttttcttgaggaattgatcctttatcattatgaaatatccttcaggcaccccgctcccacagatgtatgcatcttgctgtacccctgcttctgctggcacaaatgcacaggcatggatcctgctgccaccaccttgatgaagtgtgtggccagcacccccatcagagtactgttaccagcatactgggaataccttgcccccagagtgcagcagctttctaacctctatggggcagagaacaaagttggggggcccagtaccagcccatcagcgttacatcacatagcccatgagtgatgagctgagccttggtgccctgaaagcatccagaatgaagccagtcaactgaaccgacattataccacaatcaaaccctcaagaatatcaaagaatataaaagtaaaaagccctatccaaaggatagcaacttcaaagattaaaggaatgtcagcccacacagatgagaaagaatcaatgcaagaactctggcaattcaaaaaactagagtgccttcttacctccagacaaccccactggttccctagcaatggttcttaacaaaactgaaatgacagagatagaattgagaatctggatagaaaaaagatcattgagattcaggagaaagttgaaacccaatccaaggaatctaaggaatccaataaaacaatacaagagatgaaacgaaatagccattttaagaaagaaccaaactgaactgatagagctgaaaaactcactacaagaatttcataatgcaatcacaagcattgttaacatcagaatagactactaacatcagaatagaccaagctgaggaaagaatctcagagcttgaagactggttcctcaaatcaactcagacaaaaataatgaacaaataattaaaaagagtgaacaaaaccactgagaaatatgagattaggtagagaccaaatctgtgactcattgacatccctgaaagagagagagaaaaagcaatttttccagccttgctagagaggccaaaattcaaattcaggaaatgcagaaaacccctgtgagatactatacaagacaaccatccccaagacatgtaggcatcagattctccaacgtcaacatcaaagaaaaaatactaaggcagctagagaaaaggggcaggtcacctacaaagggattccgatgaggctaacagaagacctttcagcaaaagcactacaagccaggagagatttggagacctatgttcagcaaaaaaaattccaaccaagtatttcctgtgcagcaagactaagcttaataagcaaaggagaaacaagatccttttcagacaagcaaatgctaagagaattcattaccaccagacatgccttacaagaggtccttaagtgagtgccaaatatggaaacaaaagactgttactggccaccacaaaaatatacttaaggactagacctctgaacactataaagcaattacgctatcaagtctgcataatatccagctgacatcatgatgacaggatcaaatcaacacatataagtattatccttaaaagtaaacatgcaaaatgcctgacttaaaaagtacagaatggcaaatttgataaagaaataagacacatggagagttgctccaaatggcaggataggaacagttctggtctacagctcccagcaagatcaatgcagaagacaggtaatttctgcatttccaactgaggtacctggttcatctcattgggattggttggacagtgggtgcagcccatggagggcaagccgaagcagggcggggcatccctcaccgaggaagtgcaaggggtcaggggatttccctttcctatccaagggaagccatgagtgactgtacctagaggaaaagtacactcctgctcaaatactgcacttttcccacggtattcgcaacaggcagaccggaagattccctcccatgcctgctcggtgggtcccacgctcatggtgccttgctcactgctagcacagcagtctgagatcgacctgggatgctggagcttggtgggtggggagcggcgtccaccattgctgaggcttgagtaagcggttctatgctcacagcgtaaacaaagcagcagggaagcttgaactggacggagcccactgcagctcagcaaggcctactgcctctgtagattctacctcgggggcagggcatatctgaaaaaaatgccgcagacagcttctgcagacttaaacatccctgcctgacagctctgaagaaagcagtggttctcccagcacgggggcgttcaagctctgataacggacagactacctcctcaagtgggtccctgacccctgtgtagcctgattgggggatacctcccagtaggggccaacagacatctcatacaggcgggtgcccctctaggacgaagcttccagaggaaggatcaggcagcaatatctgctgttctgcagcctccattggtgataccgaggcaaacggtctggagtggaactccagcaaactccaacagacctgcagctgaggggactgtctgttagaaggaaaactaacaaagaggaatagcatcaacatcagcaaaaaggacatccacacgaaaaccccatccgtaggtcaccaacatcaaagaccaaaggtagataaaaccacaaagatggggagaaaccagagaagaaaggctgaaaattccaaaaccagaacgcctttcttctccaaggatcacaactcctcgccagcaagggaacaaaactggacagagaatgaatttgatgagttgacagaagtaggcttcagaaggtcggtaataacaaacttctccaagctaaaggagcatgttctaaccaatcgcgaggaagctaaaaaccttgaaaaaatgctagatgaatggctaactagaatacaataaccagtgtagagaagaatataaatgacatgatagagcttaaaaccatagtacaagaactttatgaaacatacacaagcttcaatagctgattcaatcaagcgaaagaaaggatatcagtgattgaagatcaaattaatgaaataaagcaagaagacaagattagagaaaaaagagtgaaaagaaacgaataaagcctccaagaaatacgggactatgtgaaaagaccaaatctacgtttgattggtgtacctgaaagtgacagggagaatggaaccaggttataaaacactcttcaggatattatgcaggagaacttccccaacctagcaaggcaggccaacattcaaattcaggaaatacagagaacaccacaaagatactcctcgagaagagcaaccccaagacacataattgtcagattcaccaaggttgaaatgaaggaaaaaatgttaagggcagccagagagaaaggtcgggttacccacaaagggaagcccatcagactaacagcagatctctcagcagaaacactacaagccagaagagagtgggggccgatattcaacatgcttaaagaaaagaattttcaacccagaatgtcatatccagccaaactaagcttcataagtgaaggagagataaaatcctttatagacaagcaaatgctgagagattttgtcaccacgacgcctgctttacaagagctcctgaaggaagcaagaaacgtggaaaggaacaaccggtaccaaccactgcaaagacatgacaaattgtaaagaccatcgatgctatgaagaaactgcatcaattgatgggcaaaataaccagctaacatcataatgacaggatcaaattcacacataacaatattaaccttcaatgtaagtgggctaaatgccccaattaaaagacacagactggcaaattggataaagagtcaagacccttgactgtattcaggagacctatctcacatgcaaagacacacataggctcaaataaagtgatggaagaagatctaccaagcaaatggaaagcaaaaaaaagggtttgccatcctggtctctgatgaaacagactttaaagcaacaaagatcaaaagagacaaagaaggccgttaacataatggtaaagggatcaattcaacaagaagagctaactatcctaaatatatatgcacccaatacaggagcacccagattcataaagcaagttcttagagactaagtctacaaagagacttagactcccacacaataataatgggagactttaacaccccactgtcaatattagatggatcaacgagacagaaagttaacaaggatatccaggacttgaactcagctctagagcaagcagaactaatagacatctacagaactcttcttcccaaatcaacagaatatacattctcctcagccccacatcacacttattctaaaattgaccacataattggaagcaaaacactgctcagcaaatataaaagaacagaaattacatcaaactgtctctcagaccgcaatgcaatcaaattagaactcaggattaagaaactcactcaaaactgcacaactgcatggaaactgaacaacctgctcctgaatgactactgggtaaataacgaaatgaaggcataaataacaatgttctgtgaagccaataagaacaaagatacaacgttcaagaatctctgagaaacatttaaagcagtgtgtagagagaaatttacagcactaagtgtccacaggagaaaacaggaaagatctaaaatcgacaccctaacattgcaattataaaagaactacagaagcaagagcaaatgaattcaaaagctagcagaagacaagaaataaatcagagcagaactaaaggagagagagacacaaaaaacccttaaaaaaaatcaatgaacccaggagctggttttctgaaaagagcaacaaaataattacatgacaagcaagactaataaggaagaaaagagagaagaatcaaatagacgcaataaaaaatgataaaggggatatcaccaccgatcccacggaaatacaaactatcatcagacaatactataaacacctctacgcaaataaaatagaaaatctagaagaaatggaaaaattccttgacacatacaccctcccaagactaaaccaggaagaagttgaatctctaaatagttcagtgacagcttctgaaattgaggcaataattaatagccaaccaaccaaaaaaagtccaggaccagacagactcacagccaaattctaccaggggcacaaagaggagctagtaccattccttctgaaactattccaatcaatagaaaaagagggaatcttccctaactcattttataaggccaacatcatcctgataacaaagcctcacagagacacaacaaaaaaagataattttaggccaacatccctgatgaacatcgatatgaaaattttcaaaaaaaaatactggcaaaccgaatccagcagcccatcaaaaagcttatccactacgatcaagtcgacttcatccctgggatggaaggctggttcaacataggcaaatcaataaatgtaatccatcacataaacagaaccaacgacaaaaaccacatgattatctcaatacatgcagcaaaggccttcaacaaaattcaacagcctttcatgctaaaaactctcaataaactaggtattgatagaatgtatctcaaaacagtaagagttatttatgacacacccacagccaatatactgaatgggcaaaaactggaagcattccctttgaaaactggcacaagacaaggatgctctctctcaccactcctattcaacatcgtgttggaagttctggccagggcaataaggcaagagaaataaataaatggtattcaattaggaaaagaggaagtcaaatagtctgtttgtagatgacatgattatatatgtagaaaacctcatcgtctcagctccaaatctccttaagctgataaacaacttcagcaaagtatcaggatacaaaatcaatgtacaaaaatcacaagcattcctatccaccaagaacagacaaacagagagccaaatcatgagtgaactcccattcccaactgcctcaaagagaataaaatacctaggaatccaacttacaagggatgtgaaggacctcttcaaggagaactacaaaccactgctcaatgaaataaaagaggatacaaacaaatggaagaacattccatgctcatggatagggagaatcactatcatgaaaatggccatactgcccaaggtaatttaaagattcaatgctatccctatcaagctatcactgacttcacagaattggaaaaaaactactttaaagctcatatggaaccaaaaaagagcccacatagccaagacaatcctgggcaaaaagaacaaagctggaggcatcacactacctgacttcaaactacactacaaggctacagtaaccaaaacagcatgttactggtaccaaaacagacatgtagaccaacggaatagaacagaggcctcagaaataacaccacacatctacaaccatctgatatttgacaaacctgacaaaaacaaatcgggaaaggattccctatttaataaatggtgctgggaaaacaggctagccatatgtagaaagctgaaactggatcccttccttacaccttatacaaaaattaactcaagatggataaaagacttgaatgtaatacctaaaaccataaaaaccctacaaaaaaacctaggcaatacccttcagtgcataggcatgggcaaagactttatgactaaaacaccaaaagcagtggcaacaaaagccaaaattgacaaatggcatctaattaaactaaacagcttctgcacagcaaaataaactaccatcagagtgaataggcaacctacagaatgggagaaaaatttttcaatctatccatctgacaaagggctaatattcagaatgtacaaagaacctaaacaaatttacaagaaaaaaaaaaccactgcatcaaaaagtgggcaaaggatatgaacagacacttctcaaaagaagacagttatgcagccaacagacatatgaaaaaatgtccatcatcactggtcatcagagaaatgcaagtcaaaaccacaatgagataccatctcatgccagttagaatggcgatcattaaaaagccaggaaaccacagatgctggagaggatgtggagaaataggaacacttttacactgttggtgggagtgtaaattagtgcaaccattgtggaagacagtgtggcgattcctcaaggatctacaactataaataccatttgacccagcaatcccatttgtgggtatatacccaaaggattataaagcattctactataaggacacatgcacacatatgtttattgcagcactatttacaatagcaaagacttggaaccaacccagatgtccatcaataatagactggatatatagtattctatgtctggttaaaaaaaaagttattcaattttatggatttggattaggatcattcccatttctgtaaatatttacacctataaggatatcaagaaggaatgtcaggcagtttactagtaacttttcaaagtcttagaaaagttgcattttttgctggcaccaagaggggaaaacatcataaaaatagtttcaaaatctacaatcaatgctttctccaaaataaatgtctttgttaaaaaaaataataataatagactggataaagaaaatgtggcacatatataccatggaatactatgcagccataaaaaaggatgagttcatatcctttgtaggtacatggatgaagctggaaatcatcgttctcagcaaactatcacaaggacagaaaaccaaacaccgcatgttctcactcataagtgggagctgaactatgggaacacgtggacacagagaggggaacatcacacaccggggcctgtcagagggtgggggactgggggagaggtagtgttaggagaaatacctaatgtaaatgacgagttgatgggtgcagcataccagcatggcacatgtataaccacgtaacaaacctgcatgttgtgcacatgtacccttgaatttaaagtataatttaaaaaaagaagaagaaataagtcacaattgtatgctgtcttcaagagacccatctcatgcagagctacccataggctcaaaataaaggtttaaagaaaaatctaccaagtaaatgggaaaagaaaacaggagttactattctaattttagacaaagcagactttaaagcaacaatgatcaaaaaagacaagcgcatgacataatcataaagggttcaattcaacaagaagacttaaatatcctaaatatatgtacccaacacaggagcttgcagattcatagaacaaattcttagagacctacaaagagacatggataaccacacggtaatattgggagacttcagcaccccactaacagtattcaatcatcaaggcagaacactaacaaagatacttgggacctgaactcagtatttgactaaatggacccaacagacatctacagaactctgcactccaaaacaacagaatatacattcttctcatcgccacatggcacatactctaaagtcgaccacacaatcggccataagtcaattcttagcaaattaaaaacacaagaatcacactaaccacactcttggaccatggcgcaacaaaagtagaaatcagccccaagaagatcattcaaaacatacagctacatgcaaatcaaacaacctgctcctgaatgacttttgggtaaacaatgaaattaaggcagaaatcaagacattttttgaaactattgaaaataaagataaaatatacgaaaatatctgagacacagctaaaataaagataaaatataccaaaatctctgcgacacagctaaagcagtattaagagggaagtttatagcactaaacacccctatcaaaaagttagaaagatctcaaattaacagcctaacattgcacctagaggaactagaaaaacaagagcaaaccaactgcaaagctagcagaagaaaagaaccaaaacaagaactgaactgaatgaaattgagacaggaaaatgatataaaagaccagtgaaaccagaagctggttctttgaaacaataaataagatggatagaccactgattatactaatcaaaaaacagagcagatccaaataaacttaatcagaaatgacaaagaggacattaccatcaacccaacagaaatataaaaaaccttaaaagactattacaaacacctctatgcagacaaactaaaaaacctacaagaaacgataaattcttggaaacatacagtctcccaagactgaacaaggaagaaattgaaaccctgaacagaccaataacaagttccaaaattgaatcagtagtaaaaagcctaccaaccaaaaaagccctggaccagatggatccacaaccaaattctgccagatgtataaagaagagctggtaccattcctactgaaactattccaaaaaattaaggaggagggacccctccctaactcattctataaggccagcatcatcctgatataaggccagcatcatcctgatataaggccagcttcatcctgataacgaaaactgggagagacaacataaaaagaaaacctcaagtcaatatcctggacaaacatagatgcaaaaattctcaataaaatactagcaatctgaattcagcagcacatcaaaaaactaatccaccatgatccaagtaggctttatacttggcatgtgagattggttcaccatatacaaatcaataaatatgattcatcacatgaacagaactaaaaagaaaaaccaaatgataatctcaatagatgcagatacatctattgaatgcaaaattcagtaccccttcatgttagaaaccctcaacaaactaggcatcaaaggaacatacctcaaaataataagagctatctgtgaaaaaatcacagccagcatcatactgaaagagcaaaagctggaagcattccccttgtggaataagacaaggatgcccactatcaccactcatattcaatatactactggaagtcctaggcagagcagtcaagcaagacaaataaagaaaaggcatccaaataggaagagaggaagtcagacaatatgattttatacctagaaaattccatagtgtctgcccaaaagctcctagatctgacaaacaacttcagcaaagttgcagtgtacaaaatcactgtgcaaaaataagttgcattcctttacactaacaacatccaagctgagagccaatcaaggacacaatcccattcataatagccacacaaaaaataaaatacctacgcatacagctaaccagagaggcaaaatatttctagattgagaattacaaaacagtgctgaaagaaatcagacaacacaaacaaacgagaaaacattcattccatgctcgtggataggaagaatcaatgttgttaaagtggccatactgcccaaagcaatttacagattcaatgctattcctttcaaactaccagtgatatttttcacagaattagaaaaaactattctaaaattcaggtggaaccaaaaaagagcctgaatagccaaatcaatcctgagcaaaaagaacaaaactggaggcatcacattaccaaaattcaaactgtactgcaagcttacagtaacaaaaacagcatggtacttgtacaaaaacagacacataaaccaatggaatagagagcccagaaataaagctgtgtactcagaaccatctgatctttgacaaaattgacaaaaacaaacaatggggaaaggacctgctagtcaataagtgattcgggatggatcgctacccatatgcagaagattaaaactagaccacttcctatcaccatatataaaatcaactcaagatgtattaaagacttaactgtaaaaactataaaaccctagaggaaaacctaggaaataccattctggacatagtccctggcaaagatttcatgatgaagatgccaaaagcaattgcaacaaaaaaacggcaagtgggacctaattaaagatcttctgcacaacaaaaagaaactatcaagagagtaaacagacaacctatagaatgggagaaagtatttgtaaagtatgcatctgacaaaggtctaatatccagaatctataaggaacttaaacaagtttacaagaaaaaaaaatttttaaagtagctaaagtaaatgaacagacacttttcaaaagatgacatacatgtgaccaacaagcatatgaaaaaatgcccaacatcactaatcattagagaaatacaaattaaaaccacagtgagataccatctcacaccagtcagaatgggtattattaaaaagttataaaatagcagatgttgacgaggttatggagaaaagggaatgcctatacgctgctggtggaaatgtaaattagttcagccattgtggaaaacagggtggcaatttctcaaagtacttaaaacagaactaccattttacccagccatccacttattgggtatatgcccaaaggaatagaaatcattctaccataaagacacatgcacacacacgttcatcgcagcactattcacagtaggaaagacatggaaccaacttaaatttccatcactggtagattggataaagaaaatgtggtacatatacaccatgtaatactacgtaaccataaaaaaagaataagatgatgtcctttgcagcaacatggatagtgctggaggtcaatactctaagcgaactaatgtaggaacagaaaaccaaatgctgcatgttctaacttataagtggaagctaaacattgagaacacatggatacaaagaagggaataatggacactggacctacttgagggtggagggtaggaggaggatgaggagagaaaaaatgacctaatatgcttattacctgggtgatgaaaatctgtacaccaaacccccacaacatgcaatttattgataacaaacctgcacatggacccctgaacctaaaataaagtcttaaaaaaagaagaggggccgggcacagtggctcacgcctgtaatcccagcactttggaaggctgaggcgggtggatcaggaggtcaggagattgagaccatcctggccaacacggtgaaaccccatctctactaaaaatacaaaaaattagccgggtgtggtggtgggcttttgcagtcccagctactcgggagactgaggcaggagaatggcatgaactcgggaggtggagcttgcagtgagctgagatcatgccactgcactccagcctgggcaacaaagcaagactccgtctcaaaaacaaaagaaaaacaaaaaaacaaagaggaggaagaggaaaataaggcccatggtgcttaaagtcacacatgtgccaaagccagctagtaaacaaagcaaagatctgaattcagatatttgtttaactgctgtggttctaattatatcacgcaccttggactcaaagcaggatagagaaggttgggcagtggatcacaaaagatatcagcataaatacacatcatttattctgtattatctgatgccaagcagtgtgctaagcactttacatacatcatcttatttgtacatcccaattaccttctgatacagctgtcaattcccacttttatcaggaaactgaggatcaaagagggtaagtaatacatccagagttacaaagctgttaaaaatattagagggtctgactccagtgtatatatttttaaaagccccttattatctctggtaatcactgtcttgaaaactactttgtctgatattaataaagccacagtagctttcatacaccttcttgtttacatatgatttcccatattcttttatcccatctatgttattaaaatgtgtcttgtcaatagtatatagtttgttcttgtttctttattcattttgttttcctgatactcttttcccaattaaggaggtaataatctgtaagcaaagccttatttacataaacactgctgtgatcttataccaaataaacagccctagcatgtgtgtgtgtgtgtgagagagagagagtgtgtgaatgtgtgtgtgtttgggctttctgaattagattttctttcaagatccacctacatctttacttttggcctaagtaatggttggtcatgttaactgtgtaaaatattaatctttttctgaagctacaaagagtccatgtctacttactgttctaggaaaagttttttcaaatttgggaagtgtctaccttttaaaatattttctgagagtgtttaattacttctatgatcttaaaaggttctctccattttacttttatccagctgtcacatattctgagtatgttttccaccaggagaacctgagaatttttttttctcttagattttgagtatagagataagattttatcctgcatccagttccaacctgttaatataattctatgcaagtttcctctcttgttgtgtttatttccctttatccttatccttagtcatctattccaatgtttatgctgtgcattattatattttcatgtatccttgtgaaatgtagagtgctttatgtgcaatattttaaatgtacataaatggcattatagattaaaacattttttcatgttgtaccatgtttttgaggtttatttatattgctatgtatacctctagtctactgcttctaactgtgaaacatttttttcaaattcaaattctcataaatgctgtacttattttggaaattagaattcagcacaaggtacttctctgtattcaacaccatagcattttagcgctttactaatgggtggaaaaattaaacttcagtcctactgttcaaagagcctatttagtcaaagatggccaagatggaaagcttccactttcctgtgagtcaggtcctagtaaatgtgaatcttacacagagatgattagttatagctcctagcactaactccctggaggcaatgtccttggtgcccctgactctcttccatttaggcactcatctttgttagatgccttaggtttatttacgtaaaatcatgctgcacttctccctgatactgtggttaaagtttttatggccttgcaccaaaccaacagcccagaatagctacatgccagggagatattgtcagcaaggtttgggcattaatatgaagaatcttgtatattgttgaaacttctggtccaacagaatggaaagtgtgccaaataggaagcttttgggtacaggtgacaaaaaccccaactcaaactggcttcaacgctaagcacatatattatctcactatattagcagaataactaaatattggcagctgcagaggcaaaccctgactactgagaggcttgatacagtaaaagcttattgcttggtctcacaaagtttgccaggggttggtgactctcctgggcagttagtgactcagatatgtcgctttataagcaacacatgacttgtaaagtcacccctgcaagggaagaggactggtggatcacatagattgtttttaaggaccaggctggaaattgacttatatgaattttgcccatgctccagtgtgcataaatccgtcatcagtcatatgaccccatcctaactgcaaaggatgcagaaacatggagtcttcctgtgaacttaggaagaggaaaagtgttgagcaagaagccacattccataacaggaagtccagatatacagcaggttttagggatggatgacttagtgactcagtggtgtcatcaccgtcctgaagtctttccaatgctctccaccctgccgtcctcacaatgtcagctttgtcttcaggctggttctcttcctggttgcaaggtggctgctgtagttcagccatcacaaccagacatggcaatgtgctgggacagaaagggaccatccttaggagtgagggcacttttcccagaagcagcccagcacacttcctctgatggccaggactgccaggcccaaactaatcactgacaactcaagatttatccctggcattgagagaccatcaccctcttggcagtcatgtgggggaagggctggttaccatttgaaccaaaatgaagcttagccaataaggaagagaagaaagtagatgttgagtaggcaacgaacagtatctgctatagcccatccctggactcgctgaggtttcatggtaaagtttgtggttttcatcatgttcctgcaccattctcagtaagttgatgcctagcattgcatattttcttttgctattgtaatgctgtttccatgatagttgcttgtgtataggattgtcattgatttttcactcacctttgttcagttttcttttatctatgtgtctgtgtaattgccttaaattcttttttcaagcagtattagatgttaattagagactgagaaacccagaggtggaaggatcttaagtggagcaggggatcggattaaagaataagaaagcaaagaatactgtatttcatttctgtgaaaagagaggttacatttccttgcatgaggaaaaagtaggagtgtgtgcttttctcaaaacttgctataaggctgggtgcagtggctcatgcctataatcagcactttaggtggccaaggcaggaggattgcttgagcccaggagtttgagaccagcctgggaaatctagtaaagccctgtatctacaaaaaataaaaaattagctgagagtggtggtgcacgcctgcagtccccagctagctgggaggctgaggcaggaggattgcttgagcccaggaggaggtcaagcttgcagtgagctgtgatcatgccactgaactccagtctgggtgacagagtgagactctgtcttaaaaaaaaattgctatgagagaatgctctaggtatgtgtgtggtcgtggtagagtataggggtgtacgatcactgtaatgtgctggaatagtacctaattttgaaactgcatggttaataacatcttttaagaatgtctaagtgctttagagacttcttttcccccattctccgtgagaagaataggagatagatcgttggttttcgtgtggaaaaattaagaaagagaaatgaagcagtttaaatttcctcacattatcatggtattaagtaaactagagcagaggtctttgggttagaactcatttgggaaaatagattgagtgtggccaaggcaaccattcctgtagtgaactcagctcccttttatgtagtgaagataaatagttgaacaatccaatacatgccccagtccctctctctctacacacactgcacacacacacacatacacacacacacacacacagtgccaggagacattccgggaccatatttttttaagaagaaaaagtattattatgctttcaagtcagttatgttaatttattccttttttgagatgtagagtagctcctttgtatctgagtttgcctattacatgaaaagactagtggataatgataccagctatcctatgttacaaaaagctgcagatccccatgccaagtggactatacagctacacaaaccttctgttacctgttggacacactgccacagaggcgagcaacatgctgtctgccattaaagaactcgggacccttgaaacccattttggggaatatatgtagcaaataatccaattttaaaaggggcaaaaacgtaggttatcggagtacattagacatgctaatctgcagcagttttgtgcaaacctaagtataatttaattttgtattaagttttccttttgatatccagataaagattaacatagtcattggcaattatatttgtattttcaataaacatcacattttactgaagtatacagatctatgcaagggatagtgaaatagacaaagctcatttgacttttccagaaggaatgcattttaacattggtggctcctgtggttagggggacttccaaagcagtaactcttgcgtttcctcagcagcatcatcataattacaccactatacacaataattatactcctagctgtggttctattctacagcagttgctgctttcctggaaaccttggggaaaatagaaatttaaatagctcatagatttggctatgataagttcacacaaagacaaaattgcatttggcagtttagtttccccaacctttatttgtttcctgataactatatttagtctgaacctctttgtcaaggacaccacataggttatattgtcttcctctttgcatccaatgaagcagcatatattgccaggtcatttttttttatggtgatgccaaacttgaccacttggccaagggagtgactgccatacctcttattgtgaaggcacattttcctcctgtaattaacaagtaaccccaggggtgataccttgagacaatgagaatattttgttttccaataacttttacccaagaatagctacacacaccccctgtaattatagacttatgggtcagtttttctcaccatgtgttttaatccatcgatgtcattctttctgatatttaaaatcgttcacagattggccaggaacccttcagaccagcttctgtcttcattgaacttgtccttgtttagctttgagcacttcttggcgtttttggcccaagatatcttaggcttatctcgtactttcagtactctggacgtgtgtcagacctgaaatcagcctcttctccaaggagacctgtttccctttagtggaaaataatatttacaaaccaagagttgggtgtttgtgttttactgctactggggtgttaatttttctaggctctttaatcgtgagttcatattgaaaccacctaattattttgtttttattttgaattacctttcttgaggtatagtttacctaaacgaaagtgtactcatttgaagtgctgagtttgcttcatgttagcaaattcatataccctgaactgtcaccctgtcacctatgaccttttgcagtcagccctctttcagcctctgacctgctttgtgtcactgtagattagtgtacctattctagaatttcatgtaagtggaataacactatatgaggccttttctctggctacttttactcagcattatgttttggaaattggtacatggtattatgcataccaattattcattactgtctcttactgaatagcagtccattgtatgtatgttttgcttatctatttgtttatctatttacaagttgatgaacatttggaccatttccagcttatggatattatgagtgaagctgtttgaacattcaggcacaaggttttgtatggacatgagctttcatttctctgcagtaaatacctaggaaaggaattgctgtgtcatgttttttaactttataggaaactaccaattttttttcccaagtagttgttaccattttttactaccaccaagaatgtatatgagacctaattattccacattgtcatcagctcttggtattgccaatcttttcattttagccattctggtgggtcagtagtggctttaatttctgttttttaattttgtttaatttctgaaattttaattttattgtggttttaatttccatttctgtaatgggtgatgacacagagcatctttttgtgtgataattggtcattcatatatcttgatgaaatgtccattcatatctttcactgacttttttaattgggttgtcttttttcttgagctatgaagttctatgcattctgaatactagtgttttgtcagatgtatgtattaggatatgttctcccagtctacagattactttaaaaattttcctaatagtatcttttggagagtagaaaattttaattttgatgaagtccaatttatagatttatttaaggttcctattatttatgtcgtgtttaaggaagttttgcctaccctaagacctcaaagattttctcctgtattttcttctagaagtttgtaaacttaaaaactttagcttttgtgtttgggttcatggtcccattttaatttaatttttatgaattttgtgagatataggtgttgttctttttctttcttttttaattttttagttaataaaaatggtatatatttatattgtataacatgatgatttgatacatgtatacattgtggaatacatattacctcacatggttatcatttttttgtgataagaacacttaaaaatctgtctcagcaatttttaactatataatatattaactatagtcaccatgatatacaatagatctcttgaacttattccttctaagtaaaaatttgtcctttgaccaccagcccccctgccacccctcactccctgtccaacctctgataccaccattttactttctgtttctatgagtttgactttttaagattccatttatcagtgagaccattggtatttgtgtttcttagcctggtgaattttacttagcataatgtcttcccagtttttttatgttgttgcaaattacaggatttccttcttttctaaggcagaatagtaccctattgtgtttatgtgtatatatatatatgtgtgtgtgtgtgtgtgtgtgtgtgtgtatatatatatatatatatcccattttcttaatccattcatctgttgataggcacttaggttgattttgtatcttggctattgtgaatagtgctgcaataaacatgggcattctctttgacatactgatttcatatcctttggatatatatgttcaataatggaattgctgcatcatttggtagctctatttttaatattttgaagagcctccatactgttctctacaatggctatgccaatttacatttctaccaaccatgtacaagggtccctctttctccacatctactttttttttttagcatggatgtccattcattccagccctgattgctgaagagactgtccttttcccccattgaactgccttggcatcttagccagaaatcgactgactatatgtaggaggaactatttctaaattctctagtctcttccatttatctatatatttatccttacactaatgccacattgtcttgatttatatagctttataataagcagagcccagtcaggcccctcctagacagtccataccagaattcacaaatacatatgacctaaagcaagtaacataattaagtgaagctgttcttgtataagcagtattactttatttatattaaaatctaacgggctaaaatttcaacgtggttcattttcatttattaatgttttgagtcatgtccctttctcacatgtctcatggttcttattatggtttatttctaatgatatctttatacacatacttttcacactaaatatttaggaacattccctgttttcatacatagaacaatactgcctccatacatttttgaaatgcgtggcccatttgatctgtttttcagtttcccacttcaaagagaggaatacagtatctcccatgacagcatcagctggttaatgaatggtgattggcatgcagactcagcattgagactgcagtggggaatgatggggacactgtggcaaacgggggagggctggcactgctgagaggggcacagccactctacgccactttcataacatcatgtcaaatgtacacaaattcaccattatttattttgttgctcaaattattccagctttgtccactaggagctgtttcaattggctatgtccctttgacacacacaccaatgtgggtttgttcggttttttgtcttatttgaatgcttctttcctttctggctcctccaggcttatcttgtgtatttcccatcccagtcctagaatcagccatttctctaagaatccctggtttcttttataagagaatggcattagaaaatgccacagaggttaagtgtcattcccatcacatcatagcaagggtacatactatcaacacgatttatgactatcgatgttacccttaatcatctagccaagatggatggtgaaatcattaggagggggatgcaataaagaggaagaaaagcagactttatgttcattttcaagcttgttccaaaggaaagttataggtgtatttgatcatataaatatcgttttgttttggaaaatcacgtttagggacaataaaattggaaagaatccttgcttccaaatcacctctgtgttcaaatcttcatcatatttgcactgccctttcctttgtgttcttagttcatgggtcccattggatttgatgggtttcgtttactttttgctactgaaattgttagtttaaaaaaacaggatacagagtgtcacattttttattgtaactccactttcttgaagttgcctatagcattttaaatttcagaagatcgataactttattcatttccctttggaaaaaataaaacaagattttaactagtggcatgtcttcaaggaagctaaagacatttaactttttctgttttgctctaagggcattctgatgattgcctgaatgtgatcttctgagtgttccagtccctggagctggctgttagccatctcccaaggagggtcgaaaagaacgtagcagaaagctgcagaaagaaaagctggctaaagaaacaggagctgccagccagggcaacatagtgagaccccaactctatagaaaatttaaaaagctgtcctggcatggcatgcctgtaatcttagctactcagaaggctgaggtgggaggatcacttgatcccaggagttgggggctgcagtgagtacttccagcctgggtgacagaggagaccctgactcaaaaaaaaaaaaaagagccggttgttgttaagggccaccagactggagtgcatggtagtcacctgcctccctcctttcctggagaagatgacaacgtgatgaacaagcaccactaccctggaatagtttaaatggcattcagcctggaggagtgtgcacatgcaccaaatatatcttgtgtgtcctttgtagccattgggtctatggagattactctggctgtgagtttggttgattaacattgctatgcaagccctgtccatttagctggaggttatcacaggaggaataaaccacagaatatgactttggcattgaataaatgggaagagagtgcttttgggggccagaactgtttgtaatattataactcctataaatacatgaattgctgcccctttatcataatatccattgctttaatgctctgttttagattggagttcacaccagacacctgagattgtgtttgttatgtaactgctatttcatgttgagaaagtagcaaagcttttaaatactgagaatattttagttacatgaagatacttttagtagtcactgttgttgttacattccccctacccctcagaaaataacagggctgttaaggaatcctcaaagagcatagattgagtgaaaatgacacagaacaaaggacagatcccaggagtgaaatgaagaagttctgtaaatagctgtgccgttttcctttgaaatgtctggcacactctatatagtacagtggtcgaggatagaggggctaattctgtgatgaagcattctgcatggaatttcagcagggcatagatggtgagggcatctggatctgtttgagtttttaaactaattatatgacaaactttttaaaatgtagcatacctggaaacatcatcccgccacgtcatctgcatttaaataatcattgcctcacctttaacacccagcctctagaaaaataaagcatgaacaaatgttagctctgagctgctctcagtaatttggagtgtgctaagcaaaacctacattttctagcatgaaattggcacaggaatgcatgcaaagttttgcttctttgattcatctggttacctagaacctgaggccattctgtattctgtggacaaaaccctatatacctttcatgacccagcttaaatgaaaagtctaatgcaaaacatgctgaatttctgtggccatatttaattgttctagtggtcccacaggtatagtttattattctttttaattccctttaatggcaatttctcttttccttttttaaaaatgtcttttgccttctgttcatttattacctgtctcccttttttattgtgagcatgtctcttgcacagcacagacacatagtgatttcttgttacatgtgggcccacatttattttttatttctatttgtttttcattcctatttatttatttatttatttatttatttattttgagccagggtcttgcttcattgtccaggccagagtgcagtggtgcaatcacatctcactgcaacctctacttcccgggctcaagcaatcctcccgcctcagcctcccaagtagctggaactacaggcacacaccaccaaccacacctggctaatgggcccatatgtaaatgactaattagtatttaaacacttgccaagagttgtttaatacctgctgtgtgcagggcacaatcttatacattcttaagggagcacagaggtgtcagatggggtctgcccaccagtttttcacagatttgaatatttagcgttctgggcaaaagcagtttaggagctgaaaaatcatggccattttaagaagattatcttacccaaaaacccacagtactattgttattgccttatatataaagccattctgttaattttttaaaagtatgtattaggtttaacctggtttctctgtgtttgccatgtttaacatctaaggccaaaaatttgaaatatttttactttctgagtatgtcaggaaagaggagtctgaagctggagtgagttggggaggtgggggggactatatttttatgaaaattttagtaaatttcctgggtttttgtcccacctatggggaagatctaggatacaaaagcattaaatgttaatattgattcaagaattaaatcatcaaaacattgctgggagaaattaaagacctaaataaatgtagagagatcatgtttatgggctagaaaactcaatattgttaagatgtcaccaaattaatatatagattcaatgcaatctctatcggaatttgctgaaattgaccaactgactctgaaattcatgtggaaataaaaaggatctataacagtcaaaacaaccttgaaaatgaaggataaagttggaggagtaatactatctgattataagacttattataaagctatggtaaatcaggatattgtggcattggtattaagatcactgaagagaccaatggaccagattagagcatccagaaataaacccatacatatatgcatagctgatttttgaaaaagttgtaatggcggctcagttgttccaggacaattagatatagttggaacaattagttatccatatacaaaaaaagaaaagaacttcaatcagttcctcataccatatataaaaattaactgaaaatggatcatagtctaaatatattacctaaaactataatacttgtagaaaggaggagaaaacccttgtaaccttgaattaggcaaatatatatatatatattttttttttttcaagcagttctcatgcctcaccctcctgaatagctgttgttacaggtgttccccaccacacctggctaatttttgtatttttagtagagacggggtttcaccatgttggccaggctggtctcgaactcctgacctcaagtgatccgcccacctcgacctcccaaagtgtgctggaattacaggcatgagccaccgtgcagagccacaaaaatattttaagtagaacatcaaaagcatgatccataaaataacaaatagatgaattggacttcattaagattaaaacttctgtttttcaaaagacactgttataagaatgaaaagatgagccacggagtgggagaaaatatttatacatcatataaaagatttgtgtgcagaatatataaataactctcaaaagtcaatagtaagaaaacctttttttttttgaatgtgcgaaagatttgaactgactttttgccaaggaagagatacagatagcagtaagcatattagtcattaaaataatgcaaattaaaactataatgggataccactattagtagtatgtattagaattactgaaattgaagatcgacaataccaagtgttggtgaggatgtggaggaactagacgtctcttacactgctgatgagaatgtaaaatggcagaagcactttggaaaataatctgacagtttctgaaaaagttaaatgtatacctagtgcatgatccagccattccacttctatgtatttatcttaaaaaaaagagaaagaaattcgcataaacttgtaaacacgtatttagtttgtagcagcttcatctgtaatagccaaaagcttgaaacaacccaaatgtccctcagcaggtgaatgtgtaaactgtggtatgaactacgcaatagaataccatccagtaaaataaaggagggaactattaatgtacattacaagtagatgaatctctttataactatgccaaatgaaagaagctatatttacacatacacacattcacatacaccccacatgctgaattattacattcatacaaaattctagaggatgcaaactaatgtatagttatagaaaggagattggggtttcctggcgatgggtgatataaaaagggattggagaaatggattaaaagcacaaggaaatttttgggggtgctgggtgtgttaattatattcattgtggtgatggcttcatggctatatacatatgtcaaaatgtgtctaattttagactttaaaaagcgcattttattctatattagtatttcagggatcccaagacaaccctgtttggtggtttactaggacctgtagcactcagcatatagtcgttcttagggctaagacttattacactgacgtagaaggatacacaggtggatcagtaaggggaaatgacatcaggcagggtccagaggaatccatgtgtgggttttctgtgttccctccctccctctgagatcacacacagcataccacctctccagtagtgaaaatgtagtcacaggcgtacaatgattatacccagggaaacccacttaagattcaagagttcagggtttttgttcagggcttgtcacataggcactcttgcccaccaatatttcatattcctgaaaggaaagcagttgttcagtgccccagacagataaaataaccttataagggtaggaaatgtttcaaaagctgtgttcccggacactagccaagggcaagccttgcaagcagacctttctaaagataaggctttagataaagtctcaggcttgttaacacttttctgcagtcacttatacctcagcttgttaaaaaaaaaaaaagttgtaaaagttagtgtgagttagcacaagacagttgcagttcatttattgaaaaaatgataagagattataaaaaatagtaactttagatttgaggcagaccaatgcagtgagaacctcattacctggaatgcttcatacccttaaatcccctctttggaattagccaggagtgttggtgggtggctgtaatcgagctactcaggaggctgaggcaggagaattacttgaacccgggaggcagagattgcagtgagccaagatcacaccactgcactccagcctgggcaacagagtgagactctgactccaaaaaaaaaaaaaaaaaaaaaaaaaaatcccctttttggaacaaggtaggataataataagtaaaaccaggaagcttggctaatgggagcttctaattatttttactctttaatattgtgactttcatttctattgtatttgaaaatctttccaaggtatatcatttttttcctttcataaaaaattccttggttgatgttcattatttaaccactggttaactgattatgacccagttcagttctatagcaaataaaagataaagcactgctgttgaaattataattacctcaacaacaagaccacctcatgcagttgtgcaggttatacctcgtccaaggcacacccagctgtgagggtgcgtggagcttaagtccagcttgtactttgccaagctatgggctccagcatggggtgtgtctgcccgagaaaggggcacctttttctagtttatgctaagatgccttttgagctgttcagcatgagccctggaaaaaggtggtggtagcgattttctcctacagtgctgcctaatatcagcaagctttcttgtgggcatctctttccccttaaagaaatccagctagtaactttcagttgagcgtcatgtttaaccaggattccactgtgtgtaacaaggacaagcgattccaacggtctctagtttggcccaattgcccttaaaaggcaggcaaatgtttagggtatgtgtttctttttatcactctggaagaagccaggttcaggtctgtatctggatcccattattaatgtccccagccaagaattctgtgtatgtatagcaatagaaaagtcagagaaaggacgctcctgtgacttctctgaagtttttgttcttcctgagtaatgaagtttcctaaaggggaattaaactttctcacctcggaagatagaagtattgtttaaagattcaactttgaaacaaataggaaaatatctgatagttgcaacttagcttcaaatcagcgatgtccagatattgacaaccattttatttctcctaaaccttgagccctagcccaatttatgaccgagtagagatcatggcacagcagccagcctaacagatgggggccatactctagcagcagaaggattctgttttgaaaccttcagcttttgaaatcttacaccactaccagccctacttcttctacatagatcacattcatttcctccctctttttcctaaggaaacttaaaacacatgtcttttccctttttatagatgcgaaccacccgcaaggtctccgtctggcctgtgggcctggttggtgggcggcgctacgaacgtccgctggtggaaaacggcaaagttgttggctggtacaccggctggagagcagacaggccttttgccatcgacatggcaggtgagcagtgtgggtgatgacatttgttcctgctggactgttcttatgctcttgtttataacgatgcactagatgaaggaagctttaaaagacaaatttggataaaaccctacatcatatcatattcaggagatgaaatatttaaaccttcaaaataggctctttggttagatcaagtggaaattgatttggagggtgattagaaaatgccctttctgttccattttgtcccctgtctgtgcctttatcccacaagcgtctacatggcagctactgggttggccactggggattcggtggtgagagctagacctggctcctgccttccaggggtctgttagctggaaccttttgactcccttttctagaagactgatatattaaaatatatcatgtttattgataaatttaacaatgatataaaaattgacaagtcattttaatgcttattgataggtttagtgctttattgatatatttaatactaaaatataaacttagatttctggtatttcaagaatttattgagtataactgtcttaaagtttttattccctgaacaaccaactgaattgaattagccctgcagtaggaccacacgttctaaaatgctactttatcataaaacaactcattttctatgggttatagaaaatgatgcctgtgataactgtggaaggatggagtttgaaacatgaggctcagaggcaaaaaaaaaaaaaattcggtgacatctatactcttaaaaatgaaggcagaaaggcttcaaaattgatctcatcaatcttgagctctgaagcacagctctgtcgggctgccagcctgtgcttgccccatcttctgtgcatatttcccagccgtagtcaagatctccgcgttcagaattctgatgggatggaggctgtcttctgaactggattcatcacttttattctgacaatactataaatctgagggagccagaggacgaagaataccaggagtcatctgaggggcacagcgctcatggacagctgtgtggtgggtcttgtcacatggcatcgtgggagaggacaaataggagatttttactcaacatttaacacacatctccacagcaccagccctcagccaggccatgtctcaggcccctgacctctccatccctctgttactccagctgtttgctttggtcttcagttcttgcagctccagaactgagctggcatctcagtctaggtctccacctggaggcagaaggagaggcagctgagccatcttggacggtcctgaggaccctcgaaagaggcctgccctcgacccgctcagagtgcatggccctgaaaacatggggcatagtgtatcttttgaaaatcgggcttcttgctgaccagaagtgtaccttagagcagaaaatttagacaacattagggaaagtccttctgcttctctgggatgtagttttcttgtgtaaagtgaggcagctgccggagatgaccaccagggccctccagtgcagccctcctttcctggcctcccaccttggaactctcaagtaagagcccaagcttgggcttctaagtgaggattgtgactgctcaagcagccgcagacagacttttgcttcagattttcccagagccttgtttcaacacggacttcccagacatatctccttaacacgtgggatgtctgcccatttccttgcatggatcatgcaaggtgagggcaacttgggtaactcttcctggattttaatctaggaactttatgtagatgatcaggtatcaaatagacttgttgaatatttgcattggttcccctagaatttgggtcacattgatatttctaaaattaaagatgtatgtgtttgtgcattagggctggcctatctaggactgccaaattctgtgggaattcttttttccatgacaagaccaatgtttggatttttctaagcatttcagtatattttcaaagcatattaaaaacacccatcataataagatatgaattatttccttgctctgtattcattatcatggttttaaaataggaataaagtgtctctaaggagacaacttttgtcacactaaataatttttttcacttcacacatgaacttgctttgcatcttagctttcagtaaattattgatatttttggaagtctttaagtgtaagtaatttggtcgataggatagttattctgtttttgaggcagtttgttctaattctaacttaaaaatttgtggctttgtttagattccacatacaattcatttattctctgggaagagggaaaagaccttttaggccttcatgttcaattggtgcttcccgcctcatttccaagttacatgtacacacacacacacacacacacacacacacacacacaatctgagctctgaggagctctactttgaaaatgctctgtgatagtcaagtgagagcaccatattggagcctgggtctgtcttgcatttgcaaagcggattaagagcccaaatggaacatttgtgggtttgagcacattcagtagaagcccctcagagcctgtcctgtttgtatctctgtgaggtcatcacatagcccatcactggaaactcatttgagtatcaaacattgaaactgcgatgtttcatgtcattctagtagttcttacactgtcattttattgccatgttgaacttgcctgatactgaaattttgctctcaggtgacatgaaacattgttcttgaaataatcttatgtttacaaccataatggcagaattaagattatttctgttccattggaggatattttttaaaataatgattactacttaaaaaaattaatatgcctgcccacaagatggaaagaaaacactggaggcagccccactggtggtgtgcagttggcttcaaagctgaccagtagccacatagctctgccaagccagtgaggccctggggggtttctactgttctgtgcctcagaattcaattcttacacctcaggaatctgaggattggctaaaagtgaggaagtccaccaaaggttttagctctgttttgaagggaggcagttaatttcaagtgacagactcacttcagccacttccagggaggtgtcagtaagaacgactgcttgaaagaactgagcttaaatcaatcttcaccctcaccaggaggtgtagatttgttcaagttgagaacttaaaacagatatttattaggaattttcaacattggcatgtgccttattattaattctaggatgtggcccgtgggacacggtgctccattaatgacagtatatgcagttcccagttgagttgctggcacacagtaggtactttattctgctaaaaacacaactaggtgtactgcaattagattctgacaccacctggagttggtgcagaccccacaggttagagggcacagtctccaacaagactgcccttatttcacatgccccccacgcgctggagagtcccaggccacctgcacttctgatcaactgactgcactggatgtttcccacaatctcctcaggtttgctaatttgctagaatgactcacagaactcaggagagtgctgtaattatacaaattatcattgtaatcagtgttataaagaatacaagtcaggaccagccaaatgaagtgacacacaggccagcagagccaggtggaaggagcaggctgggagcatacaggtcttctgtgccttttcctcatacaggtgaagtctaggaaagcttagttttctggtctggagtcctgtggaccagggtgtgtcgaagccctggggatggatgtgctcccacagggagactctgtggcagcctcggattgcatcctgggggcaggcatttaaagtgactgcagggggggagccagggaaagagacaaggcccagcaagagggtgttagggtggacagtggcgaggtcactggagagaaggggtggatgaatgatgaattccgttattggatgtgggaagaggaggacccttggtgagtatgggagaaagaccgctggaagcagaatggtctgagcaaagttaggtttctggacgggcatggtagctaacacctataatctcggcactttgggaggctgaggcaggtgaatcacctgaggtcaggagttcaagaccagcctggccaacatggtgaaaccccgtctctactacaaatacaaaaattagctgggcgtggtggcaaatgcctataatcccagctactcaggaggctgagacatgagaatcacttgaaccaggaggtggaggttgcagtgagccgagattgcacctctgcactccagcctgggagacacagggagactgtttcaaaaaaaaaaaaaaaattaggtttctaatggagcagagggggagagatttgatctgggaaaggcttggggaggttctgtcttggctggacagggatttgaaaggatgttgtgatgatgagtggccaggaggtatgggttaggaagaggaagggtgcaatggccactgaggtcccctccaactcgagggttgtgtgattttgacaagttctgattctaaggactgaggttgtgtaaggcggtgcacctggttatacttgtcttctgtcggcagccaactcctcctcgcctacggcctatcaccagctttccagctggtggtagtttctattcaatggaggcttaaaagccctgacttttgtggcgagtgggtggacagtgggggtggggagcatgactaggaggcaggagggccaggagacaactcttaagaaatgcggcagcaaatgagtaggaaagacagatggtggcagtttcaaggggtataacagctttttcctctttctttaatgatggagggggagaaattgaagttttaagaagtgataagtgttgaaagtcccaaaggagaggaaatgaggggagatcaagaccttagatggacaggttcacctagatagagtcacctctgactcccagaaaaaaggtgagataagtaaggaagccaagggctgggaaggtggaggggccagttgttggaattgaccgtccgccaaatgttaatagagggagaagtgacatttggctgaattccacacacactgaatgtagcagcccctcgcctcaaggagttttgtatctagcagagagagaatgtctacaagagcatggcagatacatcgtggggtcgaaaatgagtacaagtggaatgattgggggttacatttaaagagaaaaccacagccactgggggagtttcgggaaaggtcttgggaagaggtgacatctgagaggcaccttccgtgctaggcccaggccagggtagggagggatcatgggcagggtgtgtttttggaacaagttatcccagggtatgtgtagctcttgggaagggcaagctggggtcagatagtgaggactgagtgctaagatgagaagtttttcttcatttctgtggacattggagagtctgacatttttcaagtaggggactgatgtgattagaaatacagtttgagaaccacatgttggcagtgtgggatgaatgggggaggagggctgggcctggaggctcaggcagccatctgggtaatgagcccgtagcgggctgggaggtgagaggaggtcttaaataccacagctattggggacttataaaattttaacagccttttcagattatactctaaatcagcagacacttagatctttttaacacctttttctgttgtatggtatggtgataaatgatgtattaaatttaagtttggttaattttaattggtgtaatttgtattatcctttgagtcgtaatttatgtgtagaaaatacagtgatgttgggtaattaaaacattcttttaaccagaacacctattttgtgtaaaataggagtctgcatattaggaaaaaaaaaaaaaatcacatcacctgactgaagttttcaagctcaggattcactgtgggtgtgttgtcccagtggagggtgtcgaggctgaaagtgaggaagacagtgatcacgcctggctgggcctcctgtatccatacctgccctctcccgtgtccactccacctcgaagcaggaggaatctttcaggaatgcaaaccagattcttggcagtcccttgctcatagctcttcaggggctactcatgctcttggaataaacaattccttgtcactggcacctgccaggccctgcccggcccacccctgcccaccttactattcttgttcccctctactcaatctttgcgggcagagatcacttcctccagcacattctacccttccctttggggcctgcactgatgcccctgcctggaaatgctccttcctcgttcagccctactcatccttcaaatctcagcttaaaggctgccttcttggggaaggttttgctgatgcttcaattaagatagctcctcccgtgttataatgtgctgttctctcagcctcccatacctctgcaccttgtcacagtggttgtacatctctcattataattgttgaggctccgccaccccgactcccagaatgcatccttcctgtaggcagaagccggactatcctgccctccactacttgcccaatcccagccccaggtttcccctagccccagcctgtgagtggggctgagtgacggcactatcccagagcagctgtccccgctacaagtttaccaggcaaacctttaaaaaattattataaatgatgaccatgaaactggagggggtcgagggatcactctgggcaggttgctgaagcctgctttctgtgggctctctgcagggacatgggaatgacagttattctgggtctccttcatctcaatgtttgtcaacaaggaattttgcctgggttaatttatttggcagaccttttctcagtagataatgctgtgatcagcttcagcccagcccggatcagatgatcatcaaagccaaatgagcagtcaaaattaatgacgttttgctttgcttcatgaatataaatactgcaagaaaatggagggaattgtcttcctgccactttggagtcattcgtgatttaagtgtgctgttttccatgcatgaatgttttctatgagaactataaagttactgaatgttctcagtagagtgacttgatgtgtcatgtggtaccttttagtgcaggatctagggaccagcttgggactttgtccttgggttggtacagtgtgattgtcaccgggagaggactgcagctgccagggggtggtaattctgtcccaacaacttatagaaccacagggacaggtggcagagtgttggggcaataggcagcctgccactcagtttttaatctatttctagaacatggtgcagtctagagacttgcagggatttgatgcccacagtactgtgtctggtcctgtctgcatgtgctgtggccagggctgtgctgggtagaggtgggcgtgtggggcaaggagcacatgtgcatctgtgtgctcatactcagggtgcttgctctggagcagctggtagtggggtcaggtggggtggacgtggagagggagggctctgcagaggcctttcagggctgaaggggaagtggggagacgggtttccaggcctctgtccacctcaattctagcagctctgcatttacatattggagatcccctcaagatttcaatggaataaaacattcattccaggactaaaaattttgaaaacctgaagttttcctttctatcaggatgtccagcagactcaataattatatattgtttgcttagcatttaccaagcatcaggcatttggaagcattctgtgttctttcttcatgaatccttacttagctgtgcaagggatatgctagttttattatccccacttacatataaggagcccgaggcctaggtatgctaagtgagttgtctgggattcagagtcaggccagtgtgtctacagagatggtctccaactcacccacctacagccaagtcactgagttcttggtctctgagcctgcagaacagtttcttggtttcttcatctgcagaacagggaaaatgaaatttttcacaaaatcagacatcacgtgcaaagcagccaggagtagaacattgtagacacttggtgaatgtcactcttaaccaagaaacaagactgtgcctttgggttcagctggctcacacatttattttgatgaattaggtcagtgttttgtttcattatcacagtggtgaggtccatgcaggtagctgtagggtggaagaatcactcatcctcgggtcctgctctgacacatacaggctgtgcagcctgaagatctaggggaatatctgtttcttcctaatacctgtagattagggatcattgcttcttcctaatacctgtagattagggatcattgcaccagctttctgggttgtgttgaggttgaagtaaaacgaatacatacagaagttcctgctgttctgtgaatatttgaatctgcacccacttgtagctttgtgagatcactcttaacggtagtatttaagaacatttgaactctgctgtgggctcatgatgaacttcatttctcttctggcgggtggacctgtgctcattatcattcaatgaattggctcagcatgcaggatggcatgctgagataaacgctagcccttactttagattaaatacccccaaaagagagtgatcaacaggagaaaatcgaagccaaaaaagatcattaaagagttgtttaggagcagatacgtgttcattgttaaaatttcccagctgaaaatctaaacaaacagcacttgagctttcagaagaaaatgccatttgtaacattgagatttgcaaggcatttggtgccatgtgagtgccgcttgcccctgtaggtgagtctatgtagaccacgagacaagtattcaatatgcaaattcctgatggcacatagggaaggatttaaaagaatgattctcatgctttctaatcaagtcacaagggggcaaatgtcctttttcaccacctcgactttcctaagagtccctaggagagcatctgtaggtaatagttttcatctagaatctgttaaataggtattatttattttactcatgtaaatagttaggattaagggttgttgccctgcactgctaacgtgggggccggggtgcagaccacttctctctttggcatgcaggttgtttgctgtgactactacacatttttctgcactggcttcagaagttaagccttgcaggcattcttcctgggctccctgagcagctgtaatcaccctgaccccaaacactctgcacatcagttcacctcaattttaaatccctcaggccaaccgctgtggtcagtcggcattgccctaagctgatgggcctgattaaaccaagagtggcacacactgccctccagcctaggatatgcaatgtcacttttcttctcacgtttgcctagctaatttccagttactcttccagactcattgatgaggcaggaatcgctttttctgggaagtttttcctgattttccatcacacgtggatgcccctttctaccttttcccctagaatccttggcttatgcagttatgaatatttccacaaggtggcgctcatgtcagtgtcctccctgcccctggccgccttgctagccccggagtacactaggagggcgctcgggtctgcctgcatctccaggccgggcacagtctctgatggtaatagcttgaacaaatgtttgctgaattcatgaattttaacatgttttccttttctagtgtaaggattatcaaaattaagatttaaagcttctcgcttctgagacaacattgccattatttaatggtggaggtgtaaagggggatgccgagctgtatactccagagctctctgaggagggtctaattcagcgggtctccccatggcttcgcatcaaaatggcaaggggctttgaaaaaacacccacacttgagctccacctaggagcaaagagaccatatagtctctgagggtgaggcctggtatttgtgtggttgcgggttttttttgtttttttttttttttttgagtcttgaggtgatcccgaagtgcacccaggagtaagagaggcgggcgaaagtgatcagaagcgactcctatttccttcctgtggctcgttatcgtctctcagtggtcacagtcctttcccaggccaccccctgtgtccatctcaggtgggataacctcatgacagagtttgggaacgctcaatagagtcacttccatagaaaatacgtcttccattgctcaagcaagaagagaatttgagcataggacaggaatattttaatcataataactgaaaaacaccagcaacaatataaacaaaaagattgcctgtattcattgggaatgcaagttttatctgtgttttgattgtggtgaaatatacgtaacataaaatttaccattttaaccattttgaagtggacagttcagtggtattcaattcattcacattgttgtgcaaccataaccactgtccaactccacaccttttccatcactgaaccaaaattctatgctcactaaacaataactcctgacttgcccctcccctcagcccctggttaccacaattctactttctgtctcgattaattagactattctaggtacctcatataagtggaatcatatttgtccctttttttttttttttgcttattgagcataatatctttaaggttcattcatattatattatgtatcagaatttcattcctttttaaggctactaatattccattgttacgtatagtccacatttcgtttatccatgcatacagccatggacgtttgggttgtttccaccttttggctactgtgaataatgttgctataaacattggtgcacagatatctgttcgagtccctgctttagattcttttggatgtccaaagtagaactgttggatcacaggtaattttttgtttgaattttttgaagaatcaccatactattttctacagcagctgcatcattttacactctccacagcaatgcaggaaggttccagattctccatatcctcactaatacttatttgcttctgttttgttgtattagtttttttaataatagccacctaatggggatgaagtggtatctcattctggttttgatttgcacttcatgtgcttcgtggccatttgtacttccttcttagagaaatgtctattcaagtcctttatacatttctataaaatgtttatgtatttatttgacttcaccaacagaaatggattttctcacagttctggaggctggaggtccaaggtcagggtgtcagcatgtgagttcccttgaggcctctccttgctcacagatggcctttcctctgcggcatgcattctccactctctcctctttttatatcagtcatattggactttgcccatttttgaattgagttgtttggtttattcttgctgagctgtagaaattctttatattttgggtattaatcctttatcagatatgctatttacaaatatttttcccattctatgggttacctttcccactctgttaatactgttctttaatgcactaatgctttagttttggaagaagtctagtttatctatttgatttatttatttttattttttattttttgagatgtagtctcgctctgtcccccaggctggagtgcagtggcatgatctcggctcactgcaagctctacctcccgggttcacacttttctcctgcctcagcctcctgagtagctgggactacaggcacccgccaccatgcccagctaattttttgtatttttagtagagacggggtttcaccatgttagccagtatggtctggatctcctgacctcgtgatctgcccgccttaacctcccaaagtgctgggattacaggtgtgagccaccacacccagcgtacctatttgatcttttgtcgtctgtgcttttggtgtcatatctaagaagtcactgctgaatccaatctcatgaagctttcctcgttgtcttccaagagttttatagtttgagttctttagctttagtctgctgttagagaaagaataacaaaccttcatttatccagaatggttgagggttgggggcagagtatggtcttttttataattaactgtaataaattttaccatttctacattcctccatccattaaaaagatcaggattagaaagtaggaaaatatctaaaaccatgctggaaaacagaaaaggacatgtacaatgaagcttctgggagaaatgtgaggctaagtttggatggacagacagacagaggagggggatcatatgagaagtaagaggatggtgtcctcatgggagcccctggacacccctattctcagagtgcagagatccagtgggctgaagggggccgtgcctcagacacatgccatcaagcccctacacagcttcctcgcatggcagagaatgcccccacatcaggtgggggttgtgtggtaagctcctggttctgcctgacttctgggcagtttcctcccattaacatggagggaaaggctctatcacagcccactggtgaagccgcctctgaagtgttgagtttccctgagtaactccctggtttttctgtggaaaccgctcaaagtggccacaggtgtacctaaaataaagcctctcacaattgctaacaaagaccaatacaagccatcaatgctgttcagccttgacttctgtttgcaaatatgagtagataattaaaaaaagtaaaccaagacacaggagttcccactgaaagagtataggaatcaagagagggcttttaaaatttctagagttcattctcagattttaaaagatgtggcatcataaaacaagagccagcagctgtgaggaaagagtcattggagagcaaggattcctgtaaataaaaggcatgactgctggaataacctcatgtgagagggtgacagcatcgaggctctaagtgtcagtgatactgttagggttgcaatgcagaggagtggatcccaaagccctcctggaagaatcctccaggaattcttccaaaataggagcaaaagtacaaagaaatagaaatgtcagtggaaggagacttataaatccagcatgttcagtaagagtttcagaattagaaaataactatatatgaaatatcaagaaagaaacagggctggttgtggtggctcacatctgtaatcccagcactttggaaggcgaaggcaggagaatcgtttgaggccaggagtttgagaccaccagcctggccaacatggtaaaaccccatctctactaaaaatataaaaattggctgggcatggtggtgcacgcctgtgatcccagttactcgggaggctgaggcaggaggattgtttgaacccgggaggcagaggttacagtgagctgagatcatcccactgcactccagcctgggtgacagagcaagactcacagagcaagactctgtttcaaaaaaaaaaaaaaattagccagctgtggtggtgcacgctgtagtcctagctacttgggaggctcagccagaaggatcacttgagcccaggggattcgaggctatagtcatgccactgcactccagcctgggtgacagagtgagactctgtctctaaaaatcagaaagaaacaggatacaagttcctataatacttgagttttgagagtgattccattgccaggtttgaatttgggctctgctacttcctcagagtaagcttttaagcaagttacttagcctctctgtgcctccatttcttcatttgtaaattatggtagtaatagtatctacctagtggggtcactgtgaggattaagcaggttaatacagacagagcacctaggacaaggcctggttcactgtgaatgtttcctaaaatgtagctgctgttaagccaaccgtcactgccaccactactcttagttcttagaatgtacaggtatgcggctgccctgtgaaagcttcacagtcggtccggtttaccactccagtctctctctctacctcctctgccgcattgccacctccacccccacccccacccccacgccccgtcatctcttacctggaccagcagtaacctcctaactagctccacagcttcatttcttatccccaataatatgctccctgacccgttaggctccaggttaaaacatttctgcagctccccttgcacttcgtttctccatggcctcccaggccctgcatggttgggcatccccacccccgagcctcgctcaagttattttccttgtgttctctgtgcactcagcttcagtggcttgctgtcccatctcacaatcccgccatcacgtgtacttgtctctgcctggaaggctctttcctcaacccacctgcctctcccacaccatccttcagagtccagcttaatcatccttggtccaccctggagggtcagatttcttcacatagcacccgcacccttccttcatagcactcaccaccgtgtgtgcacctgcactattagccaacattccacctccctgacaagcctgcacctgggctataatgactctaagatgcagatcatgactgattttgcttaccaccttctccccagtccctggcagtttgcctggtatgtatgtttttgttgaatgaatgaatgaatgaatgaatgaatcctaagtttagaacaactgtgccaggatttaataataaaacaatcccaagggtattcacagggggtcagggggaaaactgcttctctatgaaggagggaaaaatcagactagcatcaggtttttttctgtaacactgaatgatacagaataatggagaaaggtgtttagagttctgaagaaaagaaatggatcctaggattttttgtaccccgtgaaatcattatgtctgtgtgagggcaaaagagacatttcaaatatttttctcaaaaaacaaacaacaacaacaacaaaaacaaagtcacttaaggaaagcgctttagccaaagtgaattagaataagaaactaaaaaataggaagattgctgtaccagataaagtagtaagcaacaaaagtggcaattttaacaattaaaagtggatagtaactaacatgactgtgaagtttaaagctgtttgttggaatctggaaataggagaagcaaagtgaaaatgaagttttcaaataaaaacgttggtatatttgaatgcctgctggtgacggagaggataggaaatgggagaataggtgcccactagcagatgtagtctcattcaaaaaggtaagggggagggggggcagagagaggctttaattcatgatgataagagaaatatcagttccttaaaagctccttaaacagttaaaaatattttaaataaggaattttaaaggtaaccacagtagaatacatataaaacaaaaccttttcaacaattagaggaagaagagaaaccaaaatgaattcaaaaagaagaaggaaaaaaagcaaaaaaaaaaaagtatgtaatgcacctaagataaaaccaaacatgataaccacactaagtgtgaaaaaaattaaattgctctaaataaaacacagcagcaaagctatatctcatataaaagacatgtaaaaatgtgatggagatggacaataaagagataaactatagtatcctaaggaaggacagacaacaaaagagcaggagtgttcacattcgtgttgaacaaggcagaagtcaaggacaaaaatattgaatgagaaggagaggaacattttgtattgacggaaactatgtatactacaaaagtacagcattcatcagccattgtgtatgagttatcaatgagtccaaaaactaaaggcagacatagataaaaatagaaaatttgacaaaaccataatcatagtagacatgtttaacacacttatctaaatctgacagatttaagtagacaaaaggctgtagaaaatggaatatataaaaaacttgatctaataattatatataaaacactgtactcaatagacacagaatatacctttatttcaagtgttcatgaaacatttataaaaattgaaactgtatcaggccataaaaccttaaaaaagtgcttgtataggctcaaagcactacactagaaactaacaaataataaattacataataatgataattaaaaagtggagttagatctgttgacaagtagatgaccagaggtaaactgacagcagggctggagaagcatggatggtttgatccttgctcagaagcctggtccctggccagtctctccctgtgcttccccatcagcatttgcagggaggaacacaggattacaaaggtcatggctggcttatggaaacacaagctgaaattgaatctcaggtatctatgcctttgtaccttaggacagtgtgttttacccacagttctttttaaagtggggaagcgtggacagtcttacaggcaggtgccttgagcagctccacccccgccgccaccacattcatgtcagtcttggcctgaacatatcttcaggctacaccaaggttcaaagccaatgtaaggtaagatttggctacaggattttgcatgcagaaaccatcagcgctgttagaagcccctttgaaggagtgagaaggagaaaaacctgtacagaggagagcgtacaggttactctaggtacttaagaccaggacttgatggtaagagagcctacaggaaatgtccaggaagaacccatagctctgcagaagaggcagagggtcgggggaaaactgcctggccatggagtgagagttggaccaccccaatcctgctccttctcttttgtgtcttgggtgaaagagtgaaatgccttccaggttctgatgtaagctccttctttgtcccagtgtccaggcctgcactggtgaccttctccagcactctctgtacctgtgctgaacacccccggtggggcccatctgtctgctcttacctgaaccatctagtgcagcagacactttgctggtctctctacctcaggcagttaccatactgctgccagagaaattttcctaaaattgacttttgattacaatctggagccaaggttgcctgccacagagtagggtgcagagtcctgggcacaagcaacttgacagccttgtcacccatcattgctgctccagcctaagacttggcctcacaggtctcccttcctctacatggatgcttcaaagtccctctcagatttcagtgtctccaaagcccttactcattctagtcagatagcatttgcttctccaactcctgtgctcccaaagctctctacttacaccttttatagcatctgtggcacagctgtgcccatatctgttcttctaattaaactaggagttgccagagggcagagaccacattcagtattgtgttaccaatactgaaaaccagcaatgggcccctaaagagcttctgaatgagtgaataatatcaaaaggaagatgaaaaatgaaagataacatcctttagattggtgaataagaatgctcttttttaatgattatgcttaacaaagaatgcttactatgtttccaggtaaatatttgtttacatatattcatttaagatttacaataaccgtataagatgatagctatctgcattttacatttgtgtaaaccaaggcacagaacagtgaaagtaccttcctgagtcactttaatagtagatggcagagtaaggatttgaattcaagccctccaagttacaagcctttactcaactaccgtccttccccgccacactatttcattaaaataggtctttaggaaactctgaagatttccagtcagaaaccaacatagcttccatgtgaaactaggaggtgatgtaatagcttcattagtgaatccctgaagagctaccatttaaaaaattatttcactaggattggggaataagtaccttcttcaccatgctctgctatattttctgggttggactagagtggcttagtttgaccaattcagtagtaccatggcctcttacccaggccatgtcaagcatgttgactctgccatgcccagcatatacaagtaaactctgaagggtttatttcccatcagagtctttttggttctaaacttcagtgttagttgtgcccactaaaaaataattcatggatattttccgtattcagttaattaaacccctttatattatgtttggttattaggatcagattttccatccttgctcagcatcctgattgtttccttagaagattcagttttctatgatggttttttcagagtagagatttaaatgaattgtttatagattaaataaagaacacttcttggaaatgcagagtgtttcacttttttccatggaaaataatgactgctaaataccttttgaggaatttttaaaattagacttttacttaagtttcaccttgaagcaattataaagtttcagtcagtagtcagcagattaacagacctgtttaacaaccaaggcatgctttttcattcttcttccacaccagaagaaaataattctaaattataattggaagtaaatgcgggaagctatggttctgtttactcagtaggaaagggtagatttggaagaaaatctatcatggctgtgaaagaacacttcatgacatatgagcattcagtcttagagccatgaaaattataaaggaacacttgcaggaaacagtggcaatttgggatagtaaataagcaaaggaaacattcctttatatagccttcttttctgctttctatatttgatttaaatctagtggaaatgattcctaaatcaattttactaacacatttgtttctcacttggatagttttgagatgccagggctggaaagtacagggccaggggaaaaaaaagtagttaagtagcagttttctgttttcaatcatcaaaccctacattacagtattttgtttttcttctatacttacctataatgtggtactgggatttggggttgcaaaaagagtaatgtcattgggaatgacagagtaaggacttctgaatattctcatccataaaaacagtgagaacactggcaaaatttgtcaaagtcaacttcttaagaactatggaaattagctaaaagtatgcaagaatctggggagttttgttttttttttttaaaaaaaggctaaatcttggtaagagcagtattgtagtatatcaatttgccctatttccatccccttctctccatttcctccatggtagctttgaaaaccaacagccctgtaattgtggtgaaaaccagcagcatagcagttactagaagggcagaacagggttggaactcattcagagctccattttaagagaattgtcattatgtgatctgtccagcaattccctagaaaaccctgttcacaaggcttgtctttatttgacctcattcactagagcaaacaggcttttccctgggggcgtttgtcaaaaacagcttgtggtgattgtttaccatcacagctccctgaggcaataacagttgtggcaaacaagctaagcaaaaaacttcattccgtaggggcatttgaaaagctctgacatatttctggaaggccttgtggatgtgtaggactatatgcatgcccagggctatgtgcttgttcaagaaaatccttacaaagtcctcagtcttccccctcttagtactgtgagcccctgtgcaatcaagaagtgaaaactaaagcagttgtacattgcctggctgagtgttgaaagcatgcccaaatggacacagagcatcttggcaaagactgagagactctggttccaggcatttaaggaaatctgtgtccaatatttagttgacctcttaagctaactgaacacagacttcattgcccacactcagcaaagaacacagactttacaaagttagttcaaggaagtcactaaaacgataatgacaacaataaaagaacaactaaccttagagaatctgatttccagagttgtcacattatattatttcaaatgttcagttttcagcaaaagagtacaagacatgcaaataaacaagaaagcataaccaatacacaaaaaagaaagcagttgatagaaactgtccctgaaaatgtctggacattatatttggtaggtaaaaactttaaatcagatattttaaatatatggagtccactaaagataaccatgtctaaatagctaaagaaaaatgggagaatgatgtctcacaaatagagatcaataaagagatagaaattatatattttttaaaaagaaccaaatagaaatgctggagttgaaatgtacactaataaaaacaaaaaattcaatagaggggctcaaagcagtttcagcaggcagaagaattagtgaatttgaaacatagataaattgatatgatccagtttaaggaacagaaaaaagaatgacgaaaaatgaacaggacctcatagtcttattattcacatatactaatatacatattatgagtcgtagaaaaagagagaaaaagggacaaaaagaatatttgaaaaaaaatgttagaacttcccaaatctgtatgaaaaacattaaacatcgaggaagctcagtggattccaagtaggataaactcagagattcatacctagacacatcataatcagttgaaaaccaaacatgaagagaatcttgagagtaacaaaagaaaactgaatatgattaacaaaggctctttaataagccattgtttattaacaaagactgatttcttatcagaaaccacagaagctagaaggcagtgggatgacagattcaaagtactggaaggaaaaaaagaaagatcaaccaagaattctgtatccagcaaaactatccttcaaaaatgaaggagaaatgaaaatattcccaattaacaaacaccatgaaaattcattgctagcacatgtgccctacaagaaatactcaaaggagtcctttaggcaaaagtgaaaggatgctagacgggaactgtaatccacatgaacaaataagaacactagtaaaagtaactacataggtaattttgaaaggcagtataaatgtaatctttatagctcttttctcctgttttgaaaaacagctacataaaccagtcatcagaaatctggtttgaggagcacaaaatgtataaagatataatttttatgacaataatagcacaaatgaggggcaaagaatggatctgtgtaggggcaaagtttttttatcctgttgaaattaagttggtattaatctgaactaaactgttagaaattgaaatgttaattataatccccatggcaacctctaagaaaataactcaaatgataaatgacaagagaattaaaatcatacactaggaaatatttgtttaataataaagaaggcagtaatagagaaatagaggaataaaataacattagacatgtagaaaacaaacttcaaaaagacaaatgtaaatcaatttattggtaattacattaaacgtaactggataaaaaacccaatcaaaaggcagatggacaggatgtataaaaatgatccaactatatgctgtctacaagacaaacatgttagattcaaagacacaaataaattgaaagcaagagaagagaaaaaagtatatatcatgctaacaggaaccaaaaaaaaaaaaaaaaagaacgggaatgattatatgaacaccagacaaaatagactttaagacgaactgttactagagaccaaaaaaaagttataatgagaaaagggtcactctgtcaagaagatataactataaacatatacgtgacttacagcagagctccaaaatacacaaagtaaaaatgacaaaactgaaggaaaaaataattcatcaataatcattgcaactatcaacatcccactttcaatactagacagaacaactagatagatcaactgggatagaagacttgaaaaacactgtaaatcaattagatgtaacaaacatctatagaacactccacccaacaagaatggaatacgctttcttctcaaaggcacaatggaacattctccaagattatataccatcttaggccataaagcaggacacaatttaaaataactaaaattacacaaagtatggtcttggtttatactggaatgaaatcagaaattaataccagaaaggagtttgtgaaattcacaaatatatggaaattatacacacactcctaaaaaaaatcaatttgttaagaaatcacaaggaaaattgggaaatattttgaagagaatgaaaatggaaaaacaacatatgaaaacctatgggggtacagccagagtagtgcttagcaggacatttatagcttcacatacctccattaaaaagaagaaagatctcaaatcaataacctaaccttctgccataaaaaaacagaaaaagaagagtaaactcaaaataagcagaaggaagttattagattagagaaaaatacagaatataaaaacaatataagaaaatccataaaaatgttttttaaaaaccaacaaattgggaaacctttacttagactgtcaagaaaaaggagagaagcctcacattactaaaatcaggaatgaaagcacgaatattaataccaaccttacataaattttatgagaatactttaaaaaattgtattgcaacaaattagataacctatatgaaaatggacaaattattggaatgactattaaaactgtctcaaaaaaatctaaataggcctataacagagagattgaattaataatcaacaaaacttccctcagagaaaagcccattttcagatggctttactggtgacttctaccaaacatttaaagaattaccaattcttcacaaatcctccaaaaaatagaagggaacacttttgaaggaattctaccaagccaatgttaccctgataccaaaaccaaagacatcacgaagaaaaaaaaaaacaaaaaaaaaaaaacagacagacctatatcccttttgaatacagatgcaaaaatccttaaaaaaaaaatactagtaaagtgaattgagcaacatatagaaaggattatacaccatgagcaggtaagatttatccctggaatataagattatttcaaatataaaagtaaatcaatgtaacacaccatatcaatacaataaagaacaaaagctgcacaattatatcagtagatgcagaaaaagcacctgacaaaattcagcattctttcatgataaaaacactagagagaagatcaataaactaggaataggagggaacttcatttatttgataaagcatatctatgaaaaattcacagctaacatttttaatagttgaatgccgaaagctttttccctaagatcaagaataagacaagatgacccctctacccatttgtatacaccattgcactatagcttataaaaggcatccagattgtaaaggcattagtaaaactatctccatttatcaatgacatgatcttttacatagaaaaatcctaaggaacacacacacataactgtttttttgtttgtttgtttgtttgtttttaagagattttcttgagggtttatttacatggctgtttggacatctctgttgaaaaggaaaactctttttttttcttttttttattattattatactttaagttttagggtacatgtgcacaacgtgcaggtttgttacatatgtatacatgtgccatgctggtgtgctgcacccattaactcgtcatttagcattaggtatatctcctaatgctatccctcccccctccccccaccccacaacagtccctggtgtgtgatgttccccttcctgtgtccatgtgttctcatcgttcaattcccacctatgagtgagaacatgcggtgtttggttctttgtccttgcgatagtttgctgagaatgatggtttccagcttcatccatgtccctacaaaggacatgaactcatcatttttgatggctgcatagtattccatggtgtatatgtgccacattttcttaatccagtctatcgttgttggatatttgggttggttccaagtctttgctattgtgaatagtgccgcaataaacatacgtgtgcatgtgtctttctagcagcatgatttataatcctttgggtatatacccagtaatgggatggctgggtcaaatggtatttctagttctagatccctgaggaatcgccacactgacttccacaatggttttactagtttacagtcccaccaacagtgtaaaagtgttcctatttctccacatcctctccagcacctgttgtttcctgactttttaatgatcaccattctaactggtgtgagatggtatctcattgtggttttgatttgcatttctctgatggccagtgatgaacacacacaactgttaatgctaattaaatgagtttagcaagactgcattgatacaaaatcaatatatgaaaatcaattgtatttatatacactagcaatgaacaatctgaaaattaaactaagaaaatttcattcacaatagtgtcagaaataataaaatgcttagtaataaagtatgacttacacaggaaactataaaatatcactgaaatgaagaactaaataagtggaaagatatgttcatggattagaagacttaatattgttatgggtcagaagacttaatattgctaaaatggcaatattcccccaattaatctacagattcaatgcaatctttatcaaaattctggctgccctttttgtaaaaattgacaaggtatttgtttctaaaattgatatggaaagtgatgaactcagaaagaagttaggggatttatacttcccaatttgaaaacttataaaactacaataatgccatcaccagatggagcgacatgcaccttatagtcccagctactcaggaggctgaggcaggagcatccctcgagcccaggagtttgagaccagcctggacaacataggaagaccctgtctcaacttaaagaaagcaaactacagtaatacagtgtggtactgacataaggatagccatatagattaatgaaatagaactgacagtgtagaaataaatcatttatggtcagttgatttttgccaaaggttctaagacagttcaatgggaaaaaaagtcttctcaaaaattggttcccagagttatgaatatgctaaaaccgcccttaatcataccatataaaaggacaagttttaatatatgtgaattatatctcaataaggaggggtggtgggcaggaaaggtggaaacacacaacattccaaaaggcagtgtatgctttgctgggaagaggtatgaaaggagagttggccggctcagaattagaggaggtcccacacatatctttctttctccagcaagttccatgactgcactgtgtgtatatactttttaatatgaaagttgaaatctctttttcttattgtttaacgtggggggggaaagagaggcttttgaaattacctgatagctattggtaacactaaacatgtgtcaagagcccaatactctaggacaactacccagagtgattattacacagaaaaagctgttagtatctttcttgtggccaaactataaaagtcttgttgccaaaagtcatcgtttagaaactggaactagttcttatttgtaacagccttgctgagattagatgatgtatagttggagaagagagaatgtggcagtgggatgagcctatggaggtgaggctaaattgatacttacacaatagaagaactgagaagcactattgatactgttaactgtggctgaaggaagaagaggaggcttgctgtacttcttcctttccaatatttctgccttttttgtgggggtgggagccttatttaaatggccaggatctccaggactttgttgaataaaagtcaagagcagccatccttgcctcattccaatcttcagggatttaacactcagtctttcaccaattaagtataatgttggcattaggtatttttgtagatgcccttattaagttgagaaagttcacttctagtcttagtttgctgagaggcttttatttcttcttttcattattactagatgttagattttgtcaaagcattttctccagctattgtgatagtcagatttttttttttagtctgctaatatggtgaattacattgattgattttgaaattttaaaccaacattgcaatctggagataatcctcaagtggtcatgatttattgtctttttattgttgaatttgatttgctaaaattttgagaatttttctgtgatcatgaggattattagtctgtagttttcttgtaatgtttttgtctggttttggtatcagggcaatgctggtcttacaggataacttgagaaagatttcctccttttctattttctagaaaaattcatgtagaattgctgtcatttcttccttaaatgcttggtagaatttaccagtgaagctctctggtcctggagggttgtgtgtatgtgtgtggaagattttaattataaacttaatttatttgatacagggctatttcacattatctatttcttcatgagtgagccttgtagcttgtctttcaaggactttttctattttgatctaagttgtcaaatttactatcataaaaagttgcttataatagccccatattatcattttaaggtttgtagaacctatctctttcatttctgaggctggtaatttatatcttctctttttcctgataagcatgggtagagtttatcaattttattaacttttttttcctaaatgactaggtttttatttcacttatcttctcaattgttttctatttctactttagtcgtttctgctctcatatctattagtatagtcgttttctccatttactttgggcttcatttgctttctttttctaatttataaaggtaggagcttaggttattgaattcagacctttcttatccagtaagtgcttaatgttttctaaaaactagtttcccatctaaacactcctttagatgtatcctacacattttgatatgtcttgttttcattttcattcagttaaccactttatcatttcccttttgatttcttctttggtttgtattttgcttagaattatattgtttagtttccaaatatttgggatattttccaggtatctttgtatttactgatatctattttaattccactgtagtcagaaaacatattttgtacaatttaaattattttaaatgtattgagacagatttatggcccagactatggtctaactatcgtgataatgttccatgtgtactttaaaagattgtattctgctgttgttgggtggagtgttctataaatgtcatttaggtgtagttgaaaatgttatttaagtcttacatatctttcctgagttttcaagtttgtaaatttttcagtcgtcatttcttcaaatttttttccctgtctccctcattcattcacctttgactctgttcctgtgactctgtacggtgtgtgtgtgttggtcttgccttttctgtttcattttggtagtttctatcattatgtgttcgagtttactcaacttttattctgcagtgtctcctctgctgctaatcccatccaatgtatttttcatctcagacattgtatttttcatcactgaggtgtcttgggcatcaggcattttgaattttatgttgctagatactggatgagagagacatatatgtatacacacaaccatacataaaaacacatatatatgtaatgttatactatattataaatacatatgtattcttgagctttgtactgggacacaactgagttaacttggaaacattttgatcctttccaggcttgcttttgaagtttgttaggcaaaaccatctcagcctctagtttagggctaatcaatttgaccttacaacaggcacgataaccttccaagttctcctccaggtgctccagctgttactaggtagctccactctggctactgagaatgggaactagtcccctccagtaattgattcacctgctccttgccagtggttctgtacctggcctgaggtagttgtgtgagcatttgctcttcatactcagttgaagagttgaggagagctgtctacagatcagcagagttcttccttctctagtactccaccctgcatatcctagttgtcttggcctcctcaaattctcagttgtttcctcaattcaaggggactgcagagctttccgggttcccctccctgtggtgtagcctgaaaacatacttcaggcaggaagctggggcagttgtaggggtcacatttctcttttctcagagatctctgtctcatgtgcctcttttccaatgtctggaaacttttttcaatcattttgtctgccttttcgttatttaaaacaagtgaggaaaaaccagtccctattgcaattttgtccagaaatgtaaatagcttgttggacttttaaagtcttacaaattttctactcagtaatcagtaatcatatatggaggtaggccctatccctctgcctgagagggaatagttattcctgagtatccatagggaattggtttcaggactgctactcataccaaaatccatggacgctcaagtccctgatatagtgtttacatataacctaggcagatcctcctgtatactttaaatcatctctagattacttacctaatacaatgcaaatgccatgcaaattgttgttatactatatagctttaaaacttgtattattttgactggctgctgtagctcacgcctgtaatcccagcactttaggaggccgaggggggcagataacttgaagtcaggagttcaagaccagcctggccgacatagtgaaaccccgtctctgctaaaaatacaaaattagccaggcccacgtctgtagtcccagctactcgggaggctgaggcaggagaatcacttgaacccaggaggcagaggttgcagtgagccgagattgtgccactgcactccagcctgggcaacaagagtgaaactctgtccaaaaacaaaaaagccctattatttcttgttgtattgtcatttttttgttttactttcagatatttttaatctgaggttagttggatctgcagatgcatctgcagatacagagggtgactgtgtatcctccccacctagctctgctgaagaagtcaggaaatcctgccttctcagtgaacaatcatttttatttgcatttttttttttactcagctgaccagggcagaaaatcctactcccatgactttcgtaagcatctccaaagtaaccaacatctttaaagataacgaatctcactaaaaaaggaaagatataatacttgaagtataaatacttggaattacccaagaaaacatcttaggttggaaatcaatggtttaggattccctttactgtgatttcagaggggagaactctttaactctgcccccagcttcacagcgggtcagattccccaaaagtaacccaggggttgacctagttaacatgcagtctctcctgccagctgtgacctgcttcctttcaagagatcactgagcaaaggaaattgcgttagctgattgtggggcatctgaattgtgctcctccacccctttgtattagagaatagaaaaacacttgggtactgtggagagccacaggctaacatgtctccagggtgctggcctttcaggtgcgcaccattctctagtgacaccaggaaaggagaccttgctgcaaaatgatgtatagcttcacaactggctgttaactttacataaattgtagattttgccatgtcattctgtgtgaagcgctggaaggatattcctgtgctaaggaaagcaacaaaagaatctgaatccttcagtggtcgtgatggttaatgtgttaaagtcttaggggaaaatgaaggaaatcagatccaggtggctccatatcatttccagaaatcacctctgcacaatttggatcccatgtttttgagagaatggggaaatacaaccagtatcctgaagccatgtgaagaatgtatcaggagtttcagtatgactgagaagggtaggctctcatctgaatttaaaaaaaaaaaaaaaaaaaaaaggataaagcttatttataagcatgtgggaaaaagcaagaaatcttttaacactaaaatctgatctgacctgttggaaaggacactacgttatcaatttgaacctctggcttttgttgaggtgtctggtggttgtcctagttgtgtctaaggaaggctgtggacttgttaccagagttgctatcacatgtaggtgtcctggctttgctacctggaactttcccaaaccttttacatctgtcaaccagtattctttcagccataaatggtggctggcatcacctgcccctcatgatcacactgacaatagtatttttatttatatattgtagtatcttttgaacagtgctttgcagtcagtggagtctttccatacctcaatttttcatcaaacattgagttgaagtgttacacttctctcgcaaataaagaaatggggaagttagaaaatcaagaaaggttaaatgagttggccagtgtcccaggggcagggacctaggcaaaaacaaaaggcttctaattccaaatccagtattctctgctaaaatgtgccacctccctccctttagggttggtggaggtatcgatactggggctagtcctacagctaatgctttatgattctttgttctgcttcactcagcacctgctgtaccacgttatgtttgtaagtggcttagtgttaacttttctccaaaaggcagcagggtctggaacaggagactggcccagtctggcatctggagaggatggtggttgtggtgttttcacagctcctccattaccacctggtatcatttagtattactttgcaaactgaatcataaatcaactcatttaatgtagagaagggcaaaagttgctgagaaatgttttgtgggttggtgcccggagcttcaactctgggagggtgcctgacttgacagtatcaccttagtcactaaggaaaaagagatccagggcttcagaccttcaaaacaattattacttgctgagatggcaaaaacaattgtagagtgcttcaatggctgagctttaaacagtttgttaaactacagattaaatacgaatgattcttttttctttgagacagggcctcattctgttgcccaggctggagttgcagtggcacagtcatagctcacagcagccacaacctcataggctcaggcaatcctcccacctcagcctcctaagtagctgggactacaggcacgcaccacgtgccacaacacccagctaatttttgtattttttgtagagacagggtctcattatgctgcccaggctggtcttgaactcctgggctcaagagatccttctgccttggcctcccaaagtgctgagattacagatgtgagacactgtgcccagccagtaatgatttttcgtatgaccaaaccattgaagaaaatttacacttatttttggtaaatgaaataccaaaaaaaaactttatcagatgatggcctgatatctcctgcactgatttctgccccacataccctttttagattgaaccaaattagaaatataaaccagatgattaaaaattaggtatgattcattttccagctaatcggctttacttctgttgctccctcttctaaatgcaaaatgaatccaagcagtgctggatttaaggaagcatacataattaatattacagggcaggcaggagagctgggcatgtggtctcataccccacatgtagttaggtaagcatgtatgtttttcagctgcatttatttcttagttattcctagtggcaaatgtggggggttgatgatcactgtgaaacagcagcttataaaattcaccctttattatcaacagactaaacttcctattttgcgtagatgctcctgtgcacgcctttattttacacggaatgtaaaatattgtaatgactgattttcctttgagactgtaatacaggtaatgttcctattcaactttgtaaaccaagacctgacacacagtaggtattttaaaaactgttttgatgtgaccaaaattatacagaaaaaaagagaagtacaccaggattttaaagtctcttttttttttttatttttcacaaaggatttgctgtaagtcttcaagtcattttgtccaatccaaaagctgtatttaagcgtcgtggatcccagccagggatgcaagaatctgactttctcaaacagataacaacagtcgaagaactggaaccgaaagcaaataactgcactaaggtattcattacacttgtgctgcccgacctcgagtgtcaccatgaagagtgcgctacccaagctatttccttccccttcaggttctcgtgtggcacactcggacagagaaggttaatctagccaacgagccaaagtaccacctggacacagtgaaaattgaggtataaattgaagcagcaactggtgcagtttgtccagccagtggatccatatggaagaggatgtttggagtttaggctacagagcattcaggtattgtttgttttacttcagtacagcagcctttcttgtcatctgatggacatctgtttaaatggagcttgtcagttaacataagctaattggatggttggtacaaaatgtatgttttgtcttcatttgttctgcatgttttctctacaacaactaaattggaagatttttttgtacagtgccgatactgcaagataccactcttgagtatatattttttctttttctccaatttgcccttataattggtagacttgaacaggttggtagacttgaacaggtttttaaaacagacaagtattttgtcagctaaacgttcctgatgattcctgactttgcaatactaagtaatttttggaaggttagtggcagtatacatcataggaaataaaaacccacaaatgaaaaggtctatggagtcatgtttaatgtagggaaataacattttgtcaatactaggcaccataaaatgtaaacacaattactgtcataaacctagatataccttcaaggattgaagattgaaagtggctttgttttagttagttaccctgtttgcatatagtgcagaaaaaggtcttcatgttagcactatgtacattaagaagagatccaaattacaagagaggcagataaaatttgaattctttaagcattcattaaacgaagttttggagtaacatccacgtttatcttcctttcactaatcacgttccctgttaagcacatcataacaacagcacagtgaagtgaatgatgaaataagagcattttgatacactagaaaacagtgctcagtgagacatttacattctatttatatgattaaacatttgatcatacagtaccttcctacaggattactggctaattttggggtggggtttatactattagaggtattactaacatgataactacttcccttatatgcaaacattagagctataattttattgagaggaaaactgattttgcaagttgagcagcttctcaaataatgcagtacatgaaatcatgggaaatatgagcaaagctgcccttgacataaaatgatttatcaacctgcttttcaccacatcaaattgaatcagtacagaccaacacggtcaatcagatcattcttaatatgaacaaatgggtaaaaagaaaaaaaatatgcatatgaataaacaggggaactagatgcgtttcagcaaggaatgtcaggtggtagttctggatgaaacttgtattgcagttttcatttccacagttgtgtgctgagagtctgacctgatgagcttccagaccatcctgctgttgtgctggagggctggccaaaacctgcagtaggggttgcactactgatactcatgccagccatctgctgattcatctgtgaaacatataaaaggcttagttcaagaggcttacttcacttttaattcttgtttctttagccacacagttggtcattttttcattaatgtgacaactagtccaagcactggaataaaaacagagtaccatacaaatatttcttaaagcaaatagctactttgttcccttctttatctactttctagatacagtttccccaaagattaaccacaacttacttaaaaaaaaataccaaagcaatcttgggattttaatgagtccgctactctaactaactttcacctacactaggatattgtgctttaactactaaggagtaagaaaattttaggaagtaaaatagtctaaaattatcctataaactttgtatgatagatattattctctattaaaatcttatatacttcctaaatatttttaaagtggtcataaagcatttatttctctcgctgatctaacaacataaacatctaaaatttattttcattgtatgcaataaagcataagattacatgtatttttcttcaagactggagtcaaatatatatatatataagcatcttaaccctgtgattctcttacttccaaaattggtgataagagaaggaaaggcaagatttaccatatagtgagtgggtttaaaacttacactcagagttagactgtgttcttaatttaatacatttgacttgacttatttacagtttcaaagacactaacataaactacatcactaatcaggcataagtgtctgaagaagcagatcacgtcttcatacctactaaaggacattttaaccaccttgtcgttggccagtagattgcactgatggagtgctggagaacagcatcacccttctgcattatctggaagtaagagccagtattaactccttcctggttcatctagcaccttaacctgagctgggtgtgcttcagcatgttgaccatgtgactgacacttagcacatacaattttttagattcccagcgggtagagaccaatgttttacctatattcttgtaaatggtggtagcaaaattaactgtgatatatagtgattgtgctaatgttagaaatcactctagactattccctgaatgctctaaaggtaaaacaagtgaccaaacagaaaccaagattgccaaaatgctggaggaacatcaatgggaagtgtaaaaggaagaagagtgggagcatgaacctctctaagagcctttgtctgtgcagctagagaaaagtcagaacacagcacctgaaatagaaatgttctatctcagctctaacttaggtagaaataggattttataatatgaggggatgtctggttcacaccttatgggaattgaatctttttgtactctttttaaacataaaagtcattatagggtatgtaaaaagaaaatacaactttacaaaggtttctcaacaaaaagaatttttacagagccatggggcagtaatcatccgacctgaaaaatagccttagatccctcataaaatagtgctttgagaatatgaggctagatttttattttctaataaaagatcctaaaattattagtgaagctaagttgtctaagtggactgtaaaaatgtcccaccagcaagctggataaagcttagtgctaatctcagaggtgacagagagggagtctcatgatgcctgagataatttctggccattagtggtgttcacgttacagttacattacaatttgaaatgaaagatgtttaaccttttttttacagaatactctaaaatagggataataacacatcatttgtctatctgatacaacttcataatatttatagatacttttgaccctataacatattatccctattgaattctttctgccagatcactagacttaaaaaaaaaaaaaaaaaaaaaaaaaaaagatttagaaaataaatctggtttgatttgggagaagctagaaagtaaatgacccctacctgtgagaggctccactggggctgctgagcttgcggcaggccaaacttactctggggtgcacccatttgtcccaccattcctccttgggggccaacaacgttctgaggaagtggcatcacaccagtttgtgcatttcccataaacccattgggcatgggcatgcccaccatcatgcttggactctgtcccatcacatttcctataaggccaggagctgcaggcacaggcacgcccatcgatggaaagccctgaaatgcagctggtgcttgtgaggtaaatggtatatttgtgggtcccataaatacacctgcaccacaaaaagaaaatgaatgaagacagagctatcacgtgtagttgcactcatctctataatcacagaaaaattgcctttctgaactactcacagcaaacattttaattccagtttggctgctcctactactcagaccaacccacacctaaaccctgagagctggttgtttctaggatgcagacaaatcagttattaacctgagtaaatttaattaagaaatgtaaatcatatgcaacagccacacaaaatatcttccactgtgaagaccaaactatgtagcatgacatcatacactgttttattgctgatttgtaccactggtcccccagtacgaaacagggaagtgagagctgactatatctcgcttcaataggtgtagtgggctgcccaacaattttagctcacatgtgaaatgcagctcattattttaaaggaaatggtgtgaaagattaaaactctgtaaacaataaggcttatgctaatattttgttatgattacaaaaaaattcatagattttttttaatccatgtggtaactcaagactgtttacctgcagagaaaatacactgtacgcagtcataaacttcatgcaaatcgtttcaataattcatcaaagataatccatgttctataagcttgtgaaacaacatttagtgatctatgaacagcttgttaattccaaataaagttctgtgaatcctgtacatgcctcttaattttttaattctaatgctcattcatttcggcttcatagttgtataaactgcaacaacaaaagcactcactacatggaacaataaaagatatataattgatcttattatataattacaaaggatgtacttctagtaatgtcactgaaagcagatatcaaaattcattaccaggagtactttgctgttgaatggttcctgtgccatacagagataagatggagtctttggaaagttgtttctttgccacttcttctgattttgtagtttgctcagtgaataaatctagatccccagatgttactgtagacagggttgcagctgctggtgcagagggtgtcccctgagacaaacaccaaaataagctatcaaattctgcatagtaaagcgcagcttatccattacttaaaatccaaataaagttataaaattagataggaatcaaacaattgtagaaggtaaaatggtgccattcaagaggatcacttacaagcccaagcccatataaaaacatctacaatcaagacagtacttcttaatttgaatctgttaatgtaggtagactgaagcattttcacagtaagttgcatttactacctaaggtgacaccaagtttttgctcatcaaatcctggggctcaacaatagttagagatgagaggaccaccactccatagcaactactgcttcaagaaactggtatcctttggaataaagaacatttctacaactacaacagactgtaagaggatttgcaatggctacttaaaaggttttatcttttcaaaacctgtatcataggatttttatacatctaatcagttttaactacaatattagactgcttctaatctatccagaaatgaaggtacagcaaaactttgaccatctattgtctgaacatatcctgcccttcacttttggacaagggggcaaatgaacacaaatacaaataaacatgtagatatttaatataaaatattctcaatctcatatcttgcacacactattatacaatcacaactgctaaccttaatcatctccgtagtcactaaacattaaatcacattcacatgttatatggacttgttttgaatatgaagagagtttcaaagaattctatgaagactagtaaaagctggctgatccttctcaaactacagaataaggtgagttgcaagtggaaattaaattcaaacatttaatgtcctcctagaacaccatgcaataagttaccatccaaacattgtacttataaactacacagtattttgaatcttatgactaagcaagaattgtaagcgacaaaaagccgcttaattttccaaaaattcaaatatgtaagaaattagatatcatggaatactaaatatcacaatacccctgaataaaatatatctaagctaccaatgaagcagcagcagatcgtagagctaagagcatgggctggagcctgtctgccaggactagagcctgcccccatgactttctgtggtacactcagacatgttactttacttctcctttcagtctctctcctataaacttgggataagcttaatgatcacaaaagtgttctgcacaatggttggattaagtacttggtgtttattgttaatattgtttataaaacaaagcaactacatcactaagtgatctttttatcacacttagtatctgttcaacctaaaagtctgctgaaaaccctggggtctattccctgtggataagagacaactataagaaaacccaaaatgttgggaagctatgattccactctcatagtagagcagcctaatattcacatactgtaaacatcataatatgaaatatctacctcaacaaggacacagtctaaaaacagccaaaccaatcagcaggactagtaagcactcaaatgtccacttactttctggtgctccattcgccagcactacgaccccaggataaaagggaaacaacttctgcctctcattttacacttcaggaagctgcagagcatctaatcgaaggctctctggccttctgggacccaagggcttaaccaagaaaaaacaggacttagcccttgtgtatgtctaggtactgttggtatatgtatatgtatatgtatatgtatatgtatatgtatatgtatatgtatatgtatatgtaatgtatatgtatatgaaagaacaggaaaggggtttctccatgtcaacaatgaagactctggaactgttcctctccagcccccaaaacacaggtacactcctgtcagctaagtatttctaactaacccctttaagaaagactagaccccagacaggtaaggcagatggtaaaatcaatctatttcatattcataagttagaaaatattgtactagaatttgtatatactcagaaaataacacaaggagtgaaagaatacagggttcagaagaattcaaaatcttggtgtccacaactagtttgagctcaacttcacatattaaaaacccaccaaaatgactaaattacatggtagcaatatatgcatagaatctgtagtttcagcaccatcccccattttcaaaggcattattttgaaaatatgtctggatttttttttttttccagacgaagtctcactcttgtcccccaggctggagtgcaatggcgtgatctccgctcactgcaacctctgcctcccgggttcaagcaattctcctgcctcagcctcccgagtaactgggattacaggcgcacgccaccacgcccagctaatttttgtattttaaggagagatggggtttcaccatgttggccaggctggtgttgaactcctggcctcaggtgatccacccacctcagcctcccaaagtgctgggattacaggcatgaaccaccatacctggccaaatatgtctggattttaatctctacatgaagtttagacgaaagatactactgttcaccaaatattttacagggctcaacataacttgtacagtctaaccagtgctcaacataacagtgttccaaaagaagtattagatatgattttaaaaattaaccctatgtcctaccaggtaatgctcagaatgcctaaagtctgaaggccagctgccacccctcttaaagccagaggctacactccttgtcatggcactacttgtgcttaagaattaaacgaagtctgcattgttctacttgctgctttaatacagaacagaacacgtgaagtacactgaaacctcagaggtgggatctaactctcttaagcagttgcaaagcaactgtcagaccccagtgacagtgctaaataagtctagcaggtataacagccgcactacaatgctagactaaaaataaatggcttttcacattctggttgtcaaatatcctaaatgcttctttccaaagacacaatattagacaattttgtcacatgtacacctatgcctgtaccaatttgtaaggtaattaatcttaattgaaataacagtaacaatattctcttttttatgtgtgttacaggaggggaagaaggggcaaagccataaaataagctattttgctgaaaataaacactactgctgcagacaattttgataaagatccatttaatcattcctaagaaatctacttgttccattctaatggtaactatataatgactatcataataacaataaatatgtgcaacagaaatatgttcctagccttataagacattgactttttcttattaaaactgtctaccagaacaattcagatttgactcagtttttctatggaaaaggaaatattttatctcaaaaattatgctgcacaaactgcttgtttatttgtaaagtataaacttaagatagaatcttaatgttgtatgcttaagagtagtttgtttcctgaaagttcatacagttcacattacaaaaattccatgtaatgttaagaaggcaattcaaaatttcttcaccattaatacttttattaaaatatcccgatcattattattactgttctagatttttaaaaaatcacttaaaaaaaaaagcaaggtagattttaaggctaacttaaaacataatttaccttcattttgcctttattttaaaaagacagtactaaatttgctagaacttctgcagtcaatatttacaaacagccacagttttaaaagctctgaagtaagtgaccttgttgatctcaggaaagttgaggtagtcagggtttttccacttgttcattctaaatactgttgtttccctaaagcaagggttagaactttaaagacagtgaatattttaggttttgtgggctatacattctctgtttttaatatttaactctgcttttgtagcaggaaagcagccacatacagtacctaaaccagtgggagtggctgtgtgccaataaaactttatttgcaaaaacaagctgctggcttagtttgctaaactctagcctaaagaacaggagacttttaaatcagttactgctcagaaacaattcttccaaaattgaaattttgaaacttttcaaaaaggaaataagcagtgaccatataaaaccatattcttatcacatacctgagctgggggcatgacagttgcaggtaagggattagaaatcatcggtccaaagatgtccagatcatcgttcaggggtggcaccgttgtgttcccgttggtcactggtgccacagcagggccatctgaaaagaatatagattctcgtcttaacgtagaatatcttaaattacttgaaacatggcattattttaaaaattgatatatggttaaaaaaaaagaacagttcaaaagttggtaaaacatttgttctccttctacctacccccgatcccctttcccaaagaaaccatttccagttttgttgattcccccagaaatattctttatccactggtttctaggtatatatccaaacctcctttttaaccaatggtatcatactattcacattattttgcaccctaattttttttaataagatcatagatttttatggtgcttcctatatgccaggcactgttctgggtacttcacatgtatcaactcatttaatcctcataaccttatgaggtaaaaactacttttgagataaggggctaaggtggaatttgataccacacttattaataatccctctccataaatgtatgtgtgagggtgtgtgtgttttggagataatatcatttttacctaccatggaaataagttttgatgatctaaaacatctgaaatgttatgttttgaagtcacaacatggaagaaaactagatagaaaaaacaaaacacacatacaatacttaaactgattctacaggaagcatccataaaactccaaaataagtcctttatttattccagcacagccacttttagtgatggctgtaccaagccactgcaatgtacagggaaagggactctgacagagcttcctacttaaaaattcaaattaaaaaacagtttttaaaactgtaatttcaagaattcaaaaccggtttattttatatcccctttttatgttagtgaacatttataagggctgggggcaggagatgaagtggagtgctataggtcgagtttgcatgcacagcactccaggactggaacatctcacaaggttcagttttctgtaaccacaaccaagttaacagttcagagcatcacaactccagcctcttgagagttatagcctaattaaccttctatcttaacaatttacagtctcatttgatatctctttggtagaccatactctcatcaaagggaaatctgtcatctttgaaaaccttttcaacaatgaatggggtatcttgcacaaagtagatactcaaatactgacaaattcaatggaggatctaccatctcattcatatttccaccacaatccacagaaacttagagagttcttgtctttttccaagtacaactagagaaattggtatcttttatttccctgtttaagcttcaattacaaagaattattaacacatagtcacgataaaatattttttgctatttaatttacaaaagagtgtgtaaagcccaaattaggttaatctgaaagttattcaactgcaaatttttcaagtcattttcagtgatatcacattatcacaaccattaaaagaaatatattgatatgtattatacatatctatatcaagtactatggacaattaaaaggtgaagaaataaaacaatgtacatagattataatttacaatatatagaattttaaactgagacaactatcaaagaattaagactcatacatgaaaatactttttttcatttctaaccctttcaaatggcaatattcactttaaagttagacctccttaaagcgctactttgttttccagttcattccataccccatttacatgatgtatagtacattataaatatcagccagaaataaagtgatattttaaagggacaaggcattctaggtttaaaaacacaacta

SEQ ID NO: 565 - DNA, 2509 bp, Homo sapiens
gttctgagaagacaagagcaagggactgagagcaggcttccgctgcggcgcgcgaacacagccgggacacaacccccagcgtctccacccgctcctcgccaccccggcgggaatgtgaggaaggaaagcccccagcgccgccgcccgccctcgaaggcgtcccagagagcgtcctgggggcccgcggctggagcccttgtgcccgcagcaccgccggactggagcggcgaggcgcaccgggtgccgcttctcggcttccactcttcagaaagagcgcggtggggatcagcgcctttcccgcactcggcacaactccgggaccggcggcgcgcggctggaccgagtcccgcttcccgccagctcacctggagtcgggggcagcccctgcccgcccgcctgcaccccttgtcgctctagcttgcgcgaacctgccgctcctccacgcccaggtagtgagccccgcggctccaggtctctgcagcgccctcggccccatggacagcgcacccatcaccactccctaagtgctggcgccgccgctgtccaagctgcgcactggggtccctcggctcgcccctctctggggtgtccgagaggccagggagcgtgcaccatgaagtccgcgcttttcacccgcttctttatcctcctgccctggatcctaattgtcatcatcatgctcgacgtggacacgcgcaggccagtgcccccgctcaccccgcgcccctacttctctccctacgcggtgggccgcgggggcgcccgactcccgctccgcaggggcggcccggctcacgggacccaaaagcgcaaccagtctcggccgcagccacagccggagccgcagctgcccaccatctatgccatcacgcccacctacagccgcccggtgcagaaagcggagctgacccgcctggccaacacgttccgccaggtggcgcagctgcactggatcctggtggaggacgcggcggcgcgcagcgagctggtgagccgcttcctggcgcgggccgggctgcccagcactcacctgcacgtgcccacgccgcggcgctacaagcggcccgggctgccgcgcgccactgagcagcgcaacgcgggcctcgcctggctgcgccagaggcaccagcaccagcgcgcgcagcccggcgtgctcttcttcgctgacgacgacaacacctatagtctggagctcttccaggagatgcgaaccacccgcaaggtctccgtctggcctgtgggcctggttggtgggcggcgctacgaacgtccgctggtggaaaacggcaaagttgttggctggtacaccggctggagagcagacaggccttttgccatcgacatggcaggatttgctgtaagtcttcaagtcattttgtccaatccaaaagctgtatttaagcgtcgtggatcccagccagggatgcaagaatctgactttctcaaacagataacaacagtcgaagaactggaaccgaaagcaaataactgcactaaggttctcgtgtggcacactcggacagagaaggttaatctagccaacgagccaaagtaccacctggacacagtgaaaattgaggtataaattgaagcagcaactggtgcagtttgtccagccagtggatccatatggaagaggatgtttggagtttaggctacagagcattcaggtattgtttgttttacttcagtacagcagcctttcttgtcatctgatggacatctgtttaaatggagcttgtcagttaacataagctaattggatggttggtacaaaatgtatgttttgtcttcatttgttctgcatgttttctctacaacaactaaattggaagatttttttgtacagtgccgatactgcaagataccactcttgagtatatattttttctttttctccaatttgcccttataattggtagacttgaacaggttggtagacttgaacaggtttttaaaacagacaagtattttgtcagctaaacgttcctgatgattcctgactttgcaatactaagtaatttttggaaggttagtggcagtatacatcataggaaataaaaacccacaaatgaaaaggtctatggagtcatgtttaatgtagggaaataacattttgtcaatactaggcaccataaaatgtaaacacaattactgtcataaacctagatataccttcaaggattgaagattgaaagtggctttgttttagttagttaccctgtttgcatatagtgcagaaaaaggtcttcatgttagcactatgtacattaagaagagatccaaattacaagagaggcagataaaatttgaattctttaagcattcattaaacgaagttttggagtaacatccacgtttatcttcctttcactaatcacgttccctgttaagcacatcataacaacagcacagtgaagtgaatgatgaaataagagcattttgatacactagaaaacagtgctcagtgagacatttacattctatttatatgattaaacatttgatc

SEQ ID NO: 566 - protein, 323 aa, Homo sapiens
MKSALFTRFFILLPWILIVIIMLDVDTRRPVPPLTPRPYFSPYAVGRGGARLPLRRGGPAHGTQKRNQSRPQPQPEPQLPTIYAITPTYSRPVQKAELTRLANTFRQVAQLHWILVEDAAARSELVSRFLARAGLPSTHLHVPTPRRYKRPGLPRATEQRNAGLAWLRQRHQHQRAQPGVLFFADDDNTYSLELFQEMRTTRKVSVWPVGLVGGRRYERPLVENGKVVGWYTGWRADRPFAIDMAGFAVSLQVILSNPKAVFKRRGSQPGMQESDFLKQITTVEELEPKANNCTKVLVWHTRTEKVNLANEPKYHLDTVKIEV

SEQ ID NO: 567 - DNA, 236246 bp, Mus musculus
  misc_feature (1)...(236246): n = A,T,C or G
tgtgacattggctaatttttgactctgggtttgatcaaacatttactgacataccttaaaccaagatgagttaggctaagatgtagagccctgagttgaacactgtggtccttgtattcaagcaaagcttgcatacactgcaacatagtacttcatttgtgactcatttgtttcaaaatcacgttaatgcttttgtctgaaggcatcctccagtcgggctaggtgggactgtctatacagatttcttgttatgctatacatttcttgagactgagactgtgcaccggactttgctgtgatgtgttaaagagtttgatcatctgaacttcattctttatgtctttctctagaaggtaccctgatgcaccatcccttcagctagtgctttgagactttgagcctggggggtgttccccaacaatcacctaagtgctactacttcagtgacttgtgttcattgcaaagtccagtgacatttcctattcatcccgttaggtaggggccttggtgaactatgttctccaccacattaataagttgaagtcccaactccagtgcctcagaatatgagtgtctttggagatagtatttaataagaaaattgaggtataaagatgggctctaatctaacatgatgggttatcttttgagagccctgaaagagactacccctccttttttcccaattaattaatttattcaatttacatcccaatcacagttcccctctccttccaggtccccctcacggcccccatgcccccttcatctttgagacgggcgaacccccacttcccgcataccaacccaccctgacacctcaagtcactgtgggactagatacatcctcttccactgagatcagccaacatagctgagctaggggaacaggattcacaggcaggcaccagagtcagggtaagcccccattccagttgttgggggacctgcatatgtgcagcagggctaggtctagccctttgtatgaactttggctggttgttcagtctctgggagcccccaagaagaccttacccttaacagtttatgttaataaactttaagcagattcctttttaatgcatgctgtctactttgtaaaacgttaagaccattttccaaggaggaacactggcttttagatgtgatcatctatcactcaagttggaatgaaatcttggcatccttaacggagtcatatttacaccttcttcagtttccaaatctcagccagtggaaaatattttcatcaggagtttcgatcggaaagccaaaatcaagagtgaaaacctgtctttgaggaggattacatcatatggcacatgaaagcccatctggcttaagtcagggataaatatgtagaagttcagtccagttcagcatcccgcagtggagtgtctgttctgggatagaggcagagcagaaaacccagcgagatggtctcttccatctcaggaccttgcggtcgaggaatcagacttgtgtttaaaaaataaattttcagagaagtgtgacttcacatggcagttaaaggctgccaggatctggctggggtgatgtgaaatgacctaatgacctgtttactttagacaatctcaccgaggaggtcattaggacagtgcatcaaaatgctgtccatgtgcatggtaaaactggggttgagggcagttcttggatttttttaggcagtctgtttttcaggccagctcctttgaacatcactattgaagatgattggaggatgatgtgccctgtacaatggagttcagcccaacttaaatttaaacagagaatagaattctactaaatgcttaggcttgaattggagattttaaaaaccgtgcatctctcataatctttggacactgtcagaactcttccagaaagttaatttgaccagagaaatgaagcctttggccttgtggtgcctacacaattatctatgtaagatgtggctcataaatactaatatttagagttagcttcacattgctaaagcaaaggtgaacttttaagaaagtcctgtattcctttcagtctcatatctagaaacaatcctcgaggagaacagctttgctgctaccatgttcatgtgaggttcacctcacctcaccaacaaacacattggtctagcctggggattctgtggtcagcagcacacttttcgaatctgagggacatgcccaaattaacacacaaacctccctcccattgcaaacttctagatgtaatcagggtgctgagaaggtctgggcaggacaaagtgtgtctgggatgttaagggggtccctattatgtcattattgcaaggtgcatgtgtgcatgcacatgcatgcatgacgtgtgtgtgtgtgtgtgtgtgtgtgtgtgtgtctgtgtgtggttactggcaagtggaggtatgaaatcaggcaaaggtgtggcttactgaaaagaaccttcatgccatgcctccatagggttcagagacaagacagaggaggaggagggattgtgatgtgaaggggaacagaagttacttctctggaaatctccccactgagatgtcaggaatccattttccaaaatctcattttcttttacaatgttacaaggtctctatgtattccctcagaagagaaagatggcacaaagctcccatcaatgcatctctgttctgaaggctgctagtgtcttggattgaatcactgtctgtccttcagtatgcattcttcattactatatcaattaaatctttagacttttcatataaatcctgaattgtatcagagtccaagagaaagcagatggtacactcaaaatatgttaatttttttgtgtgtttgtgataatctatgaacatgtgctctaagtcagtttgttatgttgctagtcctgtggagggacaggaattgttaccagacccaaagccagtgggccattcaacatcagccaccttgagatgtgtagtgattgaagaacacagccctacagggagacggcttaggaagtaaacgtgttgtgcccgacccccctcccccccacttcacttcttcaggtctccttctgggactaagcttaagtgtaagcacatggcacttaaaaaatgcttataaatcccaaacaagctgctatcagaaagcaagagagagggatggagtgatttttttaggtaagggatgggaaattaaatacacctggaaggtgacctgcttatgtccccgggccaatactgcttgctccagctgtagttcatttgtttacatttgaggggtttgttttttgttttgttttgttttttaaacaaaggccaaatttatttgtccatttcccttcccgcagtggatagtatctggtgtcttagcgttttgatgtgcctgggaatattctttgtttgtttgtttgttttttgtttttcgagacagggtttctctgtatagccctggctgtcctggaactcactctctagaccaggctggcctctaactcagaaatcctcctgcctctgcctctcgagtgctgggatcaaaggcgtgagccaccacgcctagccacctgtgaatcttcttgtgtgttttggtgtatgggcacagaatttctctgggaactcttcagtggttagatttgaactcttgagctggggcaaacacgtggacacctccaggtcacactagtttagcatcggttcatctgtttctgaagcatgtgacgtcttcttgagattctgcattctcagacctggactggggtgttcctgtgcgtgaccttctccctggttgttcttgtgctttcacgcgttcttatgcatttagtcagcactgtttcctctgccccgaaaatgccccctccttgtttactatttgtttatctacttatatttatggagatgggggtgtcattgcatacagggtggcccatccttggggatgatcctcctgcctccgtttctctgtagctggggttacagtatgtgccaccttgttggtttatgtgctgcacaggatcgggcccagggtttcctgcacactaggtaggcattctactaactgtggcatatcccaagccccgcctttttttttttactagttatatttggatattaattctgtgttggttgcaactgttccaattctgtggatattagaatacgtgtgtacttaattttagacttagtttttttttttattctaatgtatcttcccaaatcaatctgttctttttatattcaccttcattatccgctcttgggacctgttactttttagcttgtgcttttaaagtggttaaaagatatacagcacagaattgtccattttaagtgtacagttcagtgacagtgtggacattcaattcattgcacgggcatcattgctctccagctccaaactgtttaatatttttcttctttgtagtttattttataattctgtatctttctctttctctctgtgtgtctctctgtttctctccgtctgtttctctgtctctctctgtgcgtgtgtgtgtatgtgtgtgtgtatgtctatgtatgggcatatgtacatgagtccagaaaagggggttgggtctccttgtgctagagtcacaaggctgttgctgtctgtctgatatgggtgctgggaactgaactggagccttctgcaagagaagtacatgctctttattactaaaccctctctccagcctccactgcttttattagtgtctcccccacccctgccccatcttagttagaattttactgctgtgaacagacaccatgaccaaggcaactcctagaaggacaacagttaattggggctggcttacaggttcagaggtttggtccatcatcatcaaggtgggagcagggcagcatctaggcaggcatggagcaggcagagctgagagttctacatcttcatctgaaggctgatagtggaagactcacttccaggcagctaagatgagggtcttaaagcccacgcccacagtgacacacctactccaacaaggccacagctcctaatagtgccactcctaatagtgccctgggtcaagcatacaaaccatcacacccccattttgaatgtggttttgctgtgctgttccaagtggcttccagaccttaggtgtaagccatctcattacattagtctcccaaatagcagagagtacaggtgcctgccaactgtgcctgaaacatcatgcattgtttaaggacttctttgggggcgaaacagtataaagaccatgtctatatttgttctgaaagttttactagtttgtctctcttgagtaggtcttccactagctggagttggtatctgtgggtagtgagagatagagaataaaactgctctcccacagtcagtcatttgtccttgtgtcatttggaactgtccatctttgctccattgacttgagcagtggatttgtcacatgtaggcttatttataggtgtgggactgcttctggattctctgttctgctcagttaacttgaatattcctgttccaatatcacagggttgtaagactgtaacaatcttcccattggtacacgcttcaaaggtacaaagataaaatccttacttttcttactgtcgttgcttcgtagtcacatgcttatccagccttccccagccactcaatctagaatttctaaggctcctccaaacactatgcatactccttctctggttgaattgtttattgcttggcagctatttatattaattcataggttagtttgtttatttcgtttcccattagaccataaagttctagagggtagaggtgtgtggctcttccgtcagaaaacactgcctggcacttagtagggctctctgatgtttccagaataaaagaaaccgtgcttatatctgggaggccatttcttcctccccgtagtacctcttaagggaatgtttcctctcctgctctcttgaccttcactgatggaagccaagggagaaagaacgggatggttgtttctagactttttccatagccaaactctcggaaataggaaatgaagtcaggagggtggagggagcagaaggtggccaagtttttatgggtcagccactctgctggaaagacttcttttcctgtgactccatgtgagcagggctggaagggctgtggtcacagatgctctcttggtaaagatccttagcacatcctccctttaggataacataacccaaactggaaaagaacagggatgcactctgacttaaccaaatatggcgactaaaccctcaactgtgtaatgcaccacacaatagttctggggcaacgacgtcaactacgggtgaatgccagctgggttagacggtctgcagctggtattgtccagcagcggctccgtgcttggtgctcagcaatgattcatggaaattatgctgcaaaaggtgctctgtgctttattctgggataaactgaggagccgagtcattccagaaggaatgcgtatacagttttcagatgagtgctcgaagtttcttaggttagagtcacatttgattcaaaccatctgtttaatgtgaagccgaacccagcatctttccaggactcatcaatctcgtttcataaataattattaaaggctcttggaatccgggagctgtggttacagaagtggcacagtcgtccctgcttgtgactgcttatggtttagcgaaagtaaaattgtgcttgtgtatatatatatttttccctttatgaaatcagtgtccatagtttgctcagtcttttttgccggggccattatattaatccatcattgttgatgagatggatgtatgagagctcactgacagcatctctgagatgtccatatcattgctgggacagggatgtcaaccttccaattgcctctggatacagaaaacaatttatatagtgtgcagtgacctaccctgatactaggaaattacgacgctggcatagctgatagactcagcctattttcttctctgagatcaaatataggtttttagggggatggaaagatggctcaagcagtcctgagcactctctgctcttccagagccctcaggttccaatcccagcccccacctggtgaattacagcagcctgtaactcgtcccagggcatctgatgccctcttctggcctctgtttgtcaatgcatttaacacataaatactcaaaaccacccctaccaatatatatatacaaaaacaaaatagatttttggtatgttgtaaaggcagctattccatggcataataagatttttgtgtggttaaacatattttttctagttctttatgaattagtcataaaatgacattacttatgtcatattttaactttgaaggtaggcgtttaagagattgtattgaaaggtccaaacaccttggggataagaattttcacttccctgggaagcaaaccaagctcctcaaaggaagccactgacaatgggccgttgatcagtgacagccctgacttagggaggataagtctccagctgattccatttctgggacacctggccagaggagataacaaggccgcagccaagctggtctctgaaactcttcatggtttcactaaatataatagaactaatatagcagccaatcagacttgtcctaatggcactgctttgactcctatcaatcacattagaggttaccttacccttctggaaaattcccctagccctgcatcaaagggggcttatgagcccctcaagccgttgacatttggatgaatggttgaccattcatgccatgctgtttgctggcagtttctgcagaataagcacctttgcatgccatttgagtctagggtctctctttagcaattcttggaccctaatagtataaaggggtacatgaagagaaatcaaagtggctgtcaaaaaaaaaaaaaaagcttaaaatcaaatagccagggaattcttaacaagccttaaatcatttgaaactacaaaattggctgactcataggtgcatttttttaaagaagacaatattttttagtggttcatgtttggaaaagtctgtggtagagggttataaacataaaaataaatcgggcacagtggcacgtgccttaaatcctagcactggtgaggcagaagcagctctttgtcagttcaaggtcagccagatctacacgtgccatttcagaccagcctggcttacatagtgagaccttgttttataatcagagtgtggagaaaataatggcaccatatggggatcataaggaatgagggtgggacttcaagggaacgacatatgtggcaacagtgagctcttttattgtgaaatatttgccaattttgcaaggaaaaaatttcattgccgacagtagtaataaacattttcatacttttatgagctaattgttcagttcctgttaacattttctctaataaactcatactctttctgactgaaaaataattctggggacttttttagctgcacaatttaatgttttttttgttgttgttttgttttgttttgttagctgcacaatttaatgtttttttttttttttttgttttgtttgtttttttttgttttttttcgagacagggtttctctgtgtagccctagctgtcctggaactcactcagtagaccaggctggtcttgaacacagaaatccgcctgcctcagcctctcaagtggtgggattataggcgtgcgccaccacgcccagctttatgtttttatatattcagatatttagttttgttttctttttattctttgtgatttcacttaaatttccatggtgtcctcattctaatcacggtatctctccttctgtgcttcagcccccccccccacacacacaaggcagttaatatattttaggagtttctatggatttggtgatgataattgtatataggccacagaggagaagtgagtaccctactgtcatacgaaagaaatcaggccagtgaggttggcagaatggagtcccctgtcaggaatcctttggaagtcaccgttcttttatgtgtaaattggggctaattaactagagtctgttttgtgtggcttgagaataaaaattgacagataaacaggttccgtttcaagggacagccgccgatttagtctatcttaggtgggtactttgaggcttcaaagtactaggatatactatgcatttctaaacccgaccactcccagccccatcccagagcttgtgggtggcttttgtagggggacacgccgcctcgaacacactgtagaccgcagcggccgtccaggctcttaggacgccacctagctggcctcgctgtggtcccggagcgctttttgctaagtcctgcaggttcctccgctccccgaagtctatgctcgctcgcgtgttccctggcgagcatcgcgcggggacgagcaaaccgacgtcattcttacagctcttttctcgtccggaagatgaaggcagcgttgctaacaacgaggagggacagtccttgtgtcgtgggcaaagcggacacggcggctccttcccacctcctggaatgacagaggggaggccacccccggtaaagcgcccgcaagcttccggagcctcagttaccctgactctggctgcagcgcgggaatgtttgccgtttgcactgcagccccaagcccaaaggcgtctccgcgcagagagggcacctggggttctggaaaacaaaaacaaaaaacccaacaaaatctccatcacttgcattcaagatatcttagggcgggtgttgcggctcagcctaagcccagcacttgtgggaggttgaggcaggaggatcgccaccaattccaagttagcctgggcttcggtgcgagacatggtctcaaaagaactcacatccgtcaacaaaacaaaaaacaaaaccagcatcaaaaagtcggtcggcgtgcaaaacgctccagacgcgcactaccttcagtcgctaccgcgccacaccgcggtgggcggggcgccagggggtgggacctctgcgcatcacttccgcttcccgttccaaatgaactctcccgccactgggagagagcggctgtcagcgcgggtgtttctttcagcctggctgctggctggttaaacaatctactgcggctttatttgggacggagagaagccgtggagttggaagcttgtgagctgacctggtgggaccgagtgacaggtggtgtcgggtcggagggaggctccgggtgggatggcggggagggcggcccgggaaggcgctggggccggaagggaagttaaggcacttttgactattctggaaaggctggattccagagttagaagtacgagaagtaagcctctcatctaggtagaatctactttgctttaccttgatttcaggaatttaacacccccctcccctcaaacctcatcttgtcttgggttcgcacatgcctgagggtggcaggcagcaacacttagtgatcactctttggcttacaagggccaccgtctacatataccccagtttgagcccttcccacattcgcccctgttattacagatgtgtatagaaaatctagacaacacagcagggtctaggaataatccctttaaaaaagtctgtgcatccaatattttgtgtttccataaatatttactctattgactcagcctttttccgtcattttaacatatatattgcgttgccacctaagcactatatattgcaatatatactatataacatatatatataatttatataatatataatataaatatatatttatataatttatttcactgctttcaaaaggtggtcaagatgcagttctcaggaaggatccggaagaagctgcgattggcgggtgaccagagaaatgctagttaccctcacagccttcagttttacctgcagccgcctactgaaaacatatcgttgacggagtttgaaaacttggcttttgacagagttaaatgtaagtggcatttaaagtccaatgtttgtgtccttgagaagtgcagttatcacacgatgaataaaggcagttcctctttgttcagcagcccattcaacatccgttggtgatttgctgttgaaggtttgtcattcacttcttcactgtagtatgcacattgagtactctgcttccaggtggcagggactttgtaatgagtaatgcaattaaggtctatgttgaaactgtatttgctatgtggagacagacgtgtagagttaaaatcatacatcagattactttctgctttgatagaagtaaatattaatgcccctggagtgtaaaagtgagaataactagcttagtctacttaaggaaggtttcctagagaagttggaatttggtctggtttctgaagaaatgagcagacagtagggatttcccagcagaagcagtgaagggcttttccaaactgtgataatggtctctacaaaggcttgcggctgtgaaagagagctatgcttccggtgtgagtagttgagggagagtggagacgtgtggacatttgaaggcatattataatgcgcaggaccgaggtgtgagaaggatgcagccactgaactggaggcctcttatcctttgtgtgtgagagaagaaatgaaggagctagctatgaactgagacaaatacaagccctcttagagtttatgttccagaatattcttgctggagtaatcaggagatgggaaaacactgttcatttttcttagagcagcaagataagagctgtcaacgcaggagaaagcacttattactgtccaatgtagtgaaggcaagagggggggaagggcacaggaggcttagcagtgtcacatgtttcctagtggttgaaacccttggcttcgtcgtgtcagatggaaccgcaaggacccctaaacagtggtggtgctagtgaagggcttgagagatgccaagtaggtgtcatgaagagtggttggaggtcaggactgagggagccggtacggcaagaaggcatgggaagtggagatgcatgtggaacatggtcgtgttcttaggtggcagtgcagaagattcatttctggtgttgaagcatcattccttgaagggatttctgtgaggaaggcttgcacctggcattaggaacctttgaatattcgtgacttctattcaggatggctccttctgatgacccggtgcctctcactgctgggtagtcatcaggaaaggaaggctctctctctctctctctctctctctctgcctcctcctcctcctcctcttcctcctcctttttatcttatgatgtactcagtcaaggtagctccagactgcaaaccttgtcttcacactgacaggcaggctttttcacttctcagcatttggtggcttggtacatcaggaaagatcatccaccatttgtcctttcccttcccttcccttcccttcccttccgttcccttcccttcccttcccttcccttgttgagcatctctgggattagaatatcatgcattttctgcacattggtgcagtttatcagtttccaagcacagttcacgtgatgtacctgcggaaacaaagttgttaatactgtcagatgttctaagaaaaaataattagagaattgctttctgtaggtttttatctttgatttatttatcttttgtcttggatttaaacttttcttccttttaatcttttccccctagtgcttaaagcaattgagaacctcggtgtgagctatgtgaaaggaaccgaacaataccagagtaaattggaggccgagattcgaaagctcaagttttcctacagagtaagtaacgggaagtcggcggcgggagagcgctcccttcagtctgtgtgcgtttatattgctgagttatggggagaggcttttataaagataaacattctgctgagctgattgacatgtagttagatgattgacatgtagttagatgattgacatgtagttagatgattgtagtacagcagtttcccaccctcaggcctgctctccgcctggcctgttaattcctcattgcaggactcctgtatattgtgcaggttcttggagagaccttgccttctgcgcatggactgactacagagatcccctatgtatttgtgtcacacagggtgaagcaaactgtttttttctgcgtacttcaggagtgtgtgcagtggctacctggcttgggtgggggtagtttagaagactgaccaggaggaggtcctgaatttctgcaactgctatttatttattgattgattgatcagttgattgattggttgttttagaggggtttgttctgcagtgcaagtgttcctagcacttgtgatatagcccaggctggccctgctctgttccttagtccctggagggctgaagtagctggtacatggtaccacctctggcttggaactacatcgtgacagataccatgacatttttattttgggaggataactgccagcaacaggttgattgggtcatggtggacaggagcgaacaggaacctggaatgatgcgagtctgaatttctgagtgacggggacggtcggggggggatattaatgatgtagactgaaaggattttattggcttatcccaaggcgaaaccagagagaatagtggcagtgtccctatctctgctgaggacagtgtatgagttcattaagtaccgacagaattggagggaggagaggttttacttgtggctttagcagtcaaggcctggcagactttgtaaaggtgggagcgtgcagttggggttcctcacctatggggcagacagcaggcaaaggacacagccacaaccagaagtaggtgtaacagaggtctgcccctgatgacctgctgtagacggtgaggtcccgtgtctccgtagtgatattttagggtgtggcacacaataagagaagctagtcctaggactaagaagctgagttttgttccagacgtggctgggacacatgtgtgacaggatcttgtggacgtctgtatgtgcaaatctgggcttggaaggcgtgtttactgggagaggagcttccaagcttagcatccacaaggcttaagtcctgggaaatactggagacgaaatgggggacggcaggggagactccagtgtctgaggtgggtggatgggaggtgtctggggaggagataagaaggagctctgtgaggataggaagatgatctgggacgccacagaagccaaagagcaagagtggccgtattaatactgacagcaaaacagcaccagatatttgtagtctgcttattctgtggtaaatctggctgtaagaacactacttacggactctaatggaatttgtcttatgagccaggtaccaataactgtcttattttatgaatgagggctctgtttgcttatacttcatgctcataatatggtaagtggtagagccaagattttagccggggcattttattttgtgatggtatttctaatcctaacagtttcagaaactcaaggtagatgacatagatgaattgtacagggtgtagtggatttagcatctggatgacctttgcagacagggcagaaaccagaatagtgggagtggttgggggagagagtggcgaggtagctatgaatactcttgtaagatgtctacacaacattgcaggggagaggcaggacagcatacatatagactcactgttatccgtgacacacatccttgttttttatttgtgtgagtgatggatgtacgtgtgcaggtgtgctcacccttgttggattgtccagtagccagagattgacactaggatgccttccacagtcattttccctccaaggccaccagaggcagcagccaatgagttggaggttttagttattggacagtgaaggagggatgctctgtccatggagatgggaggggaggcaacatgccgtgttgatgcaccgtctcaatgctgttggggaaggcactacaacagaggcctcagggcagctggtgaagactgaagctgctctctaaaaagtgaggagggagatgttcacctatcaatcccagctctgctgctgataggtttaatgctgttgtttgaatctggaatggctcccagtggcttgacagttaaaaagatggtccccagcttggtgtatttgaagggagatggaaatctctaagaggtcaggataaggcccagtgggaggattttggtcactggggcatcctttgaagggcacaggacaccctggtctccctacacccttggctacttcctgctgctcctatgcagtgagtggtcctgcctcagcatgtggcagaataagtgacagtactaaaatcctcaaataggagaggtaagttattggacctttatccttttaaataacttacctctcctattttgtaagagtaaccaaaagctgactgtaacaattatgtatatgtatgcaattatatatttacatgcttatgtatgtattcttgtatattatgtaagcatatatatataatatataatatatatatgtatacacacacacatacatactacattctaaagtcctatctctaagtgctgagaacaaagtcagtttttggttacttgtgtgaatgtgtgtgtgtgtgtatgtatttaaataaataaataaataaataaataaatatattatataaaattatatatacatacatacatatatgtgtatgtatgtatgtatatatgtgtatggttttttgtctatacttagaacagttgaaagaagctgagggttgatttgtagaactggttgagagggtgagcatcctgggtatagggaagttaagagcagtgactgatggaaggcagttgccgcccctgctcaggagctttcactgaggtagtatagttcttagtttcacctggttgagttgataacccagtaatgatcctggagagtgaattaagaaatgtgctgagtcagcgtctctttccgcctcttgtcattccaatatgtccgtttcttcacgcggccttaggagaacctggaggatgagtatgagccacggcgaagggaccacatctcccactttatcctacgcctcgcgtactgccagtcgtgagtatacacctgcgtcctgacgctctgctcggatcttgcgggtcataaacttgtgcttatgaagttggcctgtctctgaaacgttcagaaaaactcagagtaacatcagcggaaccagagtgccatgggctgaatatgattgtgcgttctttgaaataagtttttactggaaaatactgaaaataattggtgatacctaatgagagagagaggctctgcatttgggatttaagtatataagggatttcattaggaaggctacttttgatactctttcaagaaagagtggtaatattactaataagcattcattcaatcatgcacttgaatttggtaaaagttttctaattagagatataagagcttatcacattttagctattttcagtcagtagctggttaattgtgactcaatgctgccacccagaggtacaaggagttaattgcttttttacaatttaacttttttccccttactaaattttggtcagagatatggttgtttctttttattagtggcttatgagttgagtgtcttgagttgtctcctctcaagaacataaatgatagcatttttggtacaaagcttgagaccttgagacttagagttttggctttataagaaaaccatatgcagttcatataactgccacagtcactgaattattggtagtctgtaaaagtcatctcacagaaatgaaactatattttatattcagtagttatagtgtgaatgccactctaatgggttataatgttattttggctttaaaatattgaagtttgctataaagcttacagtgtgagttgacaaagtataaatgtgtttatctgttcagaggtaaaattacttttaagactttggtgtttttaacttgacgtggacaaagccacctcagaaggagtgcctcacttcccaatgtgagtgattctttgaacgtttacatgcaacgagctgttttatgtcatccaatgatttcgcagttttcctcaaaatgctctgccttttctccttttttataacactgttgggcctcccacccagtggcttacagtgctcacatcctgtatcagatgggccgggtgcacagtagtgactgtgcagagagcgtgcctgctcttcactgcccccttggcacctgacttgctttgagtgtcgtctcagaagatctcctgagtcttgtaagcaccccgttacgggctggagagttggctcagcagttaagagcactgactgcccttccagaggacctgagttcaaatcccagcaaccacatggcagctcagaaccatctgtaatgggatctgttgccctcttttggtctacttatatataataatacataaatctttaaaaaaaaaatcacctgattactcattatgttcctatttctgtttgcatttcagggaagatcttagacgatggtttattcaacaagaaatggatctgcttcggtttcgattcagtattttaccaaaggataaagtccagagtttcttgaaggatagtcatttgcattttgaggctgtaagtctctctctatgtgtgtgcgtgtgcgcgtgtgtgtatgtgtttcccactgtcccctccttttgtcttcatttttgtgagactgggtcttcctgtatatccccggctcagacttagggcagtctctgtggctctgtgtcctgagcactggtattacaggcgtgccactgtgcctggcttgtaaagtaccatgtccttttaagtgctgatattgttagtggagtgcaggctctatgtctttttattaggtacccagttcaacgactagctgatagcaagtgatactggaaagcacgtgaagtctggagaaggccgtatgtcactctgaaactcagctgttccttaaatctgcttggatagatttaagaagtagtttttacaggtgaatcagagcaaactacattttgcagtgaaacagaaatgcttgggaaatttagcttggagaattattgtagatagaagaagaaagctgctgtcagagagagattgtttctggcaggttccagcagtcaggtggaagtgggactgtttaggactttggtgtccatgtaaggcccatgttctgtctgcaggcacctccctggcaaggcttcgtccaagaggacagaggtacttgcgttgtctgaactcatttctcccgcttcctgttacacttttttttttttaaagatttatttatttattatatgtaagaacactgtagctgtcttcagacactccagaagagggagtcagatctcattacgggtggttgtgagccaccatgtggttgctgtgatttgaactcgggacctttggaagagcagtcggatgctcttacccactgagccatctctccagctcctacacttctgatcagcttcggttgtatgaggagagtcagctagcagtgtctcctaggggggtgcttttcttctcagcgtgtgcctacataatacccccatgtggggctgcctgggaagtctcgcacacaggatcactggacccaaacccagagcttgagtgtggtgccatgggggctagagcgctggattcctgcaactggagttgcaggcagttgggcgctgtctgacttgggtgctaggaatccaacccaggtcctgtggaagagcagtttgtgtccttaactgccgagtcatctctagctttaatttatcttcttctcagaaatagctttttaaaactaaactattattgaaattattgatgtctattagaaaattgaaaaaagttgttctgttgctttttttttttttttttcttttggtttttcgagacagggtttctctgtgtagccctggctgtcctggaactcactctgtagaccaggctggcctcgaactcagtaatctacctgcctctgcttcctaagtgctgcaattaaaggtgtgtgccatcacgcccagcatggaaattttatgactggttgtctggctatcttctgttctggcatcatatttatcgttgtttattttggaaattgtattaggtgtcttacacattttctccttcttttaaaaaatatttatttattcaatatatgtaagtacacagtagctgtcttcagacactccagaagagggagttacagatggttgtgagccatcatgtggttgctgggattttaactcaggaccttcagaagagcagtcggtgctcttaaccactgagccatctctccatcctgtcttacacattttcaacatactttagcagcatttagctcctttgcctcattcctttatcaaactcatttgaattaaatagtcctttatgatgagtgtttcccacaaatatctgatgatccttggtgtttaagtttgagataccaaaataaggattatggtgacgttattcaatccttaaaactgtttggttgttggatgacccttgccaaggttgccatcccagacaggaagcctccactctcctgcaggtctttgctttcatgtagacattcttttatcagagtcctgggtacattgttcagtttccatgtggtggctttatttaatgctttatgactttggacttcatatgtcacacctgccctgtctgtatttgatgctcctgtgacatttctggtgctctctaggttgagtagcttgtttggtagtacctcctccagggatgccacttcctcttggagtcttgtagtacactctcctctcagttcccaaagcagttggaccttcttctcagtgctgtgcttgcccctggtttatagtctttctatagcttattgctctttgcgtttggctttggagggagtggaactcaatatttatattcagcatggcatggctgccagaagcgtcatgggcttggtcactacaggttctcatgcaggggctgtggagaaacatctggcatgcttattcgagtggtaaacagctcaggctttggtgatgtgctgttgggaaatctctcttgtctttagtacctgtccggattgggaggctcctgtctgggacggtgctcctgccctctggctggggatggcaaagatgcatagctgctctctactccggtgcgtcttacaactgtgcttttaaaaactttccatatatggatgtttttattttattttgagattatagtacaattacattatcacccccttcccatcttgcccttcttgcactttttgttgacttaaaaaaacacttttgtgtgtgtttgtgtgtgtaaaaatgtgttaggtgtacatgccactgaacacgtgaggaggtcagaggacaactgtttcatgagacttggttcttttcttccaccctgtgggtctctgggatcaatctcaggttgtcaggcctggcgagcaaagcttagttccttatttatgactgaaaatgtaatttatctgagtttcttagaagcgtttggatgctttttttttttttaagatttatttatttactatatgtaattatactgtagttgtcttcagacacaccagaagagggcatcagatttcattatggatggttgtgagccaccatgtggttgctgggatttgaactcgggacctttggaagagcagtcagtgctcttaaccgctgagccatctcaccagccctggatgctttttttctacttaacattgtgacattgatttaatctttacatatgtggattttgtttttgttttgtttttgagacaggatttctctgtatagccttgactgtcctggaattcactgtgtagactaggctggcctcaaactcaaaaatctgattttatataatcgttgttttctaggtatttgcaggttggctctgagatcgttgtgtgtttctgagcacttctgattcatgttactacatgtgtttggattgctgactggtatattttacatggctgtatttcttttggcatgcacactaattgtggtcaacttcgtttcttttacttaaaatatggggtactatttgcccaatatatattacatatatttatatatattctccctatataaacctatattaataacctgccaaatgagctcagtttgatacctgctgactggagagctctgttcctttttttttttttttctttttttgaaagtcaagacaaagttttacttttaagtgattacaagcacacgaaatgacatgtgacaagttgagtcctagcatctagtggtttgggttacaagatactaacagcagccggaacaagcagatcgtattcattgtcctaaattagccagggcagagcactctgaggctggctgctgctttacaggtgttaccatgactactgactactcttccatagctgacgcccctgacctgtaagaaaggagaaggaacagtttactccctttctttcttcaaagaattttttctactagactaataaaagaaaagtcaacattgatacccattacttgcatgaagacccaggataacaggtgacatatactccttaaagacatacaagctaagatgaaacttcaggtacacaataagtctgtacaaaaagctagatttgatattctcaaaaagtgaagggtcctacaacagcatagggaaataatttaatgccctccagaacagaagtcgagctctgtggaggtttttggctctgtgggggcagatcccatgccaacccacagagcaggcccttctatccttttatgtggtagttttcatgaatttctggccagatgtcacacacaaaggccaagaggttatccaggactccatccctgttctgctcgaagtggttctggaggacgttcatcttctcctgggtctccttttccacctcactgctacagctgccatgggagcccagtgccgcagcttccttccttgaactccttctccttccatagtgggtactgttcagttccagcctgggcttcttttctttcactttcgggcctcggacaccttctcagccacccacttctcggcctgtagtggctgctggatactcggagactgactcaccagtgctgtgggctgagaggacggcctaagtcaacagtcagacatactcagaagacctcgggtcacctgacccacgcccagcgctctgttccttttatacctttgacacagtgtgcttctgtgagttacaaatctagtgataaaattgagtgaggcaggacgtgcagatgtaggagaagaacaggcaggagaatacatgtctttattttatgtgaatggttgtttgccatgtatgtctgtggactgcatgtattctctctctgcagagaccagagagggctactgatcctgggggacaggagtgacagccagttcttatcccatcctgtgagtgctggcaattgacctggggtcctctggaagagtagtcggtactcctaactgctaggtcatctcgatggccctttaaaatttttagaaattatgtaaattatttaaattttaaatatttgaaacgtgttcatacaatacattttggtcatattccttccccttattcctaccctcccaacttcatatatttctttctcttaaaaaaggaaaaaaaaagtccatacaaaagaaacacacacataaacccctcttttcagacaagacagcaaccaagatccccacaggcgtctgtctgtgttggccaactgctcctgagcacgtggcctaagctgggctgtggtccataactagtgtcactcctttgaagaaaaatgacttttcctctcccagcaggtaacagctagaaaagagcttcttgcttagaggcggagccttgggctcacttccctttacctctgttttggtgtgtacttatatgtacttgtgtgtgcgagagcccttggaggtcaaaggcgatggatacactggggttggagttgtgaatgattgtgagctgcggtgcggtgtgggtgctgggggccaaacctagatcctttctgcatcgatccaactctccgacccccggggctcccttcctaaaagtcagctcagttatactttctcacagtggtttgtaaccctgagcaactgtaaggccatccttatgtgtaccgactgggctggcacagtggcagtgacttgtatttacagaataggagctttcggctagctgtgacctatttatctatgtatgtaattctaaacagtcatggcgagtactcctttgtagtaatagtgcagatttatagaatttgggttttccatatagaattacagatttagattctgttcataaggtagctttaatctagacatttccaaaatatggaatttcaagctgaattaattacccttgaagactaccttgaaaattaacatattcaaacattttcaaatgaacttgtggcaatcacattttttaaagtttttatgtagtttcaaaatataaaatgttgtagccacattgtttgattcttatgcctacaactctgcccttggaaaataggagtttaaatgacccgaagtttcccatgtacaaagtctatcctacatgttataatacaatagataaatgtatgcatagtgttaaatatggattaaaaggtgtggaatactgtccatgctttcagaagctattctgaagtagacgctgaaatgaaatatgtatgttttcacatcgtaatctccgtaaactttccccttttctgcaaatctcctaaacactcaatcctcttgcagtcatgtgccctaggatagtttgaagtctgggtcatattgacttgtctacatcacttgggtaagagtgtgagtgtgagaagagtgcttctgggtgtggtgggacgtgcctagtcaggggcaggaagaggacagcaagtcacaagaccagcctgggtcacaatgcattccaggtctggcagggctgcacagcgagactctcactaatgtcacataaaaagtggaagaaaaaagaaaaagattgtgttttcagtgatctttaaggtagtcttggttacagagcatgaaaaaagtagacatggcagccattgtcatgtaggacctgctgctgcggatttgccattctgccttgcttaccatctgaaggtgtgataacagggcgtctgtgtctctgttttttttttttttctcaattttttattagatattttctttatatacatttcaaaagctatcccgaaagtcctttataccctccccaccctcctcccctacccacccccacttcttggccctggtgttcccctgtactgaggcatataaagtttgcaataccaaggggcctctcttcccagtgatggccgactaggccatcttctgctacatatgcagctagagacacagctctgggggtactggttagctcatatatatagttccacctatagggttgcagatcccttcagctccttgggtactttctcaagctcctccattgggggccctgtgttccatccaatagctgactgtgagcatccacttctgtgtttgctgggccccggcatagtttcacaagagacagctatatctgggtcctttcagcaaaatcttgttagtgtgtgcaatggtgtcagcgtttggaagctgattatgggatggacccccaggtggggcagtctctggatggtccatccctttatctcagctccaaactttgtctctgtaactccttccatgggtgttttgttcccaagtctaagaaggggcgaggtgtccacactttggtgtttgttcttcttgagtttcatgtgttttgcaaattgtatcttaggtattctaagattctgggctaatatccacttatcagtgagtgcatgtcatgtgacttcttttgtgattgggttaccacactcaggatgataccctccagatccatccatttgcctaggaatttcataaattcattgtttttaatagctgactagtactccattgtgtaaatgtaccacattttctgtatccattcttctgttgaggaacatctgggttctttccagcttctggctattataaataaggctgctatgaacatagtggaacatgtgttcttattgccagttggaacatattctggatatatgcccaggagaagtattgctggatcctcaggtagtattatgtccaattttctgaggaaccaccagactgatttccagagtggttgtacaagcttgcaatcccaccaacaatggaggagtgttcctctttctccacatcctcgccagcatctgctgtcacatgaatttttgatattagccattctgactgttgtgaggtggaatctcagggttgttttgattgcatttccctgatgattaaggatgttgaacattttttcaggtgcttctcagccattcgatattcctcagttgagaattctttgtttagctctgtgccccattttttaatgagcttatttggttttctggggtccatcttctttagttctttatatatattggatattagtcccctattttatttaaggttggtaaagatcctttcccaatctgttggtagcctttttgtcttattgacggtgtcttttaccttacagtagctttacaattttatgaggtcccatttgtcaattctcgatcttacagcacaagccattgctgttctgtttaggatttttttccctgtgtccatatcttcgaggctttttcccactttctcctctataagtttcagtggttttatgtatagtctcctctataagtttctctggttttatgtagagttccttgatccacttagacttgaccttattacaaggagataagaattgatattaagagatattaaggaaaagtaattgttgcttcctattatttttgttgttagagttgggattctcttcttgtggctgtcttcttttaggtttgttgaaggattactttcttgctttttctagggcgtagtttccgtctttgtattgtaacggggtgttttcccgttattatcctttgaagagctggattcgtgggaagatattgtgtaaatttggttttgtcatggaatactttgatttctccatctatggtaattgagagttttgctgggtatagtagtctgggctggcatttgtgttctcttagggtctgtatgacacctgcccaggatcttctggctttcatagtctctggtgagaagtctggtgtaattctcataggtctgcctttatatgttacttgactttttttcccttactgcttttaatattctatctttatttagtgcatttgttgttctgattattatgtgttgggaggaatttcttttctggtcctgtctatttggagttctgtaggcttcttgtatgttcatgggcatctctttctttaggtatgggaagttttcttctataactttgttgaagatatttgctggccctttaagttgaaaatcttcattcttatctactcctattttccgtaggtttggtcttctcattgtgtcctggattttctgaatgttttgagttaggatctttttgcattttgcattttctttgatttttgtgtccatgtcccctatggaatcttttgcacctgagattctcttttccatctgttgtattctgttgctgatgctcgcatctatggttcctgatttctttcctagggtttctatccccagagttgtctccctttgggttttctttattgtttctaattccatttttagatcctggatgtttttgttcaattccatcacctgtttggtagtgttttcctgcaactctctaagggatttttgtgtttcctctttaaaagcttctagctgtttacctgtgttttcctgtatttctttcttaaagtcctccatcatcatcatgagaagtgactttagatccatatcttgcttttctggtgtgatggtgtattcaggacttgctacggtgggagagtttggttctcatgatgccaagtaaccttggtttctgttgcttctgttcttatgcttgcctcatgtcatctgattatctcaagtgcttgctgccatcaatatatctaattggagcctgttcttcctataatcccagttgattcaggactcctcagagtccagctttctctgtgatcctttgattgtgggttccggtgaacctgagactctgggtgtgtcagagtttttggcagtcaagcttcctctgagaccctgaaatactggtgtgacccagctcctgttatcctgggatcctgttgtcctaagatcctgggagtgttacagtgcctggaattggtgtctcctttgcggaccatggagctgtctggtctgttcgaaatcaaggtaaaccagaactgatcaaaaggagcctgagcctctggtcaggaagggctccggtgtccttgttcctactctcacaggcctgtctcaattggattggaacagatgttgtgttccactcaccagtcatcctaagatcatgtggagagtcctctggggactgtgggggtgtccgcctactctgcgccctaggtgacccggtgctggtcctcctggaagggacttgttggttctccgtttatctgggtggtaacatggctctcgagactctgtgcccttctcttgttggtcctctgtggcttggctctcttgctgatctctgttaagtctgctgtccggccggggtccctggtttgaggaagagaatcctgtacgctactggaacataacctttcacatacttcaacttctttgggtgattcaaggttaagatcacttcataataataggcaacagaactgcatccaaactttcatggggtcctcatttcctagaaggatgcagatgactgaatagggtctgcatcacctagagatgtatgagaggaagctagttaccaacagctgacatttgctgtgtccaccgagtaccaagaacttagctaagtgttttctgtggcttatgtaatgtcatcctcccaacagttccacaaggactctgaagatcagagcagttaagagcttccccagctttgtatgtggatcagaactcatctttatgtttgtgtgggacacttcctcctcagccccctttacctatttaagaacgtttttggatgtgttagttcaagatcaatggtttactcatgtaatattcaaagatcactgcaaactgagcactaaactttgtgttccagttgggaataattaagtttaatttatcaggcacagaacagttaaggacttgaatagatattcctcttagctgataagaaagagagatattatcaagggaggtttactggttattacacactggggtttttagaaaggcttgttggctagtccgggggttctgagccacagtttccccagtagatcatccagacgtctttgtggtagttttggtgtgtgtgactggcagatacgtcatcatttaggagacaggaagctggagcgcctgtagtgcactaggtaggtctgtgtaacagaactttcccaggtcttccttgatgttttatgtttgtgtgccaacttctcaaccatgccttttccagttactgaattgagcagcaaacattgctttataagtcagcatgaggtgcttagctctgtgttttgctttgggattgtagctagctttgtgatgtatttcaagtgttaatgcatttaaagaagcgcagctttgattctgacagacctgaggcccaccctggccttgcaggtctccagtgactctcagtcgcgctgtctaactgaataggactgaaggagccagcattccggatgtgttgttttatgccctaagttctagagggaggctcttctatctcttgtgaaacacaatcttaagtttaactcccagggtcacattcttatgagcatgggacacattagaccaagaggcaggagcggcacggcaggaggatgcttttgtgctctcctcgataggcagacgaagcgcatttgctgtgctgaatgcctcgcggctcagagttcctgtgctgtaggagagccagcttcctggagagaaagtatcaagccggctgtgtgttctcaggtcctttgaaggacagtccttctcttcccttggagacctcttctcacttcacgtaacgaagatgcctttctcctgggcttatgccgcccatagagaggcttctagtctcctggccacttctttatggtttttttatttttttatttttgagttatagggtccctagttatattccctgtgatggtttgtatattcttggaccagggaatggcaccatttggaggtgtggccttgttggaataggtgtgacctggttggagtaggtgtgtcactgtgggtgtgggcttaagactctcaccccagttgcctggaagtcagtcttccactagcagcctttgggtgaagctgtagaactctcagctctgcctgcaccatgcctgcctggaggctgccatgctcccaccttgatgataatggactgaacctctgaacctgtaagccagccccaattaaatgttgtgttttataagacttgccttggtcatggtgtctgttcacagcagtaaaaccctaactaagacattccctatgtagccaggaatcatgttcagcttctgcttctcccaagtgctgggattataggcatatacccgcatgttcagttttacacagtgctggagatttgcccctgagctttatgaatgctggggcaaacacttgagcaaccgaactgtctccccagattgtaaatattcttaaaattgcctatttatggttctgacataaacgaggcagtcttgaagaatagtaatcataaaaagaatttcagatgcttttggccagtgaaatgggtcagtggatcgaggcacttgccgaagtctgatgctctgagcttggtatctgggacttatatgctggaaggagagagctgcagatagtcttctcatctccctgtgtgcaccatggtgtgtcccaccctgcaacagataaccacatcaatgtcagttatgtcttaggaagctgttttttctttttatcttcatttcagttgttgatgatgatgatggtggtggtggtggtggtggtggtggtggtggtggtggtggtgacgacattgatagtgagccctggaaggtctccaattataaaccattgaggacattgtgtttggagtagagctccacagacctgcgctgtctgcaggcaggtctgaagatgaacccgaggcaggtctacagatcctcagggttctctctgcttctgagtgcccgctggcctctgaggctggctcctttccctccatttctcatcaacagggctggctttcccgtagtgtcgtgtgcacagttccatagcttacttcagagtctttacctctctggtaaatactggagatctagatgtcacatactttatataatgttgtttagatgctacactctttttcagttacaggaaatactttatatgtcccagtgttaatcttggttctggcaaaagtcttatgacaagggaacctgtcatgagcttggggagagagaagggcaggagggcattattgaaggtttctggggaggagtgtgacacagatctctgatgcagacggccacagctgcctaggttgagacttgagggtgcaaagtgtcagagcacccatgagtcatttccaagggcgttagcagtgtctgtgtttgttgagtgaagaacagagggcttgaagctgttagtcttgtggaagcagcctgaagattggatggctgttagatatgaagtgaggcctgtgccagatctcggtacagaggtaagggtagtatgatgttggcgatagtgggtgtcttcattagggtttccattgctgcaaagagacactgtgaccatggaaactcttaagaaccgcatttaactggggctggcttacaagttcaggggtttagtccataatcgtcatggtggggaggaccgtggcagcgtgcaggcagaagtggtgttggaggaactgtgactgcttcctcttgatcagaacgcaggcaggaggaggctttgattccacacttggcagagctcgagcctaggaaacctcaacaaggccacacctcccaatggtgccactccttggggccaagcattcaaacacatgagggtatgggggccaaacctactgaaaccaccgcagtggggaatatgagaagggagtatagtttggaatagtgtatttgcttgtggaatgtttccagtggagatgggtggaggcagttcagaatgttaggctgagatttggaggttaaaggtgtaatggtggagccaaagtaccacacacagctgctctgagactgtgtgtgcaaaggaaggctgctgggagagagaggggggggagggggagggggagggagggagagagggagcgagcgagtgctgggaaaattaattcacgatcacgactaagttactttaatgcctcgtttttcttttactgtgatactgaatgagagcacacgggacatacttatttatcaagcacttggattattctatggaaacggaactgattctaagacttctgactctggatattgtattaaatgtctaaagtgccaggtgtggcggtctagcatttaattgtagcacttggtgggcannnnnnnnnnnnnnnnnnnnctttatttcaaacttctaaccttcagggataggaaagaataaatgtctactgtttcaagccaccctgtttggatagtttgtaaccagccttaggaaactagtttgtgtagagagatcacttcatgctaaagggggaggggagggagagaggggagcgagcgagtgctgggaaaattaattcacgatcacgactaagttactttaatgcctcgtttttcttttactgtgatactgaatgagagcacacgggacatacttatttatcaagcacttggattattctatggaaacggaactgattctaagacttctgactctggatattgtattaaatgtctaaagtgccaggtgtggcggtctagcatttaattgtagcacttggtgggcagatccgggtagatctgagctcaaggccagcctggtctatgtagtgagttttaggccatctggggatacatacagatcctctgtctcaaacataacaaagcaaagatacagctagacaaggggccttattgtagtgatacttttattcattcagttagacttttaagtttctgattattggataattctaatcttaacactaatttgtttgataaatatgtgttttagttttgggcattttttaacatgtctttcattttaaatattctacttagaatatagaagaatgggtttcataacactgctttcttacatgcttgttgctgtaccttagtcatatttaacctccctcagagccctccctccccagcctcccctccttccttctgactaaacctcattaccctcccttagagttctcctttccatctatgtgtgtgtgtgtgtgtgtgtgtgtgtgtgtgtgtgtgtttgagtgtgcgtgtatgttaatgtagttaattctaaatctaggatgctatcttcgggaaagcatgcagtagtttctcttcttccggctgcctgcctctgggttttcaagcctgctgcagactttgactcagaggttctaacttcattgttctctctgtttcttacaaatcccctcaacttttgggactcagaggaaagttcttggttgaaatgaaatgttcttatttggtgaggcagagaggggtgaatgagaggtaatgatgctaaaattgaagatattctgacagtttttttttccctaagaagatgggcttccaggaacccatttgctttggcatgcatttctttcttggttggcaggactatcgtgctctagaagtgtcatttgggggagccagagtaccacagttaccagtggcccattcagtataggagagaatagtgaaaggaagcccatgctgtgcagggtgtgtgtgtgtgtgtgtgtgtgtgtgtgtgtctgtctgtgtgtgctctttctataggaaatggttagaaggttattaagtagtaaatgcattatacgaaacactcagtaaatgtgtaacttgacttaacgtttcacacttgcatcttggttgttctgttgacatcttaagcgcttagagacttcagtgttttcagatgagtagagtagatgtcctatcacaccggagccgtcgtcgctccaagtccaatggattccatgtctcattgaggcttggcttaattactaaaaatctcaggagtccttagaggaagttcctcagagctattgtcaagacctgggtttaggaagtagagcattcctgtttagctcccttgccctggctttccattagttgctgggtattatttaaaataggttaccttttttttcctcctcgtttcctctcgtctcgtctcttttcttttttagtatgtccttgaaaggattacacttcttttatttttgccacttcttttgtagcacacgcatgtgtatgcacacaggggtctccattcttttttaaattttaaaaaaaatttaaaatttctatttattttctttctttctttccttccttccttccttcctttttttgttttgtttgtttgttttttgagacagggtttttctgtgtagttctggctgtcctggaattcactctgtagaccaggctggccttgaactcagaaatccacctgcctctgcctcccaagtgctgggattaaagacgtgcgccaccactgcttggcttcgcttctttctttcgttcgttcgttctttctttctttctttctttctttctttctttctttctttctttctttctttctttctctctgtgtgagtacactgtagctgacttcagacacaccagaagagggcttcagatcctgttacagatggttgtgagccaccatgtggttattgggaattgaactcaggacttctggaggagcagccagtgctctaactcctgagccatctctctagcccagggggtctccattcttgcccagggggtggtattttatagcatgttaacagcatgatttattttagtttctcacaggctgttgtctgtcattcaaaaattggtttttgaatttccttgttcccgtctttggacagatgctggattctaggctagaagttctccgttgaaggcatgaccctgtctttactggaaatgtagcttaatgtgggttagaaatgaagtggacttctccactgccctaaactcttactcttttcacccgcttctgtttatccactcagtgctacttactctgcccattaagaagggatttctggccaggctgtgagaagaagtacatatttcttaaaaaatgagtctgtgaggaacaagctgttcctgtgagagagctgccattcagctgggtgtgtatggaagcttggctcctgtttgtcttcttccctgtgcagtggggatagacaaatagcttagtacagggactgcctcctgtgagccatgatcctgccttggctgtgtgggcagagctcctccttatctctccctctgccttttctccctcccccctgccctttctcttttcctccccccttcccttcctccttccctcccccctgccttttttgtttttctccaagaatgctaattgcttttattttggctgtagttgactctggagagttgatttaagagaaaaaaaaaaaaaaaccttaatcttttttttttttctttagagttttctattaatttgtccagatggacaggactagggtaaattttgtaaaatgctagcttttaagaggtggagattaaatttaaattatgtttctttgtttttactgtatatgctataaaattagataattaatacagcctaaagaagataattaatcaaaatttagaggacttttaactgatgaattctgattcaccttttaaaactaagaagcgtttgcctaaattatgtaaaatgctaagtaaagggcttaatttgttaatcatctcagttttgattagaggcagatgctgattatctaagtggacttttcagagatgactttcatcatttaaaagcaacttgtctaattaagacactaactcaagtattagcacatagcagtagttactgtgtactagttatgagggtagggcctggcagggtgagtcacaagtactctgcaccaaaggtttggagggtaaaatgccatgaaaatttcactggcctcaggccaggcatggagatgcttgcctaggtacctggagcccagggttctgtctcaagcacctcagcaactggttgttgttgctcctgcctctgtaatccaataaggacagaaaggagatgggagggtcagaagttcaaggccagtctgtgctacataatccatttgaggccaggtgggatacatataagaccatgtcgaaactggagcagaaggaagtgtcaagaaaaaaagacttcaactcaactctcctcccctcccctccgctcccctctttcattacattttctgatctttgttagttctgtgggactctgattttgttttttctggttttccttctgttataaggcagagcagcacacggaagcagaggtaatcttatgggtgtatgttgaaagtgtgcacagcaagggggagtgcagcacacgtgtgttccaggccgtcttcactggtagccagatcttccttttacacagctaaggggcggcaggaactgagttcatgaatgagacacagaatgcataacgaatacatgatgttaacttgtcaggtcaaaggcatacagtttgcaaagcatttagtgtctgatacacaggaagcacacagtaagctattatccattaactattgtttttactgtgtggctttcacataagatttgtgaaagattgtgcatgtgtaagtgtaaaatgtgtgtgcctgtgtgtccgtgtgcatgtgtgtgcacatatgtgtgcatagaacattgtatggaattcagtgcgagcttatcactcgtgctatatctccatgacaaggtataagaacttcaggggtgttgctaatagaatttgaaatccttcaggcttacagtgagagagtgtaggttttatttcagctcttgcttctttgcatgttctgtgaggggggttaaggatacgtatagactctagagaatgccgactaatacaaaacccaacccgctttcttatgtctacggaagcagagcaagtggcccttctgtactggcaggcgctgcggcagatcttgtggcagtttgtttaagggcaggagagtcatggtgaatgtagatgcttacaggccatttgagtctcctgctcagctttctggattccttgagctgtatcttttgggttttagtgatctttgtggaggtgcaaaacaaaacaaacggcatgtagcattaattctgttttagtcctattcctttgggagactgaggcaggagctgcaagttcagggttagcctgcactatgtagggaggtcagtggtagcctggactacataataggaccctgtctcaaaaaacaaaaaaagtttttttcttcaaggtgctattatttctacaaagtacaaatagtaattcctacttttcatttgtaaatcaaaactagcatttatagcctgggaagagtaacttaagggagcaagtgactgatagtattagaaggagcccagtgccagtgtaacagtgtggtcatggacctggagggctgtagtttagtactgctctttgattctgtggatttgggacatggcatgactccacgttaggtcagtaggacaggacttagagggggaaggcatcgtctcgaggtgtcagtaaaataatgttgataggttataggaatgttagctgatctgggagagcacaatagtatcgtgcagctgtacactgcagactcaaggctgatgtttcctgatgtgaggagcaggagggcagaggactgatgtggacagggcagtttctcctgccaccttctgcaattagagggcttgggacagaagctgtattgtttctgagtggctttgtatttaaatctgtcctacaaatgtcagtaaagcactcgagtgttgagtgactgtcgctggggatgtagctgtagctcaggacagggtgtagccaaggggaggagggtgctggtggactgcgaagtgtaagtgtgtgtgagtgaggcaggtaaggttaagaaggccaagttctggctggagagatggcttggatccgaattctgtctccagttcccatgttgggaggcttgctagctcacaactgcctgtatataattctcgttctgggtgagtctggggtacacctctgacctctgggggtttccacacacaggaacagacatgcatacatagttaagaagaatagaagaaattaaaagaagaatgttaatttcatggtaggtctccattgtgaacacccttagaggttttaaatggacaggagctgttaggttgggctagttggctgttcggcagccatcagacccttcccttctggcgggctgctttgagagttgttggcaattatcctggctggtttgaacaaacacagtggctctgaggggcttccttctcactgcaaggacactgcagccacggccagtgcagagtcctcatctgaagccttgctgcagccatgaccacttcagatacttgcaccagctttgagagaccccactctgtgcaagacaggctcagtgaggtccaggctctctcagaaaggaaaggaagcaccgtcagtgactcagcacaatcctgtgatggatggcgctggaagtgtttgcctgtgtcgctgtggacatgggcccgggcttgccatgtccctttcctgccacacgtgctcctcttctgactatataagtaagctattttatattagatatgagtcctgcagtgtgagtctaggagatggtgtgtgttacagaaaatccatactaacatgcatatatagaatgggagactggaaatactatttttaggaaacaggataaagtaatttggtgctagcacgtcagatctggtctgtgagttatgaaagaagaaaaggtgtttctgtgtgctgggttaatctggagtttagcatggctctggcagaaaggaggcaggattctgatggactgcgtgccatccatcaccttcaaatgttggataattgggtgaggcgttagagtgttgaattcggtcagcagacagacagacaccattgtcgggacagtagaactggtttctaatgttctcagtgccggaatacacatgccgacgtctcttagagcaaatactctcttccctttgcccaggttcaaggcaactcgagtgttctgtccatttaagcttgaagacagtggaaatgtacatttcataattcctcacttactgaaatgagctgacggatttgatttattgtagttgggaagagtaaacgatggcagactggtttatttttcctgatcttattttctggagctctttatttcattttctattttctgaaatcagtgtggctgcagcagtgatctccattgacagcacttcccacctctctctcccttgatacttggagtgacagtctttactctccgactgctggtggcttcgggtgacttcagatatcatggttttcattaatcagagtgtggctgtctcttgtccaagaaacttgaagatgaccaagctgctcagtagtgtaaagatacagaatcaagtaaagttgaacagctgtctactgggctgtgttgtaaaaatggggaaagaaattactttctcttgtttttttgggaaaacatttgccagttggagcctcaaagaagattgagtttggaaggtttttaattgtgcaccaaaaggttattgcagaagataacataagggagcgccataaagaagaaaattagaaactcagtaacagaaaactgtgtagagacacaggcatcctgccaggcggctgagagctcagaataaatagcttggaattaaagacacagttacagatttcaaagacttgattcacttagtttactagtgaatcagtgggaatcaacttcccacagaatcaacttgtaaagcatgctatccttcattcaagttttgtcttaaaatagtcactgattattaagttgaatgatgtaagatcagagggtttgttaatagttcatattaaactattaaaataaaaataggataaaatgaattataatatgcagtttaggctctcaactcctgattattgtagttaaataagtattttccaaacaggataaagtatgggtgtgggtgcaggcaggggatcgacaaagaatgtgaatgggttcctgagaggtggtccagtggttaagggcacttgttgctctttcacaagacccagacttgattccccgcaccccaacatggcacgtacaaccatctgtaattacagttccaggagatcaggtgccctcttgtggcctatacataaagcaggtgaaacactcatacacatcaagtaatataacagataaactcttatcctttgatctactcatgtgttgaagagcccgggtggctatgtaaacaactcattagtacgcaaaagctcgtgctttcccatcgtggaaaagtaacagggaaatgcaagtgcttgtcgttccacagatgtccagtccaggcattcttaagctttgtagtgtgaaggatagctttaggctttagtactgtgccttgtttggtttagtatggggagcggggtggatgaaatggcctttttcagaaaccatggaaacagagggtactatattggaggaggtcctgtgcagagagtgctgtatggacatactgctgtcttcgtcctccacgtctgctctcaggaagtgggctgtctttttttattgaatgtctgtgggtattttccctgcatgtctgtcagtgccacctgagtgcctggtgcctgtgggagccacaaaaggacttgtggagctggagtcacagagagttgtaagcctccatgggggcgctgggaatcagacctgggtcttgtggaagaacagccagctcttaagtgtggagccatctccctagccccactctgttaaagctccttgtaggacttgtttgcttcaaacaccctcgggtttaggagaattctctcttagatgattctgcttcggttttactaggcttctttagtgatgtagctggtgtcttgtggagagcttggctaggtgtctgtcggccatcattgggttagacccccggtctttccggtctttcgcttgcctggggtgccaatgtgttaccgatcttcttagtttcttacctcgttctccggcttttattttcttctttgttctcgctagcagcggttctctgaattgcagatggtttcttatgagctgtcatcttttattttgacacttccctagtctgttttgtttatcctgctttcaatgagattttaattttgattgttgcgatccatagaagttttgttttgtatttgggaggcgggtgggtggtgtggttgggaattagacctaagatctcgatcgcggtacatactgggtataccctctaccactgagcaatatgtgaaccgcctctagggtttacttttaaatttatttttatttattatccaaaatgtttattggggttatttcttacacacccaagtcagctgcctccaagtgctcttgctggctaagttttgtcaacttgacatgaatctaataagacgacccttatttgcgagaaggcatccattaggttggcaagggtgtgagagcttaagggtgggagagcctgtgtcattgtggatgtgccaccctgggcaaatgatcctggcctgtatagaaagcaggctgtgcagccatgataagcaaggcagtaagcctcgtcctctgggctccctgcctccacttctgcctctttgtgcccgagcttcttccttggcttcctttgatagtggattatgagctgtagaccgaataaaccctttgctccccaacttgcttttgcagaatgttttatagagcaacagtcggcaaactcgacaaactcgtgggcgcaagagcttgctcccagtctcctctgtcacagggacccagcccactgtttactccctgctccccaacacatggggtccagcctctatcaggagccattactgggcagagaaagaacgctgttaagatttgaaacaagttaaagcgaataccttcttgaaatggtattataaggttaatggaagttatattgctttaattatctcacagcccacgtgtccattaggagaacttgtgaaggaatacttccatttaaatgtgctcctatttatttttacattgacccagtcatggcttcagaatatttaacttatatcatgggtatctttcctaattgctcatcttttgtctgcatttctatcaattcagctttatttttttatgagtcgctgtgctctcggtcacctctgatttactttccagtcaggacagctgaatagtttatatctctgagttttcacttctttttgcatgaattaatgtttttttcccccaccctgaattaatggttttatgttttgatgaattgtatgctgttcataatctcccactgatgatttttggtcttttggtatttcattacctagcatccctctcttctctcttgttctatatttttctgaatttcttagattcaattctgtcgtctgaagtagtttatgtgttttagtcaggaaacattttgtcatgtattgtaataaaaactaagaatatagcaaatagaatacacttaggttcatgttttagtcaaaattcacgagtgtgagtttctatactgtagtataaagatattgcaatactctgtgctgaggcatatggctaaatagaggcatagactaagcgaatactgcctgaggatctgtggggaagtttgctgagatactatgtcagacgtatacaactcttccggtagaaacacactgtgtggaacggggtttcagaaatagtctatgtaaagtcacagaggggagagcggtgctgtgccggaggaagttccgggaagctgattaacagagggtgcaataaagaaaagtcaaaccagggaggattccaaggcagcttgtgccaccgtggggcgcgtggggagggtccgctgtaagagcagaaagcgggttgggaagatgtccgttagcgtggccgtgggaggcttacctgtgctggcgaagtggagtgcgcatgtgtcaggatgtcttcctagtcatcatgtgacatcagtcattctgagcagtggcggggaggtgtatggcacggtgttgacaaggtttggatttgcatggagcctgcccaggggaggggaggcagaaggcttgctgccttcaaggccttagatgttgtggagccgtgatccaaagaggatcctgacttggtagaggggctatgtaggttagtgtgtgctcgggcagtgtctttgagcgatgaagaagaggagcatttagaaaagagggctggctgtgtgatcggggctggtcggtggaggacagatggaaatcggtgttccggagtgaggtcagtgagagagtgaggtggacaggtgaaagcagagcgggttaaatgggaataactataggagcagggggagagcggagaggcactgaggcaagggtaatatagtagaagattcaatgggaactttactgtataaccccagtctccatacttagcttcctggctggcatagaacggcttaaatattgtattctagtccattttcttataggattaaatccttttatactcaactcccccttttcttttgtaatatacttttaattttcattttaggaatgagtaaattttattttatatatttttttaaattttctatttatttatttgtttgtttgttttttgagacagggtttctctgtatagccctggctgtcctggaactcactttgtagaccaggctggcctcgaactcagaaatccacctgcctctgcctcctgagtgctgggattaaaggcgtgagccaccacgcccggaatgagtgaattttaaatgattaaattttttttacagctttaaaaaattttatttatttatttatttatttatttatttagagtgtgtgtgtgtgtgtgtgtgtgtgtgtgtatgtatgctctaactggtgtaaacgtcagaggacaactttcagggtcacttgtctctttttaccatgtgggtcctagggattgaactctggtcaccaggcttggtggcagatgcctttacctgctgagtcatcttgctggcccttgagtcagctaaggtttctgcatcctgctatctagaagagtctagatagcccctttgttgcacactgccttgttattcatgtattatccttcatgtatttctgtatccatggcatatttgtaggccgaagagcgattcagacatgatttggagagaggtggagacagttacaaatacattagctgcttagaggcggcttctaaatttgatgccccacatgggcttgctaggctccgaggccctcaggatgggttgggtaaagcatacccttctctaggcagtgtgttgctgcctgggtcctttgcacggtggcggtctgtgattccccgcagagctgttgtgatttaagtgatttaaatataggtggtgccttagtgtgttctgctcagtgtgtctgtgtactgcatgcgtgcagtagtctgcagaggacggagggcagagtcccctggagctagaggtgagctgctgtgggagttctgggaactcagtatgggtcctgtaagatcagcaagtgctcataacccctgggccctctccattgtgactgtttaaagtctttacctggatggtttctgaactgaagtggaataggttcctggggagaagtcacctcatgccgcgtgtgctcccctattccgttcccacccagcctacgtggctttctcattgccttgggaccctgtccccgctgctcaggaatctatatacttctctcccgttctctacagagctggagggaagcccccagcctagcagagcttttgttcctcctgtgagtgctggcggccatcccttttcctctcacagatgactactgctttcagagttccgtgctagtggagtccactctcctttgcctttgctaatgttaaagtacaatcagtttaggaagccttcctttgcttctgtgtttctgtgagcgctgagcctcagtcccgggaactgctggaggaatgctgcggggcgggcggagaggaacgtgtccctcacagatctagtcaggctgggagggctgacttgtgtctggttctgctcttactttggcatgcttaggaaacttaagatttctagtataagttaatccttgctatgtagcgctggctgccctgagatttctatgtagcccaggggttcttgaattcatggacttcttcctcagctctggggccatcattgcctcactgttattattgttacataactattattacattatatgtaattgttacctaataatatcattgcataactattacacataataattatgatatataataatagcataatagtcattattttttaaagaagtttgtttttgtatagaagaggaaatttgtgctttaataaaaaattaatatttttaattgtaaattttggaacagtccatattctgctaagaaggaaaacagagtaataatgtaacagtaacaatgtaacagtaacaatgtaattgatctttacattgaccagcttggctgtattgcagatccatcagcatacttactacaaatgttaaattatcacccaccttctaattttaatgttttaaataattataaatgacaacctgtgagggatgcgctacaacatcctacaaactagagttagcacaagaacttagtgataattatttcctttcttactttatgattttgtgtgtttgtgattttctaattaaaatatcccaaatatatgactgtcttttgtacatttaaatgaaaacataattcaactgaaaatagaagtgcttaatatttactttagcttgatgagtactggtaatagttgctatattgaagctgcaaaaacaaaacaaagcaactcataacaataaaaaaacaaaatctacccccccccaaccctcaaaatagcaaaacaaaaccaaaaacttgagaaccaaaaacataagcttaaaataatacccattttgtttatctccgtttggaagtttaggttgcttggggttatttatttatttatttattattcactttacatcctgttctctgcctccatctgcttcttatgatccttttattccccttgtaagtgagattcaagcttctttgcttgtgccttccttcttgtttaacttctttgagtgtgtagcatgggtgtgtagcatgggtatcctgtattttatgactgatacgcacttattggtgagtatataccatgcatgcccttttgggtctgggttacctcactcaggataatattctcaagttccatccatttgcctgcaaagttcatgatgtcttggtttttaatagccgaatagcattccattgtgtagacataccatattttctttatccattcttcagttgagggacatctaggttgtttctagtttggctcttacacatatagctgctatgaacatagttgagcaagtgtctttgtgagatggtggagcatctattgggtagtggtgtagctgggccttgaggtagaactagtcctagttctctgagagtcatcccacaggggctcaggccttgtgtgctccgttctcacattgcaccacactgcctctgttctttctgcttcaggcatcccagctgatgtctctgtaggagatgcttttgccttggggtttgtgacagtgacttatcattcaagtgtctgcttggcattgctccagagcaacttcagttgctcacctgaaaggcctctttctcaggaatggaaggcccggtcctcaggaccctaagagcccggttctctctcagtacccaaagttttcagaccttgtcattttgtttccatcttggactgttactgggtggcgtcttagttgtacttctcacaagcaggttttgttgtttcccactgggtctatctcttgtggggtgacttagtgttagggacagagtagatcttctgttttaaaaggaatgggtgacttctgaaaaaagaaaatgccagatgagatgatattttcaggaattcataagttgctttttaggtaagaggactcctgggatatgatttttagactagtgatgtgtagaacaaaaaatcgcttttggagaaatgctgaagaaaattcacatcaggtttaaagggctgtgtagtacccgggatggtaaagtgctccactgtgctccagatcctcatcgctgtatccacagataaatgtaggtctcaccccgtatccgagaagcttccttttgcagcaggagattgttacagaagccacactagtcaaatggagagaacaactcactgtgaggtgctcagctccaaatgacactgtacaataccgttggctggcctgcttctaccccgactctccagaccttgcaccctgggctggcctggaaggaacgaagcttagccaagccagtgggttgcacaggaactcagtcagagtgagtgcaggagaaacagccttctttggagacttcagcgaaacagctctctttcattggggctaacaagggctgtataaatctgtaagaaagattaaataacttcctttttcttgggagtatagcttttagagaaaggaagtcgtattacattctttaatcacttaaagttcttgagttcatttttaattgcatctgggttttgtttctaaggcacccgtctgtttggacaagtaaagtctcttgtaatcaaagccttgattcttgaggcctcagaacagtgatgtgcacttcccttgattctcttaagtgattacaacctgatgctttgctcacatactaacattcgaaattaggaaatagaagctactgtactacagtgggagaactcttagtggctgatgtgtttagaagtactgatgtgttaagacaagagccttcatgtgtgtgtgtgtgtgtgtgtgtgtgtgtgtgtgtgtgtatgtttagtgatactaacaccagtttctttgctactgtaacaagacactgtaaaaagcaggttgatgctcttgcctgtaactttagtttggcaaattattttggtgtaaaacagtacatctaagcaattgctactattaatggtagggaacgtcaacatgcatgttaaaatttcaataaatctgagaaattcggatttaaattggctattcactcttggtcaaggcctgtagtaccaagtatgagttccctcctatgtagtaggccttaaatccaggcagaaagcctgtggtgacctctttaacaattatgccacagttgcaccatggatgtatttttcttagtctgatctttactgtagctcctgggatttgcagtgaatggatggaactggaacaaattatacagagtgagataacccagatacacagagacacgtcttttagatttgtaggtttaactttgggtatttgtagaaaccaggcaagaggaaaggagccattgcagaggggcagaggagagaaaactccaggaaatttgttataggacacaggatgtgaataggagtggacacgatagggaggggaagggagagtgcaagacagacggtggccatgagtggagagaactaacaagaaggactgtttctaacagctgagtaagattctgttaacatttcatatttccatcatccatgtggttgatgggcatccacagtttctgtctctgttacgagcagagcaggaatgggcgtgtgtctctggtaggatatggagtccctcaggcatatgatctgggagtgtcatagctggatcacattacagttccatttctacctttctgagccacctctgttagtttgtaatcctgccagcagtgagtaaggttcccacatccaagtcactgccactgtctgttataactccagcactgagtgagaccggcctgggtcacccagcaggccccactagcaaacaaaccaaatcagtttcaagaccggtggccgctagcaccttcctgtttgaggtgtgagccactgtctgtgctttcagaggacagtggtgaggatttcatatgattgatgtccatcatttctgtaccttatgtttttaggtattttgcctgcatgtgtgtctgtgcaccatgtgtatatagtgcccgtggaggccggactaggatgtcagatcttctggaactggagatatggaaaattgtcagcccccatatgggtgttaggaaatgaacccaggtcccttggaggagccaccagtgtgcttaactgctaaaccatctctccagccccatcttcttttttgtataggagtttagaatgtttatccattcagggctgccagtcttctcctgaggacataatcactgcaagataataaaatgttagttgttccttgaaaaagtaatgttaagtttcaagtattgtatgcgactgaaaacctgagaaataagctaagcgtccttgactttagtagagactttagtaaattagcataactctttatttggctagtgctcacatttagtctttagagacttgattttttttttttttttaaagttaggatctctctgtgtagctcaggttggccttgaactcatatgaagcttctcagcctccgaaattctgagtaataggccttactgtacctggctttccctgaggtgataggtctcactgtgcctggctttactctgaggtgataggcctcactgtgcctggctttccctgaggtgataggcttcactgtgcctggctttaccctgaggtgataggcctcactgtgcctggctttccctgaggtgataggcctcactgtgcctggctctaccctgagatgataggcctcactgtgcctggctctaccctgaggtgataggcctcactgtgcctggctttccctgaggtgataggcctcactgtgcctggctctaccctgagatgataggcctcactgtgcctggctctaccctgaggtgataggcctcactgtgcctggctctaccctgaggtgataggcctcactgtgcctggctctaccctgaggtgataggcctcactgtgcctggctctaccctgaggtgataggcctcactgtgcctggctctaccctgaggtgataggcctcactgtgcctggctttaccctgaggtgataggcctcactgtgcctggctttccctctgttgcacttcccttgtcctttacttttattttcaagactgtttcatgtagcccaagctgatcttaaattcattctattgacaatagtgaccttaaacttctgatcctcctgcctccacctcccgtgtgctggcatataagtatgcctccatgccccatgtagtgctaggaactgaatgctgtcacactaactagtaagttggtagtaagcaatctaccaaatgagctacctctacgggtcctttgctactgtttctttttgttttgttttgaacaaatatcttcaaatattgtcagaaaaaacccttaaagaatattaaagtttctttcacattttgccttccttagggttaggaatgatttaacaatcactggaaatgatgggataatcaatgtattagtgtgtttttataaacaggtggaatgttctctacagtgggtaaatgcttcattgaaaccgaagacattgaatttccatgtaaactgtgttctgctgtagatcagtgacgaggagaagacccttcgggaacaggatatcatggcgtcctctccaagcctaagtgggatcaagttggagtcagagtcagtttataaggtatgtatcaccacagctgcttcctggtgtgaacacatctgttgtcacaccaagtgctgggccgtgcttcacactgatattctcctcactgtgatgggcttctgatctgtcccagttcatcctgttgaagaaaagcctggcattgctgaagctcctggatatgatgcggggccgcaccagaaacttccttggctgttcataggcccttacccatgccttggctcatggctttgtgtggtctctttgcatatgtgctctgacaccataagcctgcgtgctttcctgtgggaaggcattcctgaaccttagtatatggggctggtgtttgggttacaccgcacatttcccattgctggacatcacagcatctgtttccactgcttgggcatttttgtttgcactgtggccaccacagtaaactagaggcctggacgtgggaggttcattagctcctgtgttccttcccttcccaggtttgcagattgggcctctgaggttcagaggaatttatctcactcactaaatcataagctggtagcagactagaacaggtcgtggacttgggctgtagcttgcttccaaatgctgttctgctcctgcctgcattgtgccgacccttcttcctcatgcctctgctgtgccttgtgagcagctacctgttggacgctgtagctctcatggctccctgggcagctgttggatgttccacaggtgttttgttctgttctgtccttaaatacattctggaccctttggggatatcagctatgctgtacactgtagtctacagtcatgggcagcatgcggttgtcaaagctttctagttaaggacctgtgatctcaggctggagacaagcctcacgttatgagctcatgttgtcctaccagaggatcctggttcggtttccagaaatcagttgcctgtaagtccagctccaggggctctaagccagggtcctaacatgtgctccgacccccacacagacacacacatagagacgtaatgtaaaaggacaacaaaacagaaagcatttaaatagcccccggcccgtgtgaggtgctgtcagctacaccaaaccgcaggcatgtgcatttcaccgctgcctgagacacttaagggaagtgttcaccttaagttcttgcttcattttaaaaataatgaaaaaagaattttccagaaggatgatttttacagccaaggccacattatgtttatggtgggagaattcatagtacttaatctttgtttcattttataacagatccttacatgctcacaacagagtttaacagcaaaactgaagggtcgttgtttccagttctcagcgctgagggcagctattcatgggtgcttctccaggggaggagcagaagcttagagaaacagatttacaagtagctttgattataagtaactttgacttatggatactcttttgaaaataaaaattaggacaacactatttgacatacagttctcaatctgtcaggaggtaaaatagcatgcccaaagagtttgaagtagaagtttgaaattttggtgcttacaattcagaaatatgtaggttacaactaaaaagaaaacattctgtcttggctctctattactgttactgacttttggagcatgggctctagtacatctatttttatgttgttaatttttcctaatgctagtcctttggttgtaaggaataaatttctctctttttttggagctgctgggactaatgggttttgttagaagatgtagggtctcctaacaacagttactgacctatttccctgttttacttgggtcccaggtcccctttgctgatgctctggacctgttcagaggaaggaaagtctacttggaagatggctttgcttatgtgccacttaaggacatcgtggccattatcttgaacgagtttagagccacgctgtctaaggctttggcagtaagtgctttctcttatttcctcatttgatatcattataaatccctggtgattttgttttgtgctcttttacacagtaagtgaatattttcatagtgacattttagatcgcctctggtgttatgttaattgcagaatccctagcattttatatgttagtctccacacttggttttgttatggcttcttctagtagcatgaatggttaactaatggttaactaatggctagctggctgattatgtcagtggcctctctgggttactcagcaaatgggttttgcttggagatggacattgtatgtggcccttaaaacctttgtggcctttggtggatgcgacccctagatttctgttgtgaattgctgttttttatcagcagagggcattgtagaagcaagttttggttttcttattttgcagtgttgggagttgaaacctagggccttgtgcttgctagggagccgtctatgactgagctgtgcccccagtcccaggagaaagagtttatatttcggtatcataaacagcgattggctgctgctgagaaaatgacccagtgctagtgacattcgggggagccgtgttgaacaaatgagggtggactcagtttgttgagatcttactccagagtgatgccagttggcttttaatctaggtcggttttttatcttttatttatgtattttttttttgtacttgataaagaggagtacttcagagtcaaaggacaatcatgtcgctgtaatgacaatcatataagcatgtggcaagcttttcttttgagttaaaattgtagtgttttctggtataaattattgactctgtggtcattgaagcatgcataattcaggtatgttagcatttggtagggctaaaatattgactgtttctgtttaggtgaggcagtttatggaaacaccatatcaacatttaacctttttttcatgaaaatatgcgtgtgtgggtgtatgatattaatgatagaatctagggccttgtgtatgtgctaacacatggtctactgctgagttaaaccctcagccctgattaggtatttagctgctaatattcatctctaattccatgatatattaaaaagctgttttttaaagatagttgatgccttaaaatgtttctttgtttctctgtcccagaatgtctttatagataagaatagtgaggtcactgctgtgggccagtctgtctattggttggctctctttcttctgtggttcttgtttttcagttcattactctactgatgctttgaaaagcattcgtttgtgtgaaagaggtacattcttcccaggacattacatatcagtaaatgccgtctaataaatcctagcagtggctcctattctccacagtcacccaaaccatcaccatgtatttccagaagcttctagaatgttggtgctgattttgaggccagagaggctcctccctccctcctgtttctaatggcagagagcatcctgatagtgcccttcttcagagattcttggacacaccagttttttacaccagttgcaagtcatagaaacaagtctgctatcttaaccagtaatggagtgtgttagtccataaactcaagcagtccagtggttgagtgagtgacgctagtgtccacagcagtgttccagatgtttgtctgcattgtctttacccgtatgcatgtgcaagtgctttgtccttggtttggtttttctcacagtagcagaagtgggtcagacactgtatctctaacatggcatccacacaagcttctttttcttgtgcttgaatttcattctctgtcttcatatttgttatgcttgaaatggcttaaggcacatgtattactcgctgctccatcaaagtaccacaaactggggccatagaagaagcattcattgtctcctgaccgtggagagtagatatttggaattcaggtacaggcaggtctgtgaccctctgaactgttggagaaaggcctttcgggtttctctctgagttattggtattgtgacaatgtaactgtagttttcacatggaattatctatatgtgttccaaatgtctactctgtattgggttaaggccccttgctctagtgtgtctgcagtagtcatatttccaaatgcattcacattgtgagggagtaccaggtacagctttgacatatcaaatttgggggtattattcaaactgtattgtatacctagccagttagttaccatggccaaaaggattgcttacgctaaggctgtgattctgccgctttgttttctgattcatgggatcaggagactccacaggctcctacattataatctcctcaggagaaatgcctggtggattgttaggagcacgtggaggggagggtacagcagaggcagccagagaaacccttagcgcctcagagctcattccgacgggtgttttaccaagcttgaaaacactctagtgttcttttcttgtttctattataagtttgccttgcagacaacttttgtggggaagaaaggaactttcttttctacattgtttactgctcacactctttgttatttaccatctctctgacagtcactacaagcttctgagccagacggattgtaatccacttacacagatgagaaaaacacagctaggcacacactgttagagctgtggctggatctcagggtttgtgtttgtaaaactgttaggaatggtgggtgataactgtgctggtgtagggggctgtacagtgaggggattcagatctttgaactctgggaaatatacacgttgcagagcaggtgaaatgtgtaggattggagctgtggtatagtagatgactaggggttagaggacgatgggagaaggctacttcttgtctcactcagcagtctgagaagctgtgatttttttccccccataatgatttgtcttgtaataactgtttacttgttaagccatacattattttatataccacagatcttctacttagatagacagaagttattcaattataaagcttgtattctagtggcagataaataattactaaacaactacacagacacacagacacacagacacacagacacacacacacacaaacacgcacgcacacacgtgtaagggggaagaaatgtgtgttgtaggtctcagggagggaatgcttgtgttctcttggttgaaaggccagtgctgtggaagcatggtgagctagaagcaagtgagcttacatcgagagggctggatgcagatgtgagtgagccaggccaataagttgtggttttgccttattgtagggtaagtactggtactttttgataagggctgatgtggcctgctcctgtctgacataggttactgtggctgctgcttaaaaactactctagagggtgcggggcaactgaagcaggaggctggactggaaatgtctcattaattcaaataggtttattagtttatgtgaaccaaccttgcctttctgggatgacgccaacttggtcataatgtataatttttctcaatgtgttgttgaattctgcttgcaagtattttgttattctcttgctgtgaagagacaccatgaccaaggcaactcttataaaataaagtatctaactgccaggttgtttacagtttcaggggctcagtccattgtcatctcggtgtgaagcacggcagcaggcttggcaggcagggtgctggagaagttgctgagagctacatcctgatccataggcagaaaaaggaagagtggggctggcatggtctcaaagtcctcccccagtgacacacttcctccagtaaggctataccccgtagtccttctaatcctagcgaacaaggccacttcctggcattcagtatatgagcatatatgggccattcttttttaaaccaccacaccatctgtgtttatcaaagacattggtctatagttgttttttttaaatagtgtcttgacctagtcttggtatcaagatgatactggcttcacagaatgaatttggtggtgttcctttactttatacttaataaagctaagaagaattgtcatgaggtcttcagcaggcgcatcaaacatcactagacaatacaaagaaagcatctgccaccaccactcatgacctgccaccaagagaatcaaagttacagcgcctgtgagatgctgagaaaggacttagagtattagtgtttgaaagaaaaagccaccacatagaagacccagatagatgcttaagttaagaaaacctccccatgaccttgacaagatagtctccaaactgaacatatcacttaataaattggaggtgaaagttcaaatatggaggggaaaattagcaaggagactgaacccttgaaggagattcctaaaatccacaagagacattatctttagcagacaagatcatgcagaagaatgacagagctgggaaaataatacatcagtcatatatgagggaaaaaattaaagcactcgaacgatatttccaaggagtgtgggacacattcaggaggccagactccagcactgatcgtgttggggaaggagcagagataagctgaaggagtatacagtctggtgagcttgcaggagaagacttgggaatcctacagaaatgggcttttaaacatagggcgtttatagacctccaggtagacatgagcagagagaaaatcttccatgacatattatagccaggatgttaaaaatacaaagaaacaatccaacttacatacgaaggcattaatatcagaactgcccccggcttttcatctgcaagcataaaagccagaatgaatgagatttcaggctcccaaagtaagcaactgtgaaccaaaaaatgttaaatactgcaaagccatttttccaaactgatagagaaatgaagggatttcaaagcaaacacaagtcaaagcaattcatgccaaccatgactgcactgcagagttcttatgggaagcgttatagggagaagactgcataactccagataaacacgcttgacctggggaagaaatagtcatgtagacacagcaactcaacagacctcaaaactaatacgggagcaggaaaagaaagaattcatcgagagagtatgtcacctgttttaattagcgcgcctctattgctgtgataaaacacttcgactaaaagcaacttgggcagagggtttattttgcttacatttccacaccacagtccatcactgaaaggagtcagggcaggagtgccaggcatgaacctcgagggaggaactggagtcaaggtcacagaggactgctgattagtggcttgctcctcatggcttgctcagcctgctttcttagagaacctgggaccacacttgctcaggggaagtaccactcagagtgaacttggccctcccgtattgatcattagtcaaggaactgcaccacaggcttactggacaatctggtggagtattttctcaattgacgttcccttctccaaaatgactagcttctataaagttgttataaaactagcctacatacataattcagtttcttttcttttcttttttttcccttttggttttcgagacagggtttctctgtatagccctggctgtcctggaactcactttgtagaccaggttggcctcgaactcagaaattcgcctgcctctgcctcccaagtactgggcctaaaggcgtgcgccaccatgcccagtaattcaatttctttaaagtatcatttaaaagctcctttcaaaatttagtttctctaaaatatccaaagtttctccaaagtttccaaagtctgtctaaaatattcatgctctttagaataaccaaaccagttccaaggtttctataaaatttcaaagtctcttgtctgtgggatcctttttttgttgttgttttaaagttactttattactccaagagggaagaaccagggcacagttagttacattcaaatcaaagcaaagccaaagttgaacagtataaagctcagagtcagatccctgaggctcaatgttggtttttctccagctttgccaccccacagcacagctctgagcactcagcgcctcttccagcccatcattccaaatgccttccacagtcttccctaactcaacctgaggacgctcacagcaaccccatctccttgtacctgttcttcagggtctctggtactgtgataaaacaccatgagcacaacaactttgggaggaaaggctctccccgttttgtacgtattttgcatatattttgcatatatttccatataacagtccatcattgaaggacactagggcaggagctccaggaaagaaccgtctgcacacaggcgctgaagcagaaacggtggggaatgctccttattggcttactatcatggcttgctgagctggcctttgtggcaggattttccctgtccaattacattaaaatattagtgcagcaggaggcctgtgattggacagggaaaagggaggcggagctgagagttggagagacagagagactgaggagggagggaggaagcaagatggagggcgacggatgattcagaaccagcatggttttaaataaccgtaggtagatatgatatcttatagggataaaataattggggtaacttgtctaatctaggtgggcagcttataccattatcaattggccttgaatttattgtgtgggtatcttgtgaattgagaatttattgatacataaatctgactgattaattataagcttctagagttttgtttcgaccgggttgctgggtgttttggcgattgactgaggggtgggcagtcgttgcatggggctggcatggcagtgacccaccaagggaacttagtgactcgggtgtggacatttctgtggctccatactagagagaccactgagttgagaacaccctgctggagcaatgcaacccgatggtgcctagcatagtactggatataaatattcttttttttttttttttttttttttttatttcatgcaacaggctttcttacagcacccaggaccaccagaccaggggtggcaccactcctagtgaactggggcctcttacattacttgtcagtcaagagaatgcactataggcttgcccacggtccagtctggtcaggcattttcttaatcaagatactcacttctaaaatgagtctagtttgtgtcaggcagacttaaagctagctaacacaataaaacaaatgtgtagaaaataacaaccttctttctataataaccttaagtgtaaatgtcctcagcccatcactaaaaagatacagaataagggactggatggcaaaccaagaaccaagaaggacatgcaaacacttagtatcaaaggatagagaagaacttactaagcaaccagaaaatgtgagtaagatggcctgtctgttcttatagaagacaaagtaaacccaacccagaaccaagtaggaaagataaaaggagcaatgcatattaataaaagaaacagccaattatgaacacttatataccaatgattgaagcccttaattttataaaataaaaatgaaaagacataaaatactacatacgtcctgacacaatactaatcggaacttggatactccactctcaagttggataggtcttccaaattaaaaacaaagaaatttcagagctaaaatgtattatggatgaaccggtcttaacagataaatacagaatattccacccatcagatgaggaatatatatttttctcagcagcacgtggaaccttctctaaaactgatcttatcatagggcacaagtcaaatctcaaaaaaaaaaaaaaatcaacattttccatgtctcttatcagaccatgttgcaatacaactagaaatgaatgttaagagaaacaacagaaaccacaaaatacttggagacctttgaattaatactaggtcatctaagaaatgagagaggaaattaaaaattctcagaggcaaatgatagtgaaaacacatcctattagaacctctagcagcagccaaggtcctgagaggaaagctcatgctgatcctgctaaaagtctgagggacacagatcacctaatgatgcacctcaggctccccagaaacaagcagaggaccctaaatacagcagatggcgagattagataaagattagagaagagggctggcgggatggctcagcgggtaagagcactgactgctcttccgaaggtcctgagttcatatctcagcaaccacatggtggctcacaaccatccgtaatgagatctgacgtcctcttctggtctgtctgaagacagcgacagtgtacttatatataataaaaaataaagatctttaaagaaaaaagattagagaagaaattaaagacatttagattgaaagagaactcaccaaatcagacaaagatagacaaactcttagctaatctgacaagaaggaaaaaaaaaagaaaagaaaagaaaaggaggagatacaagttaatcaaattagagatcaaaaaagtaccattactactgacttgaataaatttcagaacaccattagaaattactatgaaagttaatattctgaaaaactggataatccagagtagaagaattttccaaagaacataatctacccaaaataagccctgacgataaaaataacttaaataggcccacttattgtaagcagtgaggttgacgctgttaccaaagacttccctcaacggaaagctggatttactgctgagtcctgtcacttgcaaggaagatccatactgaatgtgtttgatcgttatcttccatctgaagtatatttgctactgtacagtggtagccattataagatgggaatttaaaacgaatgtggaaatgacaggaggagatgctagtccttctttcaccattccagtaaggcctctcgcacatgcacaggccttctctggagccatgacggaaactgttgcagtcattgttgggaagcagttctatagtatggatgtgaaagggagcgatttgggggagaaaatgattttatattgggagcgttgagcttatgtaacgaccagtgcattgtgataaaatttaggttggaatatgtatatacacatgtattttatgtaaatattagatgtaaaatgtatatatcctgtaaatgttaatttagacaaccttttattgacaccattgaacaataaaaaaaattagtgaaacaattaacaattagaaatcatatttctaggttcctgattgattaagtgaattcaatggaaaaccctagtaaatacatctggaagtgctttggaaatgtcaaagtgtgctgtgtattagatgttcacttaaaggggtaaagtctgaaaaataatattctaggagcttttgctttttttctttgatttttcttctacagtgctttgcacagtttgtattttgtcatggaaattgatgagggaactttgattcatcatttcaggctttctttggtttctagttgtcaggaactactattagtggtgttcacaggaagaaaacagtacacactcttgtatctttttatgtaggcaataagcctatgtaatgcaaatggagcattgtttgtcttattttgtatggtcgggcttagcacatgtcatcttaaaaatgatgacacttttattaattctgagaattctatacattcacacagcatattttggtcatgtttattcctctctttcatgctttcctatataggaagctctgtataaaacgaccagcttggcttcttaattttgtttaaatggcctccataggcctataggaagtggcactattaagaggtgtggctttgttggagcaggtgtgaccattttggagtaggtgtggctttgttggaggtggactatgactagggtatgggctttgagctctcagaagttcaagccaatctcctgctgcttgctgatcaagttttagaactcttacctccttctctagtaccatgtctgcctacatgctaccatgtgttcaccatgacagtaatggactggactctgaagctgtaagctggacaccaattcagtgttttcctaaataagcattgctgtgatcgtagtgtctcttcacagcgatagaaaccctaagacagcttccagactaatggatggagtcagttagtgaaggacagaggtcttttaccatgtctcactaacatcttgaattcaggctttttaacagtctgttgcctgtcctaggtccacctgatcttctcctctctgctgctttctgggatcaccctcaggcagtgtttccatgaacatttcaaatgcgccagtggctgtagcgtaaagattatgctggagtcattttaattacttattttcagtgctcaatgccaagtcttgtgaaggttagctacctagctctgatgaattgtgatagctggatatttggatttgtgggttttttgtttgtttgtttgtttttttgttgttgaaaagcaaatgtggggtgaatgcacttcatatgtttacaaactgtaaacaaagcttgtgatagcatttgccaagtaccatctatgcaaacatttctgaactcttgatgacaggtattctgagttcagaaatcatccttttgtgttcttgtttctccgtctccctcatgtgtagtgaaggttagctagtcccgcactcttttgtaagtcctcctcttcctcaggttatttatcatatcaggaatcacagtcccccgaaagcggctatgcttagaaagtagtgactaacttcactctgtcttggttttttaactgactgtggagacttgtgagtatgctcctcctcctcctcactaggacctcacagcctcctccttctcactgggacctcacagcctcctcctcctcactgggacctcacaggctcctcctccttctcactgggacctcacagcctcctcctcctcctcctcactgggacctcacagcctcctcctcctcactgggacctcacagcctcctccttctcactgggacctcacaggctcctcctcctcactaggacctcacagcctcctcctcctcactaggacctcacaggctcctcctcctcctcctaactaggacctcacagcctcctcctcactgggacctcacaggctcctcctcctctgtgggaagccacatgtgccgttgctgagtggcactgactactgctggccaccacgcataagattggacaaacaaccaatgtgtacatatgcagtaaagttttttgcaaagacactgcctggcccaggcatgataatgaggttctgtaaggtactgagagtataaccaatcagatgtgagacatgcaaatgaggtatgataatgaggttctgtaaggtactgagagagagtagccaatcagatgaggaacatgcaaatgaggcttagtgcataaccaatcaaggtgtgagacacgccccctcctaggcctataaaagcagcaccagttctgggctcgaggtcttttcgcctctacaatcaagctctcccaagcgcgcgcaagactcctcctcactaggacctcacaggctcctcctcctcttcactgggacctcacaggctcctcctcctcctcctcactaggacctcacagcctcctccttctcactgggacctcacagtctcctcctcactggaacctcacagtctcctcctcctcacccactgggacctcacagcctcctcctcactggaacctcacagcctgttgcatacttgtgaggagaaaatggtagcaaatccagttgctaggaaacagctgacgactaaaatggtgttgtgagggtcttgtacatccggttctttgacagttctgctctcagagaacaaaaatttactcagccactacagagagagccctatcacctgtcggtttttcagttggaaagtttttgcacagggggagctagtaatatgaagtgttacaggagtaattaagcattagggtataatttttaacagtgactggacattgaaaaatgattatgtacctgtatggctttgagtttcagttttctgactcatcctttatgagagagaggaggagctagaagccagcacatttggcgcattagaattagcatagagagaaaccctgttatttaaaccaacttggttttacagaggtaggtcagccagtgtagtagattcttccatggatttcattgcctaatctgtgccagagaaaaaatactgaaaagcactatttggctttcttttgtaactgtttgttgtttatttttgtcataactgtaattttatgtttttgaacccaacgtcctgtgcatacaaggaaaatgccctgcttttggctttcccctagctcctagcaaaaagatggtcatttagtatcaaggcagtacccactggtaagcatgcaccgagtcaggcgaacggctactgcggagacaagtatgactagatatcccaacagggcagttggggagcgaggtgggcagcggcatgttgtggtcagtgtaaaaagaggggtttgggaagtacagagacagcagacagtgatgagcttggttttccaactaagtgcttcaaagatgtcacctttggcttgagtttggcaaggctctttctgagatgctaggagcatcttgaccttgtctcctttggagggcaggggagtggaggataaaatggctgctgcttccccttctaacttctctccgggtccctaccctgggctggttagtcctcctgctccattcatcagctgagcactgttcacgcccaggactgtaattctgcgtgttcagcttcactgcttgtccgcttaattgcatgcatgaatgtagggggtacagaatctagcttctgaattatacaagttgaaggtttgtgtctcagaaataaaattccttggaagctttttcccttatttaaataaccctgtgaggttaggttggccgttttaaaagttatagtggttcagaaaatatttcttctaatgtatcccagtaatttgtaaattcaaagtaacagtcaaaacaaaaggaaagttatgagcagttgctactatagcatcctggggaggtgggactgagggcacagtacagcttgacttcccttaaaactcacagcgtcagagtttttgtttcctttctacgttttatttttatttatttatttgagtgattaaaatgtttgaatgaatgggcattttgactgcatgtgtgtctgtgtatctcgtggctgaggaggccagaagagggttttggatcccctggtagtgaggtgccatttgggttctagaaactggatctcagttccttgcaagggcagaaagtgttcttaaccacaggagccatctctatgggctcacagggctataaaatatggccccgtgtctgtattttaaaatgggagcttacctgtattacattgaattgcctcattttccctctgctctttccccctccagccaccccaaggtgacagcccccttttctttgcttattattttattattggggtgtgtgtgtgtattgtttgtagagctatgatttcaaggctgatcactctgcattggacagtcagtaagagggcttgtcccaggagaggctgattctccatctgtggcagtcatctgttgtctgtagttctttgtctcagggtgggacatttcccctctttcatattaacgtgtcccttgacttggcccttgtttgaggcttgtttgtacagcagtttctagaggagactatttcacaggcacttcctggtaatatagctcttacagtcttccactccttcttccatgatgtttcttgagccatagatgcaggagctgtgatgtagatcttatgttggcctgggctccccacaatctgttgaactctgcattgtccctgtttgctataaagagagatttctctgatgaggggtggtagctacacttacctggaaatgtagcttatgtgcaagagaatttgcgggctgtgggtggggagctaagtctgtgggtctgattattcctgttcttaatggtaggactgggatctatttggtctttcagtattaattatggtgttagctacctgtttttcaagatcttttttcctcagaattaagaaaactgctatttctagtttctgagttgccttgggtggcgggttatgtatgcatattgaattttgtctttggtatttgtttacttattgaaatgacaatgtggttaaacaaaatttcatttattaatgtactgattagactgatttaaaagtattaaaccaatttcgcattcatggcataaatttaccctgtcaaacttgttgctaaatgttttattcatttgccacaaaggatattggtttagagttttgttgtactataatatccgcctgatgttgatgcccagttagtgccatcctcacgaaatgatttgatagttttcctctctattcattttatatgacattgtagtaaaaaaaaatacagtttaattattttaagaatgaaattatttaagttgtcaacttttcttcttttctctacaaaatagatcttaaccagtattgtattataaactgactttataccgtataattaaaataaatatttttaatattgaggtattttttggagaaactgattaaaatgttttatactgattttaagattgtaaaccaccccgcggaaaaaaatttaagtatcagaatatctttagatagatttatgtagtttataatgttgattatatggcatgtaacatttagaacatttattcaaagatgttttcttaaaatatcagagtattttctttcttgcctttctccctccctccctccctctccctccccctctcccttcnnnnnnnnnnnnnnnnnnnncccctctcccttcctccctccctccctccctccctccctccctcctttgggacaggatcttactatgtgacacaggctgtactcaccctgtcaccctctgcgtttctcacaggtatgcataaccccacccaactcagtagcattaaatgactattatctatcatcaagttttattttttttaagtatttttatgtgtatgagtgtttttactgcatgtatgtgcatgcaccatgtgccaaaagagggtagtgtcccctggaactggaatggcaagtggttgtgaggtgctgtagatgttgggaaccaaacctggttctccttagccactacgtcctctgtgcagaccctaccatgtacatttgatcacttctttatccacctcagtggcattgaaattaattatttccagtatttttgcagtcacatgcaatgttgtgtgcacttcttttgtaaaccttggtttttatttttgatctgttcatgtaagtttagaaattattttgtgagaaagcctgcttttttgtttgtgtatgtgcatgttcccgcatgtgcaggccagtgtacatgtgttgagtcggaggctgatgttgagtgtcttcctccatggctctccacctgaacccagtgttcacctacatggctagccttgctggccagcaagccccaggattcttttcccgccttttctagtgctgggattacaggcgcttgaaactccagtccccatgcttgaatggctgaagcttaccagctgagtgtccccagcccaagttaagtgtgcttgatagcttagggaactgcctttttaatgtggtacatcagcctgtacttacgagaatgtctggttctatgttattcaatatatgggattttagagttatagagaacttggctgctgtgttaggctaaagtagaatcttagtactttttcttttgatagtaggaaatatttaagaagtcatatagagatctttagaatcgtgtgagaagttatgcaacagaagtgctttgaggaaataagtttctagaggcagacaaaacagtaactacattaggctatagaacttgcaagggaaggaagtcttcatatgtttaaatgactttttatttctcttggaaatgagtggaatgttatggattgcaggagccatgggtctcacgttctgatttcttcaaaataccccagttcttctttaaccaaagaaacctcaatagctcagtgcttggtctttatgactcatatccttgatgggagttttgggaaaatagaagcttgttatcagaaaataggtaggtgtctggaacagttgaggtgaaccacattcctcacagctgtgatactgatagactcaaaagcagtcatttggaagaagtaaaagaaaattgcagtgaaactcaaactgtttgaaaattttgacatattttggcttgtaaagtaaatttgatgggcaatacaggttacagatgtgagggctggcaaaaagtcagcagacaagaaaacaagtgagggaagagtctttaataagtctgttttggtgaataaaaaaagtataaactgttaagaggagattttgttatgcctttttttgtggttcgttgtcttagggtttctattgctgtgatggaagaccatgaccaaaagtggcttggggaagaaagggtttatagatttggaatcacagttccctgagggaagccaaggctcgaactcagaccaagtgggaacctggaggcaggagctgatgcagaggccatggaggggtgctgtgtactggcttgctccccatgacttgctcagcctgctttcttatagaacccaggtaccacccacaaaaagctgggtccccttcagtcactaattaagaaaatgtcctccaaggctccttgtctccagcccagttttatggaggcagtttttaaagttgaggttcactttccttagatggctttagcttgtgtcaagacgacattagcactagcaaggggtcctgtgtattagtcattactattgttgcagtggcagaataccagacagaagggacttgaggggagagaggcttatctggggtcttgaggggaaggcaggttaggccacattggtgcagtggggtggtaagttactcatgctttggtggagtagcaagcggagaacacctggactgggcccacaggtaaacactgatgtctcctcgtcaccgccccagtgacccagttctagctaggcatgtgagcctgtgggaacatttgcgttgaaacttaagaatggctacattcatctatagtctgtacatttctgtaaaactttccagacaggttataacaaaatacatcgaaatagtaaaggaagtagaaaatgagaactcatgagcaaaccctagatcctgcctgttggcggtttgtactggtctttcttcctgggaggaaaggtaacaaggaccccagtcactgacacagaaaggagaggctttgccagtttataaaatgtaacttaaaaaaaaaaagatttatttatttactttatgtatataagtacattgtagctgtcttcaaacaaaccagaagagggcatcagatcccactacagatggtggtgagccatcatgtggttgctgagaattgaactcaggacctctgaaagagcagccagctctttttaaggaatgtaatgtaactttttaaggactatgttctgctagctaattaaaaagttttactgataggaactgcgcaagtaaatatagaaaccaatgctttattagagtcttctgtctggagatcttgatgaatgctggagtagacaaacatgatttcaatttatgtctcgaggttcttaatggcttaactatggaggagttagaggaaggacagaatgaggaaactggaaaaggaggaaggggactcagggtgtcatctttgagaagactaggacattattgattttcattgagccacttgtcaggcctatcacatgctgtagaggaatattgagaagacagagcaaaggctgctgtgtccttgtgactgtggacagccgtggagaaggaacaaaccttctctcagtagataatgtcctttatcttaatgtccttaccagcagagatgaagtgcagggtctgttcaggttccacgggtgtatttggaacgtaagccttgaagtctggaacccgaggcacagccctttctgtctcccgtgattatcgtcagattggtgttatttttgtctgtttggataacgccacgggtgtttccgattcttttgttttaatgagctgacagctctctagtgtggaagactgggtgaatgctttgctctacagttttagtgttcattaggcattattatgtaagcagtaagcaaacgctagtgagtctgatggtttgtgacatctgtttttgttgttgatgtgactgttctttgtgagaatggttattggtaatagtctgactgtcacatcttagccagactgttgaataatagacatttccattctgtcgttcctcccttctggcctcgccgttcttatgtactctgacttcattattgccaaaggaaaagcttgactattgacggctagatcccctgccactcaggatttcattttcctgcacttttgaagtgctgtcttttacattttcattttctctatttagggagccttccctttgcaggcaagatgctgatagaatttatctgctgaaaatgaaggtctgtgctcttggatttctggcttcaaaataatcatgtagagcagccatgagatgggagagatgaaagattcagagatgccagtcttaatttacaagagtttcttatcaacaagactggatcatgacttgtagcagtcttcaaaatgtatctagcactgtaatctgagctgtgatatttcatcaaacacacagcctaaacctacagaactctggtttccttgtttaatttgtatagtcagtagaagatagtgaaatctaaaagtatttcttgtgaaagcttcacatgtgggctggggagatggttttgttagtaaagagcttgttgtgtaaacaggactggggtttagagccccagggctatatggaggtgggcagattcatcggcttcactagccagacagcctggctctaggctcagtgagaaaccttggtacaaaaagaagcaggtgagccattgaggaaaacacctgaggttggcctgtgtcttgcaggcgcgtgcatgcacgtacacacagccactcatgtctgcacacagatgcacacagatgccttacatttcccagttattgttgggcaatgcttaaagatgagttccagtttatcttcagttgtgaaagatcttactattactacatttcatgaaagccttaattaaaaatacatagctggtcatctcatttagaatttgcttccttgtaaattattcttttaaatcactgttccatcttttggctaaggtcaaatgtaattattctgctaatggaagttccaccttttaggtagcttttattgtgattgtttgagttacattccttgctgtgataaaatgccttgataatgaactttaagggaagaaaggtactttggggcccacagagggcatcagtccacgtaatgggcaacacatggtagcaggcagggaaggcctggtgtcgggaccaggaggcatgctgcactcaggaagagagacagaccatgaacggagctgtaaagtgacccactacctcccaccagggtccacatcctcctaaaggttatataagcctcccaaacagtaccattagctggggaccatgcattcagatacaggagctgcagggtcattcacagtcaaagtacaaagtgccaaagtcccaggcagcatcagcgtctacagtaaaggatgaatgctgaagcccagccaggtcagctcctgtcttgtcagatgcccggggacaaatggatgctgtcaagagtttggcattcctagcctgatctccattttactttaataatttaacagaggtgtttatgaaatgataaaattaatattctttttttctctttagtagctgctaaaatttagaatttactttagagatcaagtttctattaaaaaagaccttaaagtagttttgttctgtccaagtttcagcagtgatagtaatgtttacatttttcttgatgaatcttttttcatgttgcgtggctggtatacaaatggcacactgttatgctaagtaacttctttcccagtgcagcagagctgtttagactgtgaccttttagaataaattggcaagtacgtcaggtttgctaagagctagagtggagaaatacattttgcaggaagatccttgggatgccccatttacttgaaattttaaacagtgagataaaaggctttatgttgaagcatgaatgtttcaaaatgatgattaatgaggaacttgtcacttggaattcacttcaggtcctgtgtttccagtgtcagctcagcgtccctctttgtaacacaatggatgatgttataatagcacacacaaggttagtatgctatggtaatagtgtagcaaagccgtgaaaactcagtgtccttttcactttgaaattgacttgctaacccatccaaagcccattttcatattttcattaatattttacttttgtatttttctgataacctatagcccttaaaaaatctgggaacttctggcttaggagcatattttaataaaattctctgtactttcctatagtgcctgctattttctgttatttttcaagtaaacctgcatataataaatttttttttaagcattgaccttgatagttgaagcaaccgcagtggataaggttgaagctgggaagtgtgagaagcccattcagtatttagggcataaggtgaggtcatcagtactcctgaggtgactgttgggaagtggcaacctgacctgtgatgtgtaaaccgaggcaggcttcgtattgattgcctcaggaaccattcctcactcatttaactttgagggacctggggctgcctggttgcttcagccctgagaacagtaagcactatgattgccctgattaaggctaactgatcgtcatgggggtggtaaatcattgcaggtcaggagtcttaaaggttcctctggtgagttgagtaagaacgctcacccccctcaacagctccccctccgtccccgccctataggctcatatatttgaatgcttaattgctagggagcagagctgtttgaagggattagaaggattagaggtgtggtgaggccttgttagagtaggtatggctttgttggagcaagtgtgtcactgggttgggtgggctttgaggtttcaaaagctcacacaagatccaatatgtctctctacttgttgcctgtggatcaggatgttacactcagctgctgctcagacatcatgcatgctgccatactcctaccatgctccccaccatgatgataatggactaaggctttgaagtgtaagcaagcccccagtcgaatgctttatttctttttataagagttgccttggtcatggtgcttcttcacagcaatagaaaccctaagacagttcttaactaaaggcagaagcataatttgattctatatagtgtccctcctctgtatgtgtgtgtgtgtgcacgcgcacgcgcgcgtgtttgcatgtgtgtgtgcatgtgtgcacgagtatgctatggcacacatgtagagtcagaggacagcttctgggagttggttctctccttctgttaagctaaggtcatcagattgtaggatgaatgcttgtattttctgcacaatctcaccgaccccattccagttttcattgtgaacttaaactatatttttcttttcttttttgtaacgggagtctatgtagcttgggctgtccttgaattcagtagctgagggcgagctggaacttctgaccccttgcttctccttcctcagtaccggggtctgggatttcagggtacatccataagatttttggtatttgagttggattgtaagcactttatttatttatttttaagcacagaatatttcttgcaatgtagtctaatgcataaaaacattgggtgtttgaaatgttagtcaaagatctgaaattttcaagcatataaaacatttggtcaacacaagtctttttgaagcatggatagatagttctgaaaaatccaagatttcttagcagtctgagaaatgaggaggcagctgtcagatacagtgggcccagggatctgagggacaggttggcagatatgtcagagttgtcctgtctccttgaagccatgcatgtttctagtagcacatctctttctcagtggtcattgctactgttgtaaaataggtgaaaaatcataatggcttgcttgtgtacgggtcctggacagatttagtttggaattatgaaggtgttttaaaacttaaatatatgtagacagctagtagttcagccttcattttcatataaggaatgtaatgtataattccatataaggaattataatggttaaaatgtgtaaagtaactcatacaaatatttatagatgtatactttatatataccaaactccaaaaaatttaaacatataaatctttaatttatgagaagaaatacacctatgtaactatgatttaaaacaaaatgcaaacattcctgcttctatcagtaacttgtgttctctgcttgaggcagccagggagtgatttttggtattatagattagttttacttggtttttttttttttttttttttttttttttttttgttgtttcagagttttgtaagcagaaatttgcttggccagctgtctatatagtttgataattggtgtgtctgagtcatttctatatctgaattgtattccattgtatgaatagccccaaatgaagaaagtatttaagcagatatgtcagagaggaagatatattgattatcttaaaactgtaaagaagattcttagcatgttttgtcttcaaggaaatgctttcaagcccaagttagatacagaaatctatcagggagagctgaagttaacaaatcctaccaattctaagggctgacaaccgcattgtactctcttaggttaccaatggggctaatattgatgctctgtgactgtcagttatttcaagcttcccaacttagccaggcttcttcttcacaggtaggagcccaactgagacttgggatatggcctccgaaggatcggtgtttgcctctcttcagcattgtgattgctcttgagagcatccgccataatggacaccagtctggtgccatggaaagatggcaggacaccttctgttgttaaacatgcctttaccacatgatgcaacattcctactcctagatatttactcaaaagaaatgagagcatgtgttcatagcaactttgttctcaataaatagctccaaactggaaacagtgtagtattcaccaacagggaatagataaaaacattcagataggttttagaatttagttcatttttaaaatattactattatttgtgtgcaaccttgagtgtgcgtgtgtatgtgtgtgcatgtgtgtcagtgcgggtgcacgtgtgccacggtttgtgtgggaggttagatgacaagcttctggagttagtccttgactttacccatgtttgagataggatctctgctactgtgtagaccaggctaactgctggagcacctcctgtaggcactctggcggtgcacatcctcgtgctactgtgtttgggggtctagactcgggtcatcagcgggtttgcctggcaaaccatcttcctagcctggttttatgttttgttaatttttatatttcttgtacatgagatttgttcatggctaatgcagaaatgactacgttttttagaaataccaatgtggaaagattagtatcagtacccagttgtatgctgtgacagaaaccatactatactcctacttgttttattcagtagatactaaaaaaaatagcaaacttcagtgtggtgtttgtgatgcagagtaagctggaggaagccaggtgcagtgtactgaggccctgccctcctttctgaagacgtctactttctgaacgttgtagattagaatagactcttccatgaaatagggcttcagtgtcagcctggcacaaattagcatacaccaatagctgcttgcttccctcttcctggagtcttttgccctcagttttgtgtgctaagttttcttttaaaaattctgtgtggcatgtcagtgtgagagtgtgtaggtcagaggacagctcagggggtgaggtttttttcttctgtcacgtgggtgtggtctcaggcaagggccccttcctgcccatggagccatcttgccagccctatgctatgctctaaggctcctcgactttacatatttcataaatacttgatcgcattttttattaggtattttcctcatttacatttccaatgctatcccaaaagtccccatacccacccccccaatcccctacccacccactccccctttttggccctggcgttcccctgtactggggcatataaagtttgcaaatccaatgggcctctctttccagtgatggccgactaggccattttttgacttgatcgcatttttgagaatggatatatcaagattacattttcctggaaccgtattataattattttacttaagtctctatctcatcaaatagtgagaatttatatcagtattgtttgtgttgcagtgtttctcttttggatggggatgggggtgtttgtagttcatcttgtgccttgtatggcatgctaagggggcagttccgttgcacacagggctttcctgcaatggtgttgctgaagccaggtttcttgagctcctcatgcctcacaccgtgtgtattgtaatgttactttgtcttgaattaagagtattttaatttggatttacaaatgaaatttgggagattaacgaaagtttcaagctgtttcaagttaatttaaattttgatgaggaactcagatagtgataatttcctaaggggacggcagggatcctgtggctgcttcaggccggagaaagcctagattaaaagtaactcatgggggtggtagttatagagggcctgtggcttaatttcaggcatttataattgattttttctttaataattcaaagtttatttataccctgaaagtagttaaggtttctttaatgaacaaaaagtgttaatccttttattatcttacggatgaaataaaacttttggggcaacttcataagaaaccgagtatgaatcaacaggacggtgaaagctcctcttgtccctcctccatccaaggccttttttctgaagtcaaacccaggaagaataaaattaactgcagacaaacagcgttgttgtatctgaaccattgccactgctaggtgaagagacatggggaaagaggcagtggggctattgatgatctgtgcctaaagcattaagtttcaattactttctctgtatttactcagactttcttttcctgggaaagcacacctacaagtttggtggtgggtgaggggcaacctaatgtaatttttaatttagggttggagggagggaactgtgcctggcagtgtagcctctgattggttcatcaagcttccctgtagagtctgtgactttccctaaacgtctctgtcaagccttggccctaatttttatttggaagtgattgtagagtaacagatggtggggaactggtacaggacattcctacagaccacttagcgctcctcagtcctctcctagatagcgttagtcctgttaacggtaagctttgttcatatctgaccagttttgaggtgtcttctccttcccttgggaatcaaagtctgtgttttaccctcacagtgggttctagctagaccctgtccccatggaaccatgctattgttagagaaggacagacatttgctagtgactcttgaggtagactgtgttccaagggccactatgtttgtcattcagctctggatctaacaaggacaaatggagatttgtatccaaacatcagggtggagctcagtgtatagattattactgagagaaaccatcaaggttagcagggctcttcctagaccaacttcaccggattcttgttaaagacaggcattagtggtggagtattgagagcagaagagttttagtaaacagactctgcaggattctaaagactggacaaagttgtgtcaatgacagagttagatggtggggaccagtggaggagcccttagaggagccctgttcagactgtgtcaaggagaggactttgttcctggtatgactgaactgtgacacgacccttccccaacacatgaatgttgacagcctaatatctttctgcttgcccgccctccttccctccttccctccttccctccttccctccctccctccctcccttttttctttgttttcaccctcaccacagatacagatgtccctctttcctccttgttcttccccaacctctcttctgcccctccccctccccttctgtttctcctcagaaaggggcagaaaggcctaatatctcatacctaaggatatggcagcaatgaggaaagggcctcaaaggggctcagtaggttaaagtgaagctctgtgagggggtcacagtctaatgtgtctgatgtgtcttaggcaggagacacagagagacctacagctgcaaatgcaaaggaaaggccctgtgaggtcccagtgaggaggaggctgtgaggttccagtgaggaggaggaggctgtgaggtcccagtgaggaggaggaggctgtgaggtcccagtgaggaggaggaggctgtgaggtcccagtgggtgaggaggaggaggagactgtgaggttccagtgaggaggagactgtgaggtcccagtgaggaggaggctgtgaggttccagtgaggaggagactgtgaggttccagtgaggaggaggctgtgaggtcccagtgaggaggaggctgtgaggttccagtgaggaggaggctgtgaggtcccagtgaggaggaggaggctgtgaggtcccagtgggtgaggaggaggagactgtgaggtcccagtgagaaggaggaggctgtgaggtcctagtgaggaggaggaggaggagcctgtgaggtcccagtgaggaggaggaggagcctgtgaggtcctagtgaggaggagtcttgcgcgcgctcgactggccaggaagaacgtcgctgcaacaggatccttctgcacacgtttattgggagagcttgattgtagaggcgaaaagacctcgagcccagaactggtgctgcttttataggcctaggagggggcgtgtctcacaccttgattggttatgcactaagcctcatttgcatgttcctcatctgattggctactctctctcagtaccttacagaacctcattatcatacctcatttgcatgtctcacatctgattggttatactctcagtaccttacagaacctcattatcatgcctgggccaggcagtgtctttgcaaaaaactttactgcatatgtacacattggttgtttgtccaatcttatgcgtggtggccagcagtagtcagtgccactcagcaacggcacatgtggcttcccacagaggaggaggagcctgtgaggtcccagtgannnnnnnnnnnnnnnnnnnnnnnnnnnnnnnnnnnnnnnnnnnnnnnnnnnnnnnnnnnnnnnnnnnnnnnnnnnnnnnnnnnnnnnnnnnnnnnnnnnnnnnnnnnnnnnnnnnnnnnnnnnnnnnnnnnnnnnnnnnnnnnnnnnnnnnnnnnnnnnnnnnnnnnnnnnnnnnnnnnnnnnnnnnnnnnnnnnnnnnnnnnnnnnnnnnnnnnnnnnnnnnnnnnnnnnnnnnnnnnnnnnnnnnnnnnnnnnnnnnnnnnnnnnnnnnnnnnnnnnnnnnnnnnnnnnnnnnnnnnnnnnnnnnnnnnnnnnnnnnnnnnnnnnnnnnnnnnnnnnnnnnnnnnnnnnnnnnnnnnnnnnnnnnnnnnnnnnnnnnnnnnnnnnnnnnnnnnnnnnnnnnnnnnnnnnnnnnnnnnnnnnnnnnnnnnnnncctgtgaggtcccagtgaggaggaggaggagcctgtgaggtcccagcgaggaggaggaggagcctgtgaggtcccagtgaggaggaggctgtgaggtcccagtgagaaggaggaggagcctgtgaggtcctagttaggaggaggaggaggagcctgtgaggtccccgtgaggaggaggctgtgaggtcctagtgaggaggaggaggagcctgtgaggtcccagtgaggaggagcctgtgaggtcccagtgagaaggaggaggctgtgaggtcctagtgaggaggaggaggaggctgtgaggtcccagtgaggaggaggctgtgaggtcctagtgaggaggaggaggaggaggctgtgaggtcccagtgaggaggaggctgtgaggtcccagtgagaaggaggaggagcctgtgaggtcccagtgaggaggaggaggaggaggctgtgaggttccagtgaggaggaggctgtatacgtggccatgcaggtgtgtgtgtgggagtgcagttgtttgcagaagcctggtgaaggtttcatgtcccctagaactggagttagaagccgccagattcaaatgctaggaacataattactgttctcactgaaaagcatacacactctcaaccctacagccagctctccagtcccttgaacaacattttgctgtatagatgaactgtgtggatgtgtgcaatcatgtgtgtgtactcacttgtcaagggacatagctacttgttagtttttgtgcatagatttgccatgccacagacattcagcttttttaggtaggaatatgtttgtctagcacaatacctgaaataagattgttgagttacgtggtatctggagtggtgaagtgtttgtgttcttcctggtaatgtgtgtgagttttggtcctccctcccccccccctggacataatattcatatatatttaaacagtttttatcatagggacctttacaggctaatctaattgtgctggtgtctggtcatggctctgggcagtgtaccatggctttcatttgactttccttaatggtcagctttttgagcagccttcatttgcctgtcttccatctctgcctccttgctggtgaagtcattgtgtcttactgtgctttgcatttagagctttgaaggcctggatcccagccaagacattgagattggggatggaataaaagtcgtttgtccttgggagaatgggaacattaggggctggaaaattattagttcagccacaaatagccctttgaattgagttctgcaattggggtctgtctttggtggcgtggtttttagtaagaaaagctagggcttgagcgaggcatgcatttttgccaggctgttaaaatactcgagtgtttctcagggagagtgagatgagagccattgtctgtcccatatacatcctctcatagtatattctggcttagggagcagggagctaacgagaacccaaacctagaagacaggcaaagcaggaaacagtctctgttagtgtttttatgtgttgggaacaggggctcatgggagactattatgttttagaggttgtcttgaaattctttatgcagctgcgctgactacttttatgccaactggacagaaactgtggagttattagaaaagagaaccccaactgagaaaatacccccatcagattggcttgtgccaaagcctatggtacgtttacttgagtgatgtgagggggaccagctcactgagggcagtgccacccttggactagtagtcctggatactgtaagaaagtaggctgagcaagctacagggagcaagcaagcctgtaaggtaagcagcactcctccatggcttctgtttaagttcctgcttccaggtttctgagctgacttccttggatcatgaaccacacatctgattataagatgaaggaagcccttttctccccaggtggcttctggtcatagtttcatcatagaatagagacacgacctatcgtagacgttggtaccaggcagagggggaattgctatatagctctgagaagactttagaactttggttggagaagccattgagttttcagagcttaatctgtgggaacttggaagttgagaatgttgagagtaatgttacaatggaggcctggcctgtgaagcctcacagggaagctgagagtctgttgtaaatatctattagatcctttgatttatgacatcatttaactgtttattttctgtctagatgacctttgtatggcaagagcattgccatatattgaagtaaaaaaacggatattgaagcgcccactctcactttgtgagcctgggtgattttgtgattgttgcagatgtacagacttccaatcttctcttggtgggtttttccttgagcatggagtgtccttccctatcttttctgatcagttttggtaatttggtttgaagcctattttgtcagatagtaacatggctgcacctgcttgcttcttgagtccgtttgtttggaatacccttttttatcctgtatcctgaggaaatgcctgttcttcatgtcgagctgtgtttcttggatgcagcagaatgatggatcatacctttttaatccaggctgttggtctgtgttttttaaattgggaaattgagacaactaatattgagagttatcaatgaacagtgtttactggttatcattactgtgttgtatggtgtgggtttttcattcccttcttttgatttactattctggggttatttattccttgtgtcctcttggtgtgcaattaatctcttcactaaagttttccttctagaactttctgcagaggtggactagtagataaaaatagcttaaatttggttttatcatggaagttgttccccctcctctctggattttgattgatagttttgctgggtattggttggatctgtcatttgtggtctctcagagtatttggtatgcccagtcccttctggccttccagatcttgagaagtcaggcgctattctaatggccttccttcctttctatgtgacttcatcttcttcccttggagcttagagatgctttgtttatacttttcatttagttttttgattattatgtgtcttgaggaatttttttttttttttttttttttgggcctggtctatttggagttctatatgctgtttttaccttgacagacagctccttctttaggtcggggaatttttttcttctgattttcttaaaaatattttctgtgggcatttgagaaatggctcagcatttaaaagcactgtctgttgaggtcctgagttcaatccctagcaaccacttggtggctcacagccatctgtaatgagatctggtgccctcttctggcatgcaggaacacatgcagatagagcactcatacataaataaatcttaaattatttattaatatatacacacatacatatgtatatatatattttcttttttttttcccttctgttcctttgacctggatctctccttctgtccctattattcatggacttggtattctcatggtctcatggatttcctacatgttttgtgcctggatttttttattttttaaaagatttaacattttatgactgaggcatccatttttttgtacaccatcttcagtttctgagattctctttttcatgttttataatctgtttgtgaagcttgcctctgaggtttttgtttgacatcctaaatttttgattttcaatcttatttccatttgggctttccttagtgatactatttctttataagttctaatttttatgtcttgaaatgtcttcattattttattaaactcttagtgttttcatgagcttccttgagcatattcataattgctattttgaagtctttgtcttgtgcttctgctacattccattctcagggcctactccagcacagttgatggctttcggaagaggcacaccgttctggcagttcatgtttgtggttttgtgctgggaaccaggcatctggagttaggatgtataaggtgtttttggtgtagatgtctggccttgtctctgttgggtggatgtttcattctttggttgctgttgctcaccttggatcctaggcaagttggtggctgtggtgtcccagttgaagggtgcttctgtgggagtggatatggcctagaagagaagactgtgtcccagcccctggggagccctggctacaatgttcctattgattgttggctgacacaaggaatggcgatggtttgaggctagcccagtgtagggcttctgggtagaaagtatttctaggggatcaggggctgacagaaaggaatggaggaagaaagaaggctaagaaggttggtggggaagagctaggctgagccccctgggaacggaggttctttgagaggaagggctcctgcaagtaggctgttaaaggtcttagagtgagtctactttgcatgtttaaaaatagtatgtcctagctggtacttttttacactcactcataggcacctgtgggcttatagatgacactttaaaggagaatcttaaaaagcaaacatacatatagaacaagttcaaacattcatattccaccccttgccctgtgtgtgtgtctttctgtctgtctctttctctctctttccctgtgtttgtgtctgtttccatctctatttgtctctttctcccccaactccccatccccttcagtctcatttaagtgaggaaacccagagcttacttagcccgaggtaagcaagtgccctccctgagctagtccctagccttttgtttacactttgcaagcatccatgcagaagcctgcaagttcaagtcactgttcttagggcctcccaatctgcctgtggtgagagcacactcagagaagcatctccttctctctggggctgcatgaggaaaccatttcccacctggtgtaagaactgcttctaaacactaagtagtaacacatggctgcttcagtgttcagtgttcagactgcagcatgaccttaaagaaagtttaattcacttgtgggatgatctaggccatccttagagatgcactcgatgatctgtcttagaagtgatgcttgcgtggtggaccagttgctgtgatggagacttcctgtcttatccctcctctttcttccgagccagcattctttctgctaagactttctaacccatcttttttctcttcctctgtcctaggacccagggccttgagcgtgctcagcaactttgtaaccactgagttataccccaccccttcttttttatattttattcaatttgtttcagactctataggaggttactttgttcttgttctataatacaaaaatcagtttaaattttatttaatgcttggctgagttcactgtatgttatcccaggagaggcttggtgttggctcccgccttttctacttaatattgtgtgtggattagtcacacttctcaaggccatggctttctgagctggaagaataagcctggattcatagtattgtgggcttgatccatgcccatagaagttagtgaagtttaccatggcatatattgttaccagtgcagctttcttatataatgttactgaaggtactcaaaccaagggcaactcttctgtattttgaaagctctttacttggatgaagtctcaagaaaactcatgagactttcttccccagtctagttctttctgtggcagtgaccaacggtgcaggtaatgagctatgcagtcaaggaggctgctttcctgagcccatctagtgcagtcagttataattgttgagtaaaagtaatcaaagcaggtgtttcttttaagttttcccttccattgtacctttctaactgttctctttgaccagccttgctttctgaaaacatggtgtggttttcattggaacagatttcagggtcctccattctgtgtaaaaagtcacctgtgggccttaggggaggttaagcacactggcatatgagaatcatcatatttgacatttcccatattttgctggttactcttactgtggccaggtagcggagggcacagaaactcttgatggcaaatagatttctgtcagaggcagcagaggaagacaggaggagctggaagttcctgcctcctcctttgctgtcctttgcctgggacactagtcttttgcttggattaccccattccttctaaccccccttttaaaccttatttatgtagactagccatgctggaaacagcctgatggggctctgggcttgatcctcagcaccaaaatagagacagagaacaaaacagcttgataaaccacaaggaactttgaaaaccaaagaagaaagcaactaaggaaggcactgtgagaagcgcccctccattgtggttctgctcctgagactctgaagaagcgagtcactcatgtcttcccaacagctgagggagggaacagctggcttggctgaactttgcctcccatctttgatttgaagactctttctcctattgtggaatgaaagctgtcttctatcaggactgaacacagtcagatactagctaaagtggaggaggcttccatattcagtagctagtgacagcagggcagaggctggctctattttgacacatgtcaataagtgacaaaacactttttgttataaaatgcttactcatcattttaaacttagaaatcttttatacttctaatagattctcctatggcgcaattagaaaaccagattttgggaaaattcaaccatcgtttttcattaataaagtcatcccacctctgccttttgtctgtccccttttcttcttgctgtctccctcatgggttttgttcttttccctcatgctctaaaattcaagaacttgccgagtctgttggcagctgtattgactgggttgtaatttttaaagaccatggaacaacattattttggttgaagggcatttaaatgaatggagggcgaacaggccacatcatattataaatccttataaggactttaagtttcttctggaacataatgtgatttgtcagttgtcaccctgtgtgaattacagatatcatcaatcatgagagagaaaaattcctatttaaatgtttgatcatttgtcttaagaaaatgtgattccccccgccccacccccccatttcttttagagtcagagcctgataagcaataatgagttggattcccactggcagcaccgaccactggggagtgttcatgagtgaaatccaggttgacttgtcttagattagatgctgctcacacagcccttggggttcttgagctccaaagctgtggtgttgatgggcagagggcctgtaatgaaatgcatctctgtttgttgcatttcctgtgaagtttccctccttctgttttcatatgtatatcttttcttgttcttgatgagaacctaagtgaaaaagaaaactgggtgttccttctatgggttcttcaatgtaataaaattgcattatcccagttagatctgtccacatatgtatctttaagaaaaaatattattttgtgaattacctttgaattactttaagattgtttcttgttatgtggtgttcctaggaaatagattcctaataatggacagcttttataaatttacccgctgagagagagatagatgttagcttgtaatatcgttgtcactctttgtctttgattacatttctcacttggctgttggtttttgctcaagttttctccttggagcctatttgaagagcgtttatatggaatgacagaaatgcagtggtgcaaaaatgagggtttgggtaggacttgaactttatgagattcaagtgattaaagatgatttctttattagcagctaactataaacagtcttactacgcttctttttgcttttcatttagatagctcttctgctttttctctttctccatgcctccctcccttccttccttccttccttccttccttccttccttccttccttccttccttccttccttccttcttccctctctccctccctccctcccttcctttttattttttcagtgttgagatggaatattaggaagaatttttaagttgattttttttcccctggttccacttcacatttaagtgatatccttggctactaaaagaggaagtagatatttcctcatagcatcattagttggcaaaatgttgattctcaggtgcagtgcgtcttttgtgtgaaggttttagaagacgctgagagcaaggaaaacatttaagaagaggagtttccttggcttaggatcccattcccttttgcttccctcaagagtggttgcttactgatgtcctctgaaacacgcgcacccgtgtatttgtttgtctgctctcgagttcagtttccccgggtttcaggatttcccatggtctgactaatgcaggccccatgaagtctcttgacatggaggagtactgctgaattctgactggcagcatttgaatcactctgccaactaccaaagttttgccacaactctgtttgttcaccaaatcaattggcatcccagcaaccttatgtatttgttcactttatgttcatcttttctgtatgggaagtcctggggggaaattttgagctaaggcctttctgttttcttttactgtaaaacccagtaatattcctgcggaggtttggctgggaaagactactgtaggctcatagagttgaatactgatctccatttggtggaaatgctttggaagaattaggtatggccttgttggaagagggctatcactggcagtcgggtgggctttgaggcttgaaaagctcatgccatttcagagagggcacccccatcttctgtcttggcctctgcctctctgccttgtgcttgtgggttggatgtaagttctcagctacagtgcctagcctgcctccctgccaccatgctccccaccatgatgatcatggactagaaccccctggaactggagctctaaactaaatgcttgcttttataatttgtcttggtcatgatgctttttcactataggcagacacatggggttggtgggaggcagaagcaggggaaggagaaagaaaaattgtgtgtgtgtgtgtgtgtgtgtgtgtgtgtgtgtttacatgtgcagtggaatcttgagttcaggctggtaatctctgtgttctagtccagccacttacagttgtttataatgccttctctggcacattttccacactttatgtgtgagaacagactcacacatttatcctcaatagattttcctgtttgcttaatgaaagggaatttgccttgaaagacctcccagtcatgatgctttctccgctgctcgatggccctgaagctgcccacgcctgcccctgttgccatggctctgcacagacctaacagcttcctgtcttcatccatgccagccattaggcgccaactcatccatgctgaggacagagagagacgggatgagaagaaacgacagagtagaattattcaataatcacagagactcctctcagccccattacattttcttgaaaaataactacttttatggcagggtctctcttgttacaagcccaggctgttgttaaactcagtgtggctgaggatgaccataacctttgatctgcctgcttccacctcccacatgctagggttacaggcatgtgtcagtttatttaatctagctttattttctttcatattcatccccccagccccccccccccccaagtccctataggtcttgctctgttgcccaggttgaccttgaccttgtgatcttcctgcctttgcctacaaactgctggggctacaggcatgtactatacacatgtgtagtgttttaaaataaagctcacccacgcatgtctgtaggagcttgtaggagcttgagactcacaagcagctcactcatcctggagttggtcctggttactgttttcacagaagagaatcacagaggtcagattcctttcccaaagaggtcgtgttctagtagcctgctgtggtccctgctttttagagagcttggtgtggttctccagctttagaaagagtgtcatgtatgtatgtgctgcccttgctggcccagcattgatttgtaacactgaggtgagtctgttgtttggcttctttactgtaatttctttagcatgctcaggcatacaaagtcttttcttgatactcagtttttagcatcagggtcttggtcaagaacatttcacagctttaagtgttttgtaaaactgaagtatcctgacctctgaggatagaatccgtttattctttgtttcttttttctttaaaatgcattcactccctccactttttaaatatatcccgttcctcttcccattcagttcccttcagtaacagcagggcccccagggataccaacaagaagcaataagaccaggcacaaatcctcattgcaaggcaaccctgtaggaggtaaaggtttccaagagctggtgaacaagccagggacatcccattcccactgttaggagcccttcaaaaccccaagctaaacaaccacagcttattgttcagtctctgtgagccccatgagccctgcttagtgacagtggtgctccacacctttaattccagtacttgggaggcagtggcaagtagatctctgagtttgagaccagcctggtctacagagtgagttttaggacttccagggttacccagagaaactctgcctcaaaaaatagacagcagcagcagcagcagcaacaaaaccaagcaagcaagcaagcagaattcatttctttacaaggtacagactcacggtgttacccagggtgacctcagactcagcagtcttaccaccgtgtctcctgtgcttataggcatgcactagtgtgcttagctctgagcccttctgggtttcagatgtctgctcttaagcttttgcctgccccaggttggtgaataaccttttgtttatgttctaggtagtggaaaacttgccttagaatagtttaagcaagaacacttttgagtgaggcaggttatgctccaggctatcctaagctacagtgtaagagtcttggagacaaaaaggcttaaggacagagaattttgaggtgactacagtgtgatgggcaaggggcaggagctcaaagtaatgtcctgggctctaccagtgctcgggttgggattttgtgaaaagttattttaaactatcctgaagtcaaattgaactttatgacttcattctgaccagcagggattaatttacaacgtaaccagtgacggactggtgcatatgtacatttctaccctggagatgattatttagctcaaggggctgagtttatgtcaaagaattatgatcaaataatttctcattaaattggtaagcatttgctcggaagtgtccttaaacagttctcttgaacaattaaaataactttattgctctttttatgtctgccactaaacttgagaaactaaatcttacagaaaggaggagatgacaaaatggcaggtcagattgtacaattatgtaaatacaagcccatttccctcaagaagaacgacataccttttaaatgagatcagtcaacatgtctcttacaattgccttcattgggatcatgaatatatattttttatttttgaaatagtgcagttttattccccttactaacagccctgtctgtgagtgaataaatcactagctgctgctaattctaagtgctcgtaatcactaaacaaagggtactcgagatcacacatgctgtaaaccacacgtggaagcaatgccttttatcatccacaactttaatggaaagaaaacgttaatttagggtaatgaaatagacctctaagtatgattggtgaatagaccattaggttaattaaaatgagggtatgcatcattgctatggtggagcgaccagcatgcaggagacagattcatttagtgcttgaatagaacaattcagagctagtcttcctccccactatgccatccccccgcccccccccccccaaaaaaaaaggaattgcttgggcagtggtagcgcatacctttgatcccagcactcgggaggcaaaggcaggcagatttctgagttggaggccagcctggtctacagagtgagttccaggacagccagggctacacagagaaaccctgtctcagggcagggggtggagtggggnnnnnnnnnnnnnnnnnnnnaataggcagagtagtctccctgagccaagatttactacagacagggcaagagcgatgacaaggctttttgttttttgtctcatttgcctttacctgtcattgtagagagcttgccacataaaggtgagagtttgtagagcctttggaaaaaaaaatcaattatatataaattcctctgcacatcatagcagatgaacgaactacaaaacaagactaagctattgtgacgtgctcagattttgtatcgaaagactcaaaaggtcagatatttaaaagttttttcggtttgatagattaatgcatgtctcagcctgcagcagacaagttgtacaatggatggcagttagtacaaaacctcataactggtggaaatgcagagaattagggtctgtggaatgcttaaccacagccagggctcagggaaagttagtgagaaccagaactcagggcatactggaccaaatgctgtcttctagacatgagggagccattacactcatgaacccacagcagctgtagtcgtctgtagaagaccacacaagctcaagctagtcagcactccagtgtggagggcggacagccttaaagtccccttcctttagactgttggttgttgacagcttcaggggtgtgtgtgtgtgtgtgtgtgtgtgtgtgtgtgtgtagggggagaatcagttttctttcctatacatatacttagatgtacacgaggtatctgaatagttgaaattatacttggtgtatttaaaaaaagagaggatacaaaattgggaggggatatggggtaggtggtagatctggagaaaaggggtgaatatgataaaatctattgtatcaatgtatgaaatccttcaagaattaatataaaagtattatattaaatatttattgctttctaaaattgcaatggggatgttgtacaatttcttagcctcaaactgaccatcagtgttaacaccctgcccccttcctcagccagggctcagggaaattagtttttttctgtgcctaacactcaagactaactagatggtgtgttagctaggtgaccaatttgctgattgaatttactgaagaacccagtacttcactatagtatatatttgctctttggattttctttatttggtgttagctttttattttttggtctttgattcgttattctcaaatgtcttagtgcagtgctgaatggaagcagctattcagtgagtacttctgcttcccttaggaaggcttggatgtgtttaaacaggtactgcggtcagtatggtctttagttatcatctgcctccccaggatatgcctaacttaatgtgttaatttctacttaggtcttttatccaggaatagatcatgttgtccaatggtcatccagtctgcccttccccatttgctttttgtttgccatctgaggatggctgagtaaatgttccatcagggtgcctgaccttgtaaggttgctgtgtgatgttgtctacaaagcatggtgggccacattcatagctatcctaggacttgtgcagccctcaggttggatatacgtatgagtggtcgtaaagcaaatgatgataaacctaatgaatgacttgtatggtcagttaaacaagaactggttctgagcccagtatttcacgggcactttctgcctgttaggctttcttgggaaggctatagagattaataacggaaccagctcctctgactctgtaaatcagaatttatggagccgagattcacttttcttcttccaggtacttagttttgagaaagtcttctgtcttgtttttgctgttctagtctgtccgttttcctgtaaatgacgtcggaggcatttaatgagtttacaaaaacatatatatttaatagtttcatgatatataatattaacttagcagagcttgatccagtaaaaatttaatgcgtatattagaagtgaatgcttactctgtaaatgaattcacgttaggatttttataagtcattgacttagacatttagcaggtctcatttctgtctctttttttttcccagtaaggctcatttaaagtgtttagcaaaaatgaaggagttggaaaattttgttgaaccttagctgggtcaaaacacacatacacacacacacaaacacacactatgaaggcattataatctctcttgttttcaggattatactttcttggtatgtttctttttacatgtgatctttcttcctaagtcttcatcttttacttcctcaaggcttccctttacctgagatttaattttggcacatcagaaataggctcaggctcagtctcaacactgtcactgttgttagctagctcttttgcattcccaaggaaatgcatcgggttgatttgtgaatcagttacagtaatgttgagtaatgttgaaacagcagcaacaaagggcccaaactttcccattcatcccccatgtttgtcttgggtttgttgggaactgtattctgtgttgtctttactctaggcctcaggctgcagccatcaactgaaacaaatcttagacacaaagtgtcgaattctgacttatgcaccttcaatttagaaagagtagatcactttatctcacttttcatggtcaatgaggatacccgatgaatgaaagattgatggtatcaagaaatccacgccttccatatttggcgggcagcactttcaactactaatatacttagcttctccatttaacctcacttcagagcccattctttcctctggaccacacacctgtcttgtcataggagataggaagtctggcaggagggattgtctccacactcaggtgaaatctgtagcttctgatatgtgcagtgtgctttccctacaaggcaaggctgagccatgtgacctgatcagctcctggaatgtagataggcctgaagtatgccagcctggaatagactctttgaatggagttggtgggctatgggttgaattcttgcatttttgtcctccgccaagcacacaaaatgtcctaggtagagactcctcccttactgtgaatgtggtatggacatctattgtgccacaccactgtgagcccagagatgtgactaacaacaggagctgacttgatatagcagcaggattggaattagccagcctaggcgtgggtgtcagctctgctaagtttgcaatttggggtaaacttatttaagttttttgaggctgtgtttcttgtgaagtgaagataataaagtctctgacagttctgacatgaagattaagttggacggctttaacagagagcttaggatagctctcagtatacagaagaattcactgcacgtcactttcttttcctttaattgcctccttaacatatgttatttaaacacatggtttggaaattcccttagtaagcattaattgtgagattagaattgggtaaaatggtcttcattatagtccagttgtaagaatttctttctcatgctgctcaaaatgtgctaataactgttcttttcttcaaatgagagaatagtgatgattagttttatatttggcaagattacaacatacctctgaccctttaaccattttaagaggaactgctctgcttcttgagtagttaggtttaatggagaggcctactgctagcatgacccagtctcctccatgctggttggcctactgctctgccatgaagacaacatgtaggcacacatacatgcatgcacccccccccccccacacacacacacatgaaaagaagagattagggtggagagagaacaggcatgcagagagagaggggactgagggtttgaggacatggaggtttgtgaggcctgtgtgatttgggatattgtcaaaagtgaaatccgtaggccatctggaaatggagacatggctatcttaagcctagactttgttgggaaggctcccttgctggtacagagtgtcacattacagtgctcacgcttgcttctgctcttacccttcagcttgttggatgagtcatccacaccttagcgctttcagagcagcacttaagtcagtgtttaactgagtgaccagctgacgtaatcagtcatctaacagtgaatgtgatgatttatccccaaatcttacctgtttcttttttttaaagtctaagaatatttaatgtttttggaccatttcatatacagtgtatctaccctaagttctcctactctatctggaccctcctccaaaatgttctcgttacctttattcatccttcccaactttaaaacagcccactgagtccaattagtgccctccctgtgcatgtgggcattgggccatccatggaacacaggcaaacactaccatcaacctcactcctgagggaaaataacttctctccattcagcagctcctcagctagggtggctaataaattcctatctattgccacacactccagtcgagtcagtttgacaagctgagaggcttaaaagctactcacaaggcaaaagagtttcacagaaactcactcctggtgtctggcattctctctaacccatacattaatattccatttccgagttagtctagtgtatggatctacgtgctttcttttagtattatcctattataagtgccttttaagattgaattctgacataggtaaagccagtgttccaacagtcttagaacgtccttgagcaagaccatgggcttgaaattcagtaagaatgttgctattcagtgacatttagaatagcctctggtactacactatcacttaaaataaaagccaagtcgctcccatatacaggaatttacaatggtttaggaagtagattgggctgtggttttagagtattgcattattcatgagatggttagctagaacggaactccctagttagaaccatgacttgggtgtgaaagcccttgccccggagtgtaaagacctcacacctggcttctaagactatagctgaccttagatagggctgactctgtctcagttattttattgcccagttcctgccagtctttgtgttttcattcctcttttctgtgtaagagtcattaagcatccggttacctcatttgtaccttgcgggtatgtcacccaacttccttattgtcttctctataaaaagtctgatgctcgatttgacaaaatacattcagattctacagaacctctcctgtgtgcatctgtctgtcaattcatccgacgctttgcccacccacgactagagacccgttccacgcagacaaagtggcccagagggtctgctgcaatctattatgaagttaattccttcatccgtttggagtgtttgttggccatggttctgtgcaggtaatgtcatcctccgcctcctcccttgttgcctcctcttcggtgatgctctgtgagttcgaggagattgatggcgatttcccaattagtgcggaccacgtgcaacagtaacttattctcagccatttgaccagttgtgagcctgaagtaattgctgtccttggccaaaagaagcttgtcagaccacggctgagaccgcaccaatctgtctgtgtcctaagtgtagtttctactgttccctctagtgtttccccgtgttttggtcatattattaagatctgcagctgtgggagctgcttattgtacagggggagatcaggagctggctttcagttgtctgtgtgatgcacctttcccagaaccatttgttgaaaactccatgatggctgtgctgtgtggccttaacttaaaaccaggcatggtgatgtgcctagcagcgtgaaagcgttgtttttgctcgggagtgctttgcctagctaaatgcatttatgcttccatatgaatttcaagattgctttcctttgtctgtgacaagtgtagattggtattgtagtggatcttgagattgcttttggtaggatggccataatcgcaatactcattcttctaatttcctgagcatggggaatcttccatatgctagtattttcccaaaattttcttcagtgttttaaagtttttattatggagttttgtcatatccttatgtaggttcattataatatggatggatggatggatggatggatggatggattgagacctttggaaatgggattgtttctcagtctggttgtcattggtatacaggaaggttattgatttctgtatgctaatattttatcctgctgctttgttgaaagtgctatcagttataagaattttctagtggagtccttctggtctcatattcagactcacaccagcaaacagaggtaccttgacatcttgttttcctattttttatctcttttttcttctcctgtcttattgctctagttaagacttccagtactatattgatactagtagagaaagcatcttgttcctgattttagtgggagtgttagctataggcttgctgaatgtaatctttattgttgagatatattccttctatttcaagtttcttcaggatgttgggttttgttaaaagccttttctgagtctattgagataactgtgtgatttctgttctagagttaaatttatagcctatattaattcattgagtcacccctgcatctctggaataaagccatcttaatcatagggagtgatctttgtgaagtgttctagtgtggtttatgtcatctgtttatgtcatatgtttatggtgtctatatgcagtactactttggggttgtgacactttgggaatgtcatgcttagttgatggatatgagccactcatcttaggggttacagcttcactgtggctttggcctcagttctcccttctctggtgtgccacggtgtgagcaaggcacaagtttccattgcagtgggtcaggctggaacagcatgccttcttcaccatggtaggctttgttacttgaagcagagagcccaaagtaaccctctccagcctagagtagcttttctcagtactttgtcatagtgcaagtggctaatgcagatggcgcggctgccttgttacccatagttccagtatagctgttttctcaggcctgaaggagaaacttcagaatgacaagtagtttgttagataccaggataatggggatagaaacgaaacagtagatagtctactgttgactggcaggtaccagcagaaaagacaaggacatgtgtttagtgtttaaagtgttgacagttggtgagcccttctaagagctttgatgggttttcaggaacatccctgcatctcagtcagctcctcctttgagagctgaaggctctgcagactctcagatggcaagacttctgaaactactgagtggataatcctttcatgctccctgtcttctgtaacaggttgaatatgctactgactgggcttcacatctccctttttaaaggatgccttttaagaatctgctaattcagatctttagctaggccaggcttatggcccacaggctgattttccttaaagaacaaatgaacaagcaaacgattacctttagattgagctttgcagttgacttgtaggtgtgacttctgaagtctctgtagtttgatttatgaccaaagtgatagcattaattttacaagtgcttttaagctatgtgttctttgctcttaggacttccctatgaaaaatgaagaatgactctttagccaggttttattgggataaagatcaattttatgaagcctgacgacttcatattctgaattttacctgagcaatgttccagcttaactgaatggtgtatcgtattgattgactctctcatcagctacctttattgattaatgacacagataagaaagatgtaccttgttgtatggggattagacaggaaactacaagcccttcatatctcagacagctaatataagtctgtatttatgaatggcatgatgcatgaaagagaaggaaagcccagggtttagttacgactggggagaagtagggcaaagggagagaaagccttgtggtgatctagctttgaaaggaggggcagctacctgggtggccagcaagcctttgatgctggccagcgagtgagtgtgctgaccgatggctttattgatcacagtcaactctggacaggtttgaggatgtgcacttttcctaagactacaggcaattcttgttccttcaagcacctccaaacagagtctgtgtataaaatactgcggagcttcagaggccgtcagtgctggctggtgccttccactgcactgagttagttagctgcttctggaatgctgtataaaccaaagctatcacagtcagtccacaaagcatactggctaggaagtaagaggagactcttggagaattcatgtttaaggattaaaaaatgctgctcatagcaaaagatagcatggtcagaacttggcttcagggacatgtgtgtctgagtgttggatactcttgctaggcaggctctgcaaactgctgtctcttctgcttactagggacagtgacaggcatggttgagtgaggtagtgagaataaagctcgacacatggctgttccatgtccattatcttcaggatggtgacagatatgacgacttccaattgtcaagctaaatcaaaacatttcagagtggtggatggtttctgaccagtttgaaagaataagaggtaaatgattaatacaaaacctatgcaagtgtaaaagtcttaatgtagcagaaatcttcctgaaaattaagagtacgaagaaagctgttcggtagtctttgagaataatttatctgtcaacatttccagtactgtccatttggatctaaggttttgacttttgctttgtcctaaaacctttgaatcaatgctgtcttttctcactactgttttatcctccttgataaaaggctgttgatcttcagaacaccagaaacaagaaaaataatactaactcctttcttaccaggttcctgaactctgaataaccacaagggagcccggtgtgccaagcactgctttgccctatctctgtgcacagcacctttaaaccatcacaactccagtttttgagtaattagtgtattccttgtacattattaagtactgttttgtgttgattaatttaatttttaatagaatccttgaaggtgcatatatattagcactaggtttcttggtccttgatgctattatgccagtggaaactccgagaatggaactgagccaaacaggggaagattatcgagtggaattcatgattgcattttcccaagttcccagaaaacaaaggttgttggctaacttggggtcttaatttgctcagggagagagactcctgtggaagggatgtaaggacaggtcacaggcaaagcgtattctgcttgttggttcaggagctgcctgttattccattcagactgggtgttaccactaggtcatggtgggttggagtctgatgcctgtgtagaagggcctgtgccctgcatgtttattttctgactgcagttgaatcagccagccaatcccaggactgtggccagtgcttttactgttagcatcctgttgagcccatgtttattagttaggtggccccagcttgttgagggaagacagtgaagcaggtgtcctgacgacagttggatgacgtgaccctaggcttgtcctctgtcacttcaggaactgttaagcttgtttttcatgtgaggaagttgaggttagtaactttactgctgtttgtacccatgcaccctgtgtgccccatcactgagacggctctacagttgggaacgttatagggaaagaccaaaagcgtgtgagcatttgttgtttagagctgtgcagcccgttgttaactgctttgtgccagcacactagcaatgggaccatgttttttgggatttttacctcttattttggttactgtgaatctaagtgcctaggaaaaatcttgtactgtagagtctgctcagaagcagtgacctcgagggtgaatagcaggaaataagtagtagtatgcgtcctgggggcattgggacatttaggtgagttaattcagaactgggttttgttggaagtgtcctgattttttttttaccattccttttgaatatcttgtaagtacattttctttttcttttttatagcaagtattttcttgtgatacttgtcacaactcagaactcagaaccccaaataagacacatagggcacattggctaaaaactgtgtatggcatagttgggaatatagctcagtgggaaatcctttgcctagcaatcatacctcctgggtttgagctctagctttgcaaaacaagcattacaatagaattacggggttgcttttgtgaaaaggatttttttcctcaagtacattcaaagtaaaagctcctggtctgaaacagcacttagtcttctcccagggttacttgcttcattctgaacttcagggtttcacgctaggtttatcacagtatttgtaagccctgaagcagaggtggggtagttttgaggcaagtgcctcatggagagacactggctagtcaggcagtgatttcagtatcagcagttttgtgattattatggtgtgtgtttattgctggcagttcgtactttttacaaagagcctgtttaactgcttctcctcccaagtgaagagccactagcccgagtttccctctggaagcggtttctgcagagcactgtacttctggcacattcctttccagccttccaaagtggagactttgaaatgagaagtgtcatgcaaggtgaactattggtattttcacagcaggcacattttaccatcttctttgtaaaaacactattgaatcacatttatggttttgtcacttttacaatgagaacagatagtgacatttaagcctaggaaaatccagtctctgatatcgactgttaatgtggatatcttgaagaagcaggtagaacattgtgaccttatgatgtgaattctttaattagagcatacagatcagtcaaatatttgacttattgatttttggagaaccaaactgttttgtatgcaaggtatgaacattagtaggggatgctgcccttgattcagaataaacagttagtcaaggtcttgtccagagtaaataatatacatttctactattttagtgtacactaacagatataatcggttacctcatttatagccatccatttaaagtgatggttggtgtttctagcaccagttgtctaagatagcattagctggtaactatgtacgtttaaaaatacagcatatccggggcctagcaaacacagaagtggatgctcacagtcagctattggatggatcacagggcccccaatggaggagctagagaaagtacccaaggaactaaagggatctgcaaccctataggtggaacaacattatgaactaaccagtaccccggagctcttgactctagctgcatatgtatcaaaagatggcctagtcggccatcactggaaagagaggcccactggacttgcaaactttatatgcccagtacagaggaatgccagggccaaaaagtgggagtgggtggaaggggatggggggnnnnnnnnnnnnnnnnnnnnnnnnnnnnnnnnnnnnnnnnnnnnnnnnnnnnnnnnnnnnnnnnnnnnnnnnnnnnnnnnnnnnnnnnnnnnnnnnnnnnnnnnnnnnnnnnnnnnnnnnnnnnnnnnnnnnnnnnnnnnnnnnnnnnnnnnnnnnnnnnnnnnnnnnnnnnnnnnnnnnnnnnnnnnnnnnnnnnnnnnnnnnnnnnnnnnnnnnnnnnnnnnnnnnnnnnnnnnnnnnnnnnnnnnnnnnnnnnnnnnnnnnnnnnnnnnnnnnnnnnnnnnnnnnnnnnnnnnnnnnnnnnnnnnnnnnnnnnnnnnnnnnnnnnnnnnnnnnnnnnnnnnnnnnnnnnnnnnnnnnnnnnnnnnnnnnnnnnnnnnnnnnnnnnnnnnnnnnnnnnnnnnnnnnnnnnnnnnnnnnnnnnnnnnnnnnnnnnnnnnnnnnnnnnnnnnnnnnnnnnnnnnnnnnnnncaagagacagcgacatctgggtcctttcaataaaatcttgcaagtgtatgcaatggtgtcagcgtttggatgctgattatggggtggatccctggatatggcagtctctacatggtccatcctttcatctcagctccaaactttgtctctgtaactccttccattggtgttttgttcccaaatctaaggaggggcatagtgtccacacttcagtcttcattcttcttgagtttcatgtgtttagcaaattatatcttatatcttgggtatcctaggtttggggctaatatccacttatcagtgagtacatattgtgtgagtttctttgtgaatgcgttacctcactcaggatgatgccctccaggtccatccatttggctaggaatttcataaattcattctttttaatagctgagtagtactccattgtgtagatgtaccacattttctgtatccattcctctgttgaggggcatctaggttctttccagcttctggctattataaataaggctgctatgaacatagtggagcatgtgtccttcttaccagttggggcatcttctggatatatgcccaggagaggtattgctgaatcctccggtagtactatgtccacagaaacactttctatggggaactcactgcgataggttgcaggtaggtgattttcattctgcttcctggcctccattccagtctccagaattcctcctagtctttgggtaacctacttacaggagctccctcccaccttactgcctacttacttactgccattccagtgtccccctagctcttctggctgcccttctcagcctttcctccaatccatttatgttcctttgtgtcacatgtcaacccttagaagcagactctagcagacatcacggccataacgcttgcctgtgatccagcatgagcaacagcagcctgagaatggagcacccacagatcagatcagatcagatcaggtagctacaacaaaaaccccttaactcttataactccagatgcctcggtccagcacaaaaccacaaacacacacagccaaggtagtattcctcctctagaaaccagtgaccctattgcaataggtttgagaagcagtttagctgatgcagaagacaagctgaagtacaatagcaattatgaatatgttgaagatccttaaagaggatgttcaatgtgaataaatgtatcaatgaaggctgtgaaaacattgttgaatgaaatactgaaaacatctttatgacatgaaaatagagatcgaatctctacagaaaactcaaactgaaggaaaaccagaaatgaaaaacttaggaagttgaacaaaaacctcagaggtaagccttgccaacagatggaagacatggaagagggaatctaccttgttgaacacaaggtagaaaaaaatagatagctcagtcagagaatgtggttagatgtgagaaaatctaggcacaaaacaaccagggagtttgggagatgatgaaaataccaagcctacaaataatacagtgactttcaacccgtgggtcgcagggcgtggcccagcagcaaagcagaactatgatcaggctggcctcatcctggagatgcaggggtgactgcgcatccttgataagtagtcttaatgcaatccaccatgtaaactgactgaaaggcaaagcccatgattatctcagtagatgcagggaagccgtgacaaaactgaacatcctatcgtaataaaaatctggagagacagaggggacattccagaacacaataaaggcagtttacagcaagcccagagacagcatcaacagaaacagaggaacttagtgaatatctactaaaatgaggaacaagacaaggttgtctactctccatatttattcaataaaatatttgaagtcttagctagagcaataagacagctgaaggacaccgagggaatacatataggaagggagaagttaaattatctttatttgcatatagtatggttttatacacaaaagacccttatacctctaccagaaaactttacaggtaataatattttcagccgctgggtatgttagtatacaactttaatcttaacacttgggagactggtgtgtggtgtgcaaatgggtacagctactgtgtatgtatgttgtaagtatgtatgtatgtatgtatgtatgttgtatgtatgtgatggttcctcacaatgcttggagtaaatctgtctcatgaggtgtattatagtacagctataccactcttgagcatacacccgaatgacttcatcgccttctgcagagaacatgctcatccatgttcactgctgctatattcataagagccagaaactggagacagcctgattatagagtagtcaacctggtgcctcactggatgctacacccatactgactagtattcatgatattgtaaggtactgtacatgctaccagaaggaaaggtagtaccaactctgtgacctagaacagtgacttgtgtgttagatatcctggtgcagtaatggcataaatgttgaggagtgtctacccacttcttataattggatttatggcccactctatgagatggaatccttatttatcactgttaaagtgctctagaatctgagaccagatagcccatgaacctggggaaaacctaatactgttattctgctaaaggaaaattgcaatacaattactgttaatgacaaactgatatacctgtagatcaataccttactcaaaccacatcagacaaggctcttcttccagtagatggctgttaacacagagacaggcaactggacagtgtagaaagtgagagactgatgccctacatgggatatcttcatcaaacccctcccctctaggctcaaggatttatgagaaaggggaaacagactgattgtaacagccagaggtgatggttgactccaagtattttctagacacaactgaactgctcacatatgaatgtcaagactgtagtacattcatttcctcctatctagtattttggatgctaaaatagattgagctaccgagatacattaaaagaacctttccattttatcttaagctcaccttaagaagtggtgcacacttttaatcccagcacttggatggcagaggcaggcggatttctgagttcaaggccagcctggtctagaaagtgagtttcaggacagccagggctacacagagaaaccctgtctcgaacccccccccccccccccaaaaaaaaaaagaaatagagattgcctttaatctgtttaataaattctactctgtaaaacaataatgaaggttgatttgtacttgagtgttaagacatttcatcagaattaacttcattttcttgatctcccagccacaccctctaaacatttgaagatactctttctaactctgggtaacctctttgtccttgtgggttgtcttctagccatttctctccttcacaccttggtctgtgtagttggctctgcatttagattccatcacgcattagttgtcttccatttttagctttctcattgttttagtaaaacattcagataagggtgaggggatgagggtggagctctggagtgttggctcagtggttgagagagcttgctgcatttccagaggactggagttcagttcccagcacccacatggtggcttataactgaatgtaactccagttccaggggatccagtcccatctctggtctctgcttgcagtgtatgcatgtgatgtccagacatatatgcaggcaaacagtcctacatataaaatacacattttactgtttttggcaaaggacagtcttcaggcgacttcccccaagcttgaactgtgctcttttctgctttggttgaaccttgtgtggagaattaataggagccgccatgtttcagaatgactgggggaagcccgaaatcccagaattttgacgtagttgctaaatatggctgagatttaataccgaaaaaaggtaattaataaataatttatgtagccatttgctaccagatgttactaaccaatttgttagaactaatgtgtataatatacagtatataaagttttaaaaggttccttggtttcagttaacagtctgttacctcaggtttccattttacggttcagagatggataatttagatattagggatattaatttttttttcttctatccagtctctaatttttttagccccttggagttttaaattccaccttttttccctcctagggagcatctgctttgggaaaggtaatgcacaagggcttgtgggaacgagacaggacagagaagtaaactcactaaagtggtggctcaggctgagggcagagcaagagagtgatgtgtgcagaaggtaaggaaggcagcttgtgggagagagggaagtaaggcagactgacggagagtggatatagcgtggttctctgttgtgtggaaaaccagtggcacaatagagataaaggagagtcacagttggaagagacgaggagggccagtgtgggagaaggctagaaagacaaggaaggaggaagacagatttgccttctacccagtgctctactctgcacacctcttgagatgggcacggcggtctgcctatgttgagagtgaaaagccagcagtgcagggcataccaagtagctggttaatggccacagcatcaagagctaaccaggtcaacaccagctcaagtatagttgagtcaggttatctcattttcctctgaaaaaagccagtcacacactttggtcaggcaatttgtgtgttagtcatggtttactgcacacacgaaaagttggatttcacatactttattcaagatatgaaagaaagcacagctctaaccaagagctgaaagtcactggaaaatgaactttggtagcatccattgtagctggggttgtgatatgctgcttttttatttttcagagggctgccgctgttgagcactttacctggaaacagtctaaaccttctggttctctggcgtcggctgctgttagattgctttggtgtgggtcagagggagagccgaccacaatttggagctattggtttgcaccttgccacagtggacagacagagccacccagccacaggcttgtgtgcaaaacagcaaaatctgtcaagggctggtctttccttctgagtgacagtgtggcccagagtcctgcttaccctcctgtatagtcactaccattcagtggttcctgtatagttactgtatagtcactatcattcagtggtttctgtatagttactgtatagtcactaccattcagtggttcctgtatagttactgtatagtcactatcattcagtggttcctgtatagctcctgtatagtcactatcattcagtggttcctgtatagctcctgtatagtcactaccattcagtggttcctgtatagttactgtatagtcactaccattcagtggttcctgtatagttactgtatagtcactaccattcagtggttcctgtatagttactgtatagtcactaccattcagtggttcctgtatagttactgtatagtcactatcattcagtggttcctgtatagttactgtatagtcactatcattcagtggttcctgtatagttactgtatagtcactatcattcagtggttcctgtatagctcctgtatagtcactaccattcagtggttcctgtatagttactgtatagtcactaccattcagtggttcctgtatagttactgtatagtcactatcattcagtggttcctgtatagttactgtatagtcactatcattcagtggttcctgtatagttactgtatagtcactatcattcagtggttcctgtatagttactgtatagtcactatcattcagtggttcctgtatagctcctgtatagtcactatcattcagtggttcctgtatagctcctgtatagtcactaccattcagtggttcctgtatagctactgtatagtcactaccattcagtggttcctgtatagttactgtatagtcactatcattcagtggttcctgtatagctcctgtatagtcactaccattcagtggttcctgtatagctcctgtatagtcactatcattcagtggttcctgtatagttactgtatagtcactatcattcagtggttcctgtatagttactgtatagtcactatcattcagtggttcctgtatagttactgtatagtcactaccattcagtggttcctgtatagttactgtatagtcactatcnnnnnnnnnnnnnnnnnnnnnnnnnnnnnnnnnnnnnnnnnnnnnnnnnnnnnnnnnnnnnnnnnnnnnnnnnnnnnnnnnnnnnnnnnnnnnnnnnnnnnnnnnnnnnnnnnnnnnnnnnnnnnnnnnnnnnnnnnnnnnnnnnnnnnnnnnnnnnnnnnnnnnnnnnnnnnnnnnnnnnnnnnnnnnnnnnnnnnnnnnnnnnnnnnnnnnnnnnnnnnnnnnnnnnnnnnnnnnnnnnnnnnnnnnnnnnnnnnnnnnnnnnnnnnnnnnnnnnnnnnnnnnnnnnnnnnnnnnnnnnnnnnnnnnnnnnnnnnnnnnnnnnnnnnnnnnnnnnnnnnnnnnnnnnnnnnnnnnnnnnnnnnnnnnnnnnnnnnnnnnnnnnnnnnnnnnnnnnnnnnnnnnnnnnnnnnnnnnnnnnnnnnnnnnnnnnnnnnnnnnnnnnnnnnnnnnnnnnnnnnnnnnnnnnnnnnnnnnnnnnnnnnnnnnnnnnnnnnnnnnnnnnnnnnnnnnnnnnnnnnnnnnnnnnnnnnnnnnnnnnnnnnnnnnnnnnnnnnnnnnnnnnnnnnnnnnnnnnnnnnnnnnnnnnnnnnnnnnnnnnnnnnnnnnnnnnnnnnnnnnnnnnnnnnnnnnnnnnnnnnnnnnnnnnnnnnnnnnnnnnnnnnnnnnnnnnnnnnnnnnnnnnnnnnnnnnnnnnnnnnnnnnnnnnnnnnnnnnnnnnnnnnnnnnnnnnnnnnnnnnnnnnnnnnnnnnnnnnnnnnnnnnnnnnnnnnnnnnnnnnnnnnnnnnnnnnnnnnnnnnnnnnnnnnnnnnnnnnnnnnnnnnnnnnnnnnnnnnnnnnnnnnnnnnnnnnnnnnnnnnnnnnnnnnnnnnnnnnnnnnnnnnnnnnnnnnnnnnnnnnnnnnnnnnnnnnnnnnnnnnnnnnnnnnnnnnnnnnnnnnnnnnnnnnnnnnnnnnnnnnnnnnnnnnnnnnnnnnnnnnnnnnnnnnnnnnnnnnnnnnnnnnnnnnnnnnnnnnnnnnnnnnnnnnnnnnnnnnnnnnnnnnnnnnnnnnnnnnnnnnnnnnnnnnnnnnnnnnnnnnnnnnnnnnnnnnnnnnnnnnnnnnnnnnnnnnnnnnnnnnnnnnnnnnnnnnnnnnnnnnnnnnnnnnnnnnnnnnnnnnnnnnnnnnnnnnnnnnnnnnnnnnnnnnnnnnnnnnnnnnnnnnnnnnnnnnnnnnnnnnnnnnnnnnnnnnnnnnnnnnnnnnnnnnnnnnnnnnnnnnnnnnnnnnnnnnnnnnnnnnnnnnnnnnnnnnnnnnnnnnnnnnnnnnnnnnnnnnnnnnnnnnnnnnnnnnnnnnnnnnnnnnnnnnnnnnnnnnnnnnnnnnnnnnnnnnnnnnnnnnnnnnnnnnnnnnnnnnnnnnnnnnnnnnnnnnnnnnnnngtgtgggtcagagggagagccgaccacaatttggagctattggtttgcaccttgccacagtggacagacagagccacccagccacaggcttgtgtgcaaaacagcaaaatctgtcaagggctggtctttccttgtgagtgacagtgtggcccagagtcctgcttaccctcctgtatagtcactaccattcagtggttcctgtatagttactgtatagtcactatcattcagtggtttctgtatagttactgtatagtcactaccattcagtggttcctgtatagttactgtatagtcactaccattcagtggttcctgtatagctcctgtatagtcactaccattcagtggttcctgtatagctcctgtatagtcactatcattcagtggttcctgtatagttactgtatagtcactaccattcagtggttcctgtatagttactgtatagtcactatcattcagtggttcctgtatagctcctgtatagtcactaccattcagtggttcctgtatagttactgtatagtcactatcattcagtggttcctgtatagttactgtatagtcactaccattcagtggttcctgtatagctcctgtatagtcactaccattcagtggttcctgtatagttactgtatagtcactaccattcagtggttcctgtatagttactgtatagtcactatcattcagtggttcctgtatagttactgtatagtcactatcattcagtggttcctgtatagctcctgtatagtcactaccattcagtggttcctgtatagttactgtatagtcactaccattcagtggttcctgtatagttactgtatagtcactaccattcagtggttcctgtatagttactgtatagtcactatcattcagtggttcctgtatagctcctgtatagtcactatcattcagtggttcctgtatagctactgtatagtcactatcattcagtggttcctgtatagctcctgtatagtcactaccattcagtggttcctgtatagttactgtatagtcactaccattcagtggttcctgtatagctcctgtatagtcactaccattcagtggttcctgtatagttactgtatagtcactaccattcagtggttcctgtatagctcctgtatagtcactaccattcagtggttcctgtatagttactgtatagtcactatcattcagtggttcctgtatagctcctgtatagtcactaccattcagtggctcctggcaggatgctctcaggcttgtagaatccccagcgatgcgcctttgggttcaccttgatttgtagttttatgttggaacaattttatctaatgtatcgttcagttcacggagcagaagaaattaatcaatgcgaaatcttagagagcacaaatctccgagtaactaattaatcagacaataagcaaatgtgaaagtttggccttattttttctattagattgaatataagggagtgggagggaggggcagccaaagaaaaattactttgcttaaattagagcatactttaaaaagttttctttggagagcagaaagtaattgtgttgtaagtatgtgtaattatttgcgtccctttccaacctccttgggatcaaattggttttctccaggaaaggcaattgcaagcacggcgccttccacttttgttgaattactgtgtgttgcatggagtgtaccccacaaacctgaaatcagatgtactgctatgatttataatagccattaattacagctttgtattaaagccttttagttttctgcatcagcaagcctaagttctcctttgaagaagagtcacttacattaggtctcatgctaactagtgaatcccttccgtagcagctgatcaaaggcactgatgcacttctcagttagcctgaaatgtgctttcctgaagctcttaaatgttgtgtgatgttgaaatagctgggaagatcctgttctgctgatgagaatccggcccaggtcggggctcagagtattgataaaaaccacgcagttaccacatctatcaacctcactgcacagtcccctttcttactccccctagcgtgcagtcttcaggtcccagctccagctccttagctccccctgtgggcttacaaaaggctcaggttctactcctggagaaggcagtactaagtctaggggtttgtaaagggctccttgtgaaatcaggtgcagagcagagattgaaaacacaagtcccttagtgaattttcatttgaaaaaccaggtttccctgcctatctgaggtaaagagtatctgtaagccagtcaagtgtgcagagccaggtcactgtgtcttttgggcatctttgataggctccttctctatttgggggccagcgattcccttacgtttgcagcatgcccctttctcagtctgatgtatatcagctatgagttctttgctgacctccaccgttttatgactttgttaaaagcttcttgcttctttttattgccttcctgtgaataaagccacattttgattgagaaaagtctaagattagggtaacatttaatcacatacttcttagaaattactcattgaacttattttcttcagatttcatatgcccaagaagcaacttttatcttttttctttctttctcttctcctctacctctttggctccctctatctcctctttttcttttttaaagacagtgttttgataggtagtataggctggccttgaactcgaaattcccctgcccatacttacttagttcctcgtactcattgtttaagaagtatactaggcacagtttaatcttgccattggacttaatgtgtagtactcacttctgttactttgctgtgcttcatctgaatatatttgggaataattattttcacaagtgctcctaaatagtcttgaaggcagagtaatatgctcttgtggtttgaatgtactgtgtctaagttcagatgctgttatcatggtagtgttcaggagtagggcctttcagagttggttagggcacacgggcttttcccatgctggtgaggctaggtgcctcataagtaactccatgttgtatgctactgttcccagggagatggaaacaaatgcctgccgatcccacacaggcacccagcaacaggtcagaggaaggataccacggtgtccagcttggtgaaccagttgtttattggggttactaggaggaatatgtgtggaaggtcatttgcaggaactgaaatgacccagagacagcttcattaccaaagtccaccccaacacgtattgagagctggagacccagggcacatgcacagtctgcaggcggcttggcagggtggagggtgtcctttcgaggcacctcagttggtctagcctcttctaggcaatccagctggtctttccttttcccagatagcccggtttatctgagactatatctcagtagtcttaccattatatatgtttggggagggaggagaactagtgtacctgttcggtttcagggacttctggaagccattgaattgtttacttcctgaacttaacagtgttccttgaaggacagggtgtttgacctccctgtaaagtcttgtgtcttacagagcttcccccttaaaacatcctgcatacagactatcctggacccagttttacaggagaataaaacggaggctggtgggtggaaaggcctggcatcgtagttaccagagctgtggtttcccccacttctgctcattgttgctgagccacactcgtgtgtggaacgacagctagtgcccttccttccagagctgctcctggcctggcccttcagtctgcctcagcatctggcacccagcggctgtgggggagtgggcagtgcatgcgggatgcaggtgcactttgcagctgggggtaagagagaggcaagaggtcctgcagaggttagtaagtgttttcttccacaggggagagtgcagaccaagtggtgatcatatctatttcttctgttctctttcttgttttgctcccagatttgagagagaattcacatgccatgtaatttaaagtttaccattgtgattcttggactcacagagctgtacaggtagcagctctgtcagattcggaacattttcaggaccaaagggtaaaatgtctcagtctggcaaatgcttgcctggaacttcatcccctcctcctcccccagaatagctgccagcagttcctatctgaaactgtagaggcagaactaagaccaaaagaaaaaaaaaaaaaagatccactgacctccaccttgatactcctatccccacttccaagtcctacagaacctgaagcccccagtgccacagcgcagtttcctcctcttgagagcctgcagccttcagctgttctgatgaaaagagtgactctgcttctagaggcgcctgtcttctagctttagtgtgcacacggcccccatcaatcccggtctcatgctgaccctctatgggagcaagcactgatcaatgtcaccattgccttggctttgtcccaccccacatctgggcaagtatcagtcagctgcttctgtataaactcccctctggggacatttccacccacatgggaccatataagtgtgtggttttctgaggttctcttcatgtagcatgctttcaaggttcatacatgactgcattaatatgccattttgttataatgctcagtgacattcccttgcattatatacaagggtggtatctgtggtattatggcttcagtctctctcttcccaaccccttttcagctattgtaactgagtacaattctcctattaacaccacagaccagcctagaacagagaattgtataaagttgagcccctatccacaggtggatggtactgtttactgacttacttcccttcctccctcatttttatggagtttttttttttttttttttttttttggttttctgagacaggttttctctgtgtagccctgactgtcctggaactcactttgtagaccaggctggccttaaactcagaaatccacctgcctctacctccaagtagagtgctgggattaaaggcgtgcaccaccactgccactgtccggcttttattgaattcttgatgtataaaaaaaaccaccattacactttatgatgtaatagctcgaaggacatgacctgtttgttttcttgcagagcatatagtcacgttgaggcaatgaggtaatctgtgtgtcttcaggtatgttacatgcaaagtcaggtttagaggaagagagcagttgctgcttgtgatttctggcagtcagtattccaggttcccaggtcagtggctgtgtgtgtgtgtgtgtgtccctgcacctattcttacctctgttggcctgggtaagatttgtagtatattcaacagagtcctttttgccacttctctcacatattaatttaaacattataatagccattttttgaagttttctagtttaaaactaataagtaatggtttattttattttattagatattttctttatttactttcaaatgttatcccccttcctggtctccctctgaaatctccctccccttatcctttcctctcttcccctcctcaccaacccacccactcccacttcctggccctggcatttccccatgctagagcatagagacttcacagaaccaaggacctctcctcccattgatgacccactaggccatcctctgctgcatatgtagctagagccatgagtcccaccatgtgtatggttggtggtttagtccttgggagctctaggcttactggttagttcatattgttgttcctcctatggggctgcaaatcccttcaactacttgggtcctttttctagatccttctttggagactctgtgcttagtccaatggaggtcggtgagcatctccttctgtatttgtcaggcactgtcagagcctttcaggagacagttatatcaggctcttgtcagcaaggtcttgttggcatctgcaatagtgtctgggtttggtggttgtatatgggggatggatccccaggtgggacagtctctggatggcctttcctttattctctgctccacactttgtctctgtaactccttctatggtattttgttccacctcctaagaaggactgaagtatccacactttggtcttccttcttcttgagtttcatgtgttttgcgaattgtatcttggatattccaagcttttgggctaatatgcacttatcagtgagtgcatatcatgtgagttcttttgtgattgggctacctcactcaagatgatatcctccaaatacatccatttgcctaagaatttcaaaaattcattgtttttaatagctgagtagtactctattgtgtgaatgtaccacattttctggatccatttgtctgctgagagacatctgggttgtttccagcttctggctattataaataaggctgctaagaacataggggagtatgtgtccttattacctgttggagcatcttctgggtatatgcccaggagtggtattgctgggtcctcgggtaatattatgtccatttttctgaggaactgccaaactgattttcagagtggttgtatcagcttccaatcccaccagcaatggaggagtgttcctttttctccacatccttgccaacatttgctatgacctgaatttttgatcttagccattctgactggtatggggtggaatcttagggttcttttgatttgcatttccctgatgacataaggatgtcaaacatttctttaggtgcatctcagtcattcggcattcattcctctgttgagagttctttgtttagctctttactccatttttaatagggttatttgtttctctggagtctaacttcttgagttctttgtatatattggatattagccctctatcagatttaggattggtaaagatcttttcccaattggtcgattgccttttggtcttattgacagtgtcctttgctttatagaagatttgcaattttatgatctcccacttgttgattcttgatcttacagcacaagccattggtgttctgttcaggaattttccccctgtgcccatatccttcagactcttccccactttctcctgtataagtttcagtgtttctggttttatgtggaggtcgatgagccatttggacttgagctttgtacaaggggataagaatggattgattcgcattcttctacatgataactgccatttgagccagcaccatttgttgaaaatgctgtcttttttttccactggatggttttagctcctttgtcaaagatcaagtgaccataggtgtgtgggttcacttctgggtctttaattctatttctttgagctagctgcctttcactgtatcaataccatgcagtttttatcacaattgctctgtagtacagcttgaggttaggaatggtgattccaccagaggttcttttatccttgagaagagtttttgctatcctaggttttttgttattccagatgaatttgcaaattgctctttctaagtctgaagaattgttttggaattttgaaggagattgcattgaatctgtagattgcttttggcaagatagccatttttactatattaatcctgccaatccatgagcatgggagatctttccattttctgagatcttctttgatttctttcttcagagacttgaagttcttatcataccgatctttcacttgcttagttagagtcacactcaggtatttttttattatttgtgactattgtgttgggtgttgttcctttaatttctttctcagcctgtttatcctttgtgtagaggaaggccactgatttgtttgagttaattttatatccaggtaatttgctgaagttgtttatcaggtttaggagatctctggtggaattttttcggtcacttaagtatactatcatatcatctgcaaaaagtgatattttgacttcatcttttccaatttgtatccccttgatctcctttgttgtctaattgctctggctaggacttcaagtactatattgaataggtagggagagagggggcagccttgtctagtctctgattttagtgggattgctttcagtttctcaccatttagtttgatgttggctactggtttgctgtatattgcttttattatgtttaggtatgggctttgaattcctgatctttccaagacttttatcatgaaggagtgttggattttataggatgctttctcagcatctaatgagatgatcatatggtttttttctttgagtttgtttatatagtggattacgttgatgaatttttgaatattaaaccatccttgcatccctgggcagaagcctacttgatcatgatggatgattgttttgatgtgttcttggattcggtttgcctggattttattgagtatttttgcatcaatattcataagggaaattggtctaaagttctctttctttgttggtttttgtgtcgtttaggtatcagagtgattatggcttcatagaatgaattgggtagagtaccttctgtttctattttgtggaatagtttgaggagttttggtattaggtcttctttgaaggtctggtagaactcttcactaaacccatctggttgtgggatttttttttttttttgttagggagactgttaatgactgtttctatttctttagggaatatgggactgtttagatcgttaatctggtcctgatttaactttggtacctggtatctgtctagaaaattgtccatttcatccaggttttccagttttgttgagtatagccttttgtagtaggatctgatgatgctttggatttcctcaggttctcttgttatgcctctcttttcatttctgattttgttaattaggatgctgtccctgtgccctcccgttagtctggatcagggtttattttatctattttgttgattttctcaaaagtccagcttctggtctcattgattctttgaatagttcttcttgtttccacttgattgatttcagccctgtgtttgattatttcctgctctctctactcctcttgggtgaattttcttctttctgttctagagcttttaggcaagcagttaagctgccactgtatgctctctccagtttctctttggaggcactcagagctatgagttttcctcttaggactgctttcattgtgtcccataagtttgggtatgttgtggcttcattttcattaaactctaaaaagtctttaatttctttctttatttcttccttgaccaaagtatcattgaatagagtgttgttcagcttccacgtgtgtggactttctgttatttatgttgtttctgttatttatgttgctattgaagatcagccttagtccgtggtgatctgacaggatgcatggaattatttcagtcttcttgtatctgttcaggcctgttttgtgaccaattatttggtcaattttggagaaggtaccatgaggtactgagaagaacatatatatccttttgttttaggataaaatcttctataggcatctgttaaatccatttaaacttctgttagtttcactgtgtctctgtttccatgatctgtccaatgatgagagtggggtgttgaagtctcccatgattattgtgtgtggtgcaatgtgtgctttgagctttagtaaggttccttttatgaatgtggatgaccttgcatttggaacatagatgttcagaattgagagttcatcttggtggtttttacctttgataagtatgaagtatctctccttttttgataactttaagttgaaagttaattttattcgatattgtaatggctactccagcttgtttcttgggaccatctgcttgaaaaattgttttccagccttttactctgaggtagtgtctgtctttatccctgaggtgctttcctgtatccagcaaaatgttgggtcctgtttttgtttccagtctgttattccatgtctttttattgggtaattgagtgtattgatattaagagatattatggacaagtaattgttgcttcctgttatttttgttgttagagttggattctgttcatgtgggtatcttcttttaggtttgttgaaagattactctcttgcttttgcctagggtgtcatttccctccttgtgttgtagttttccctttattatgctttgaagggctggatttgtcgaaagatattgtgtaaatttggttttgtcatggaataccttgttttttccatctatggtaattgagagttttgctgcgtatagtagactgggctggcaattgtgttctcctatggtctgtatgacatttgtctaagaccttctgggtttcatcatctctggtgagaagtctggtgtaattttcatatgtctgcctttatatgtttcttgacttttttcccttactgcttttaatattctttctttgtttagtgcatttggtgttttgattattatatgatggtaggaatttcttttctggtccaaactatttggagtttcgtaggcttcttgtatgttaatgggcatgtctttctttaggtttgggaaattttcttctataattttgttgaagatgcttagtgcctctttaagtgggaaatcttcactgtcttctatacctattatccttaggtttgatcttctcattgtgtcctggatttcctggatatttttggttagactgttttttttcattttctttgattgccgtgtcaatgttttctatggtatcttctgcacttgagattctctcctctatctcttttattctgttggtgatgcttgcatttatgactcctgatcgctttcctaggttttctatctccatagttgtctccctttgtgatttctttattgtttctacttccatttttagattctggatggttttgttcaattccttcacctgtttggttgtgttttactgtaattctttaaaggaattatgtgtttcctctttaagggtttcaacctgtgttcttctgtacttctttaagtgagttatttatgtccttaaagtcttcaatcatcatcatgagaagtgactttagatccatatctggattttctggtgagatggtgtaactgggatttgctatggtgggagaattgggttttaaagatgccaagtaaccttggtttctgttgcttctgttcttacgctggcctccggctatctaatctctagtgcttcctgccctcgatattatctgattggagtctttccttcctgtaatcccagttgagtcataactgctcagagtctgggtttctccgtgattctgtgattctgtgatcctgagattctaggtgtgtcagagttcctgggaatcaaggtgcttctgagaccctggtgtgaccaagatcctgggattctggaatcctggaatcctaagatccttggcatgttagagttctctggagtggaggctcctctcctctgggcaccttgtgactgtctgccgagattgtgcccaagtttgtgcggtggggacaggaaggaacctgagccagtggttgggcggtgttcctgtgtccatggaacctgttggtcccagttactcccggtgtgttggagcagatgttgtgttctactcactggtgttcctaagatcctgggtgagttagagtgcctgggagtagagactcctcttgtccggggactgtgggactgtcagctgagattgtgccggaggtagaggggtgctgactggaaagaacctgagggccaaggtttattgtagcctttgaaggttgtgggttatgatgggtttaaaaatttagtatcagcaccagattatacagaaatgttcagacatgataaaatacattgagctcaacattgcctcatggtgatatcctttttaagtcagctggaattgaagttaaaggcaggattaatggatggaaaccctgtagcatctctggaccctgataagtattgcaagaaaagcactcgagtgaacaagagaattcctacaggagaaattctgcttaggatattttgagataccattcacctgcttcatgtagctatgcaggtaccatgttatttgacactctgccatctaaacagcttatactgtagccaccattacatttgtaatgtagcacagctgtgcaaggtcaattttaaggtgtgtacggacagtctttttaaataagaatgcagacttgactgatgagtgacttaaagagcatgccgtgtgatttaagtgcagtgctgtctgagaagctgcacagccctttcactcactaatttctgagccagtccctctcagaggacccaagctgggagtgtggctggggagtagctgtccctgaagctcccctggagagaggggctggaggatctgagcccaagcatggtttgagttcaggaattcaaggctagtgagaactagtgctggggaagaagttttcaagtttaattcttcagttttttttttttttttctttttccgagacagggtttctctgtgtcgccctggctgtcctggaactcactctgtagaccaggctggcctcgaactcagaaatccgactgcctctgcctcccaagtgctgggattaaaggcgtgtgccaccacgcctggcaattcttcagttttaaaattggtttttaaagagaatttgtttataaatagtactgagtggtttgtatatagcacattttaaaaattgttatttaaaagctatctttataacattagatgtcaaacatgtctcattacccttgaagtcgaaagtgtgtgcatttaacagccatgaatcctgtgaagtataggagtttctcattctacaaaagaaaaaactaaggcatatggagttatagtcactgaaggtcacttgaatttgacaagtccaatatcagtgtactggctgttatactacctttgaaatttttccatgtcttgcctttaaattataaagtactgtgtgagtgtgtgtggggagggggaggttaccaagttgagcaagtaagaagtacctctgaaatgtacatttctttttttttttttcccattttttattaggtatttaactcatttacatttccaatgctataccaaaagtcccccatatccacccacccccactcccctgcccacccactccccctttttggccctggtattcccctgtactggggcatataaagtttgcaagtccaatgggcctctnnnnnnnnnnnnnnnnnnnngcactgtgatccactcaccagaggtcttagggtcccgtggggagtcccgtgtggacccttgcgggtgttgggcaagactctgctggcaaggtagcccggggctcgagtctcgagtcgagcggaagggacttctgccccagatccgaaatgtacatttcttgacacatacaaacacacaagagagatactaacacactctactaatatcatttaatttttacttagtaaattgcattagttttagcttgaaattagcaagtgaactatatttggcaaatgtaccagagtttatcccactttggaatctgaaaaatctggcctagggtcttggcctgctggctgctgtgttcactggagcaaactccttgacatcttcgagaatttcccatccgtgaagcatttatctgtatccctgagcttctgtgttaatgccttctgagagtagagatgatcagttaaatcccacattaatcatttcattcctgattccagtcactgcttaaaactgggatggaatcctgtgcgttaagaatgtactcagggagtaaagcaagcttcttgcaagtgttgggaatggagttctgacatccagaacatacacacttgctggtgagaagatgtgatggcccatgtgactccacctctcgggatgtagagatgagatgtccggggcaagctggttcagtagacaagtcagagtcagccagctctaggtttattgagagctctagttaaataaagtcagattgctggacacatctggagaacatacgcatacacatgttcacatgcacatgtctgtgcacatgtagctgtgttccctaggcaagcatacatatgtacatttgtgcatacaacacacatgctccattgcccctttaaaataagtcatctgatttctctgaagattgctgacacagaacatttagagtctgttttataaaacaagcattgggaattggtcaccgttacttggttaacatgtcatattctgcttgaaaaagagaaatacccaaattaaaatgactctttcaggactaacaggagcaaggaaggttactgtagaccatgtctattttgtagtcttttattaatctttaatgacttttcctgtccaagcatgggtagcttgcagatgttccttggagagttttaaaggatacactttacagtgtaatccactgtgctcttattgccattttacagggggaacctgtcttacagctggatattttgtccagtatgtacatggcctttaaggaacattctagtgtccccacactactaattatatccttcatatatatggttgaggaaataatttaagtaagatatttaagcatgtgtgtgtgtattactgcctcactccctgatttataaagtactctgcctgctgaaaacccagccagcatgtattacggtttcccctgctagatgcccagcaaggtacaaaaaagctagtaaccttgtgtatggagaaccatggagtctgagggaagataaacctagcaactcttattaaacaaacacagcacttcccgttaagaccaagatgtattgttatatatgaggagagaccctgtgtgcatgaaggaggcagaggctgtgctgtggtagacaaaggtaccttggaatgtgcatgagtggtgagcagtgtttcttaaggtgtcagtgctgtgtcaagacataggtgatctggagtggaaaatttgttagctgatatttgaagtctaagtgcgcacggcgtgtgtggttagtgaacagtacaggccgacctgcagctgaggaaagagggaggaaagagggaaggagcagggctccgtgaaggaactgactcgccaggacacacaaaatatgactttgtaagttgggtttattttgcacatacataagaagttgaaagagagacatacagaggggtcctgtgtatcctttgtccagtttcttcccacgggaaatcctatgtaacaatcagtatacacctgagagatagacattgggagaattcatggggctattcagaatgttagtgttaagtgtgtgtgtgtgtgtgtataagtttcctcgcattggtggatttgtttaaccatgacttcttttatgtcatcacctcttattcccctctcaagccctgccatctgctaacctgttctatactgctatggctttatttaaaaataaaatatggaataatacagtatggaactttaaaatataattttaaaataataagagggacatggggaattgtaaatgtgtttcagagagccccttgcatgagtttgcccagtggtcgcatctcatatatctgtaatttcaaagccagaaggttgacactgcacagtatgcatgtatgcagttttgtgctgtgttctcctgtggatccatgtcaccaaaccatattgaaaatgcagtactaaactcaactctctacagtcatacctattctgtctcaattctatccctaagcactacccagaagtaatctatttcccatataagactaccatgtaaaaagtgttacatgcgtggacttatacaaaataggctcttgtttagcataaaattctcgaggaatgtatatattttacatcactgaataatatttgtttgtttcttcatctgttgaataacatttatttgtcttcatcttttgataatatgaataagtgtgccaccagcttttgtgccatactttgtatgaataaatatgctgtttaaaaattctcaagaacagagccccagtgctgggctttatggtggttgcatatttgcttttcttaaaaaaaaattagatattttctttatttacatttcgaatgttatcccatttcctagtttcccctccgaaaatcccctatcctccccacccccttctgctctccaacccacccactcccattcctggtactggcattccattatactggagcatagagccttcacaggaccaagggcctctcctcccgttgaagaccgactaggtcatcctctgctacatatatagctagagccacaagttccaccatgtgttttctttgattggtggtatagttccaaggagctctgggggtactggttagttcatattgatgttcctcctatggggcttcagaccccttcagctccctgggtatttctctagctctgtcattggggaccttgtgcagtcaagcttcctctgaaaccctgagatcctggtgtgaccaagctcctgttatcctgggatcctggaatcctaagatcctgggtatgttacagagcctggaagtggtgtctcctctggcatctgtgaggctgcctgctctgttcaaaaccaaggtataccagcatcgaccagaagggaacccgagccactggtcaggcagggctcctgtgtgtccttgctcctgctgtcacaggtccctcacaattgttttggaatggatattgcgttccactcaccagtgattctaagatcctgggcgtgctagtgcaccttcagtgtggtagagtcctctgggaaccttggcattgtctgtcaagttcacgcccaaggtggcccagagctggcaccaagctcctggtcgggtgagtttcctgtgtccttgcccctgctggcacagacctgtcacgattggtttggaacagatgttgtgttccactcaccagtgatctgaagatcctgggtgtgctagggtgcctgcggcgtggagagtcagtcctctggggaccatgggaccttccaccgagtttgcacccaaggtggccccgcatatttgctttttaaaggtactaccaaatagtatctgtaccattctgtatttctgccagtattttgtgctttctgaggcctccttaatatttggcattgttattttttaattttttcttttctgataggtctctagtattcttgttgtgttccactttgcttgtccttaacagctaatgatgtcaaactccattttccattagtgtcttttagtttggtattagatgcttagggtttccacccaagagacacaatggactggcaaatcatagactcatcctgagtcactaatcaagttctaacaattaccctagaaagttaacaacaaggaatgcctattaaggccgtttagtgctaaattttaattagagcatgcacttaatttaggtttgagttactatcttaaagtgtaccttatattcatgtagatatctgtgtaaatacataaagggatatataactggatatacaaagtaaatgtgtgtattcatgtatgtatatatttctttgagaactatgtactttttaatctcaacaaaaatgtaagacatatatttatcatgtttggagctatgtttgtttggaaccgtgagggttagctttaactggaatcagtgaggaattgtctgtattgggctggcttgtgggcaagtctgtggaaggctgtctatctagactaattgatgtggggacacctagcccattgtggagagcatagcttcccaggcattgagtcttgaactggttaagattggagaaattgagctaagcacaagcaagcatgcaagtgagcatgcatgtgttcacatctccctgctcttggctctggtgtgactagctgtcaccttgactttagcacactgactgtagtgtggaactgtaagccagactaaaaccttactttcctgctttgctttttgtcaagctcttttatcatagaaatagagatgaaactaggacagaaataaacttatttttatggtaatgtaagcagcatatttagacagagtgagacataagcatatttaacgtgcaaaaatagtattttattaaaaaccataagcaataaataactttattttttccatcttgtgctggggattgaatcccatatctcatacttccagtcaaatgctttaccattaaactaaaccctcagccaataatttgattattttcaaaagcagactggattaaatgagaattgaaataagtagagaccccagtaaatgtgtggataagatactgtttccccacgacgccttatcacatgattcaagtagaggtgataatgctgcagtgagcattgtattctagcagggtcagtaccatcagtggctccaacccaacctgatgtgctcttatgtgctaaggagcacacgggtgacaggcactgcgtgtgcctttcctggctccggtttagttttgacatgttaacgggatgaggacattgagactcagaggaataaagtcattatttcagggccacacaggtaataatggttaggatttaaaaaacgtagagagaatggctttgaaactcaggacacatagctggtctgtgctcctttcttcttgcttctcaggtccctatgagattagctatggataaacttcaagagaggacagtgtagatccagaggaattcctgcagtggccatgagaagtcggcctgggtagtggtttgaataggaatggactccataggctcatcttatatatatgaagtcttggtcatcagggagtggcactgcttgagaaggattaggaggtgtggctttgttggagtagctgtgggcttgttagaggaagtatgtcgctggaggtgggctttgggttttcaaaagccctagccagtcctagactgtgtctctcttttttctaccacttgtgaacttacatgtaaaactatgagctacttctccagcacatgccttcctgtgttctgccattttccctgccacaagaagaatgggctaaacctctgaacctgttaagtgtttttttttataagagttgctgtggtctggtgtctgttcacagcagtagaacattgactatgacagcctgctctgaatagatgagcttgtgtgggtgtctgagcctgtggtatagtatgatcttggtggaggcagatttttctaagctgtctttattgtaagctctggttttgacctttctccagtacctctgagacaacaacttcttgccctagtgaagaaatggatgtctgtagggtcatgtcagcctgctgggtaaagaaccgatgtaaatgggtatcagccaccagctatggagggcaggtgtttgcagatggcaccctgtagactgccttattccagtgctgtttctgtggctttacaggctcgctctgccatagggacagcatgtgtcagacagcaaacttactgatgaagagtgcctgggcctcatcctgtgtgtgtatctttctcattgattcaaggcgatggtgctaggatttgcatttgggccactttcatacacatttctagacccagtaggtcatacctttagagaccatgaacacaaaaaatatagaaatgtgaagtataaccactgctatactgctataccattatattgcaaacaaataaccgtcaatacagtagtacttccttatcctggcttttagttatatgtagtcaaccacagtccaaaattactattgtatgtcatgtactaaccttaacataggtatatgtatatgcatgtaaatatgtaattatatgtagggcttagtactttccgtagattcagtgatccagagggggtttggaatattctctgtaagtaaggggagactactgtgccaggcctcatgaaacagagtcatgaggacagagggctcaacacataagcataagttactcagcagtaagaacagcagtaatataaagaacagaatgaacaaagtgggaagatttactctgacaagcaactgtttgaggcgaggaacctagacaccagatgagtaagctgggtataggcaaagttagttactgaatatcacactgaggagctctcagggtgaggggaaagtaagagagcaaaactagccaaccaatcagatagctggccgaacgccaacccaaaacagaagccagagatggtaaagtgatgggtccagcactcaggtagcaacatccacagaagtaggagaggaaatgctcagagataatgatggcagattccttaggataaagaaacaacaattgcatcatgtagaaagagccctcagtgccattcaggaactgtgaaacgacccgcaatctggcaggatattgtgaagttgtagaatctcagcatcaaggacgtctaacaacttttgtagtgaaagaatggatcattacaaaggagcatgagtcagggtaagtagttgtgcatcccgaggggctcagttattttgcatattgattgaggtgtaagacaatcatctgaataatatataatttagagcttcataattcataaattcatatcctttttgatgaagtatttatcagtgtaacaagagcaatgttttctttatgattttcatagctgtaagaaaagctatagggtggtagatcatgatatatggttttataattttgtatgaatatttagaagttgctattttttttattaaagaaatgtacctctctttactcttgggtgctttgtgtttgctgttgtctttggtctcatgttggaacacatttacttagagatatgttttaaaacttgtatatgcaaaatacttttttttttgttttttgcaatcgaatgtaacacaggtagtttgggcagcccccagcctctggaggtaagctctctgccactgaattttaacttcaaccatacaaatggttattttttaatttacttttttgtgctcttttagatggcatgctcctgccatttatgttctgtttgtatggtagacagaagtcatattcattgatggttcaggaatccttgtctagtagaagtacaatgcagactatatttttctactatccacataacatttataaaggatgaaattaattgtaagtattagttcagtatgtaaactacttttgtatatcagtgtacagaagccattgaggtattttacagcctgtatatgagagttttgacattgggtatatgttttgtaccatatcatggctggatgcatttcaaggactcggtggccacatgtgttcagtagacacgtcaccatccatacattgctagagcaaatgctacttgggccactttttaacagctgccttcaagccatccattgtatggctttggacttgggtaagcattgatacttgtcagttgatgctgataatatcacggagcaccagggcttctggaggtcactggatcacactagattttctgcatagaatctatgctaaagcatgaaagcctacggacttctctgatactgattggagtttttgttttctttcctaagcccaggcagatattctgcctgcatggctgatgggcagttcagggtgaactgaatgcctcaccttcttttccggctttgttcttgcttgtgttaatgaatagtgtattcattcttgacttgtacatgccaaaccatctttgacttctaaagtgacatgacaagtcagtctgctactccaaagagtttccttaagtcttttgctgcctgtatgcttatgatggtgtgtctttaattacaaatgtttactgatttttagactgtctgtctgtccatccatccatccatccacccacccaccatccatgaatgcatttgtctatttatttacttacttacttctgtctgtgtgtctgtgtgtctgtgtgtctgtctgtctatctatcatattaatatgttggtgttttgagacaagggccttctatgtagccctggctgcctggaactagctccatagactagcttcccataatgcaccgagaagctactgactcctaaatgcagggattagatgcgctaccacacccagcctaatgctttgtatgaaaagtagctcagtggcaatagctgcttttggtagatgactttaaaattttgtgaagtgtttggtatttcacgtaacattattgcaatatcttagtagggcacattcaactttatgttgacattctcttatatttgattaaaatgcataaaccaagagctgcacatagtggaagagggaaagtcaagctttatagttagtgccctagttagcttcatttatcagttgtattcagcctagaatcatctaatggagtctcagtagatggatttcccgggctactttgtggacatgcctgtgggacattgtctagattgataattgctcctccttcatggtagcccttactgtccttaggcaggccatcttgagtcatactagaaagttgagaaggacccagcaagcatgcagcctctttcatggcttcagctcctgcttgaactcttgccctgacttccttcagtgatggatcctgacctggaaatttaagtaaccctttcctcccccaggttgctgttggtcatggtgtttaccataagaagcaaacttgaatagttggtatcatgctttttgtccagaagatcttttgactcattcaaaatatgttatcagaggaagcaaaatgtaaaaaagaaagtaagatgcagattatttttcttagtttcagtagataaacttagggatagtgagtgctttaaaatacaaattttgggacttagtgtgtattataggtaagatctcttggaactaacattgcttttgggttttggatccctttctgttttctaaaactctttaataaaacatggaaatattggatataaaggacgcagatgctcaggtttgccctttgcctggtggttatccatcagacaccatcaaacctctcatgcttttggaaagtaatcagttaaatgtgttccaaggtcttttaaagtctcagccagttgttttggtatcaaatgatacaactaaatggtttttcttaaagaagcatatctctcaacttgttcactttatccccagttcttgattttatgccatggctggtgaggtaggtatacctatatgtatatgctatatgtatatgctatagcatatgccacacacatacatgctgccaacaggaaatgcccaaggtctgttccagtctgccatttagataggagttaataatttgggttattagaacagtgagtacattgctatagctacatttttattattttgtaatgcttaaactagcacctaaggattcagaccaacctctcgccccctccttccctccgtccctccgtccctccctggaatttattagacataaaaacagaaaaaggtcataatctgaaaacaagagataatgaaaaataccttcttttctcttaagaaaatttgcatgccattttgatttatgcagtggcttacactggccttgagctcatagtgttggtgtgaatgcagtaagttcagaagctgtgctctgttattgaatgactgtatgtcattgcagacttctagagtttagaaatggaagacagtgcatgtgcttcaggttgctacttgcttcaaactaggaagctttaaaaataggatgtcattactcaggaacttgaagatctcaagtttgataaaaatctgtttagtattgtagattattaagactgaaatctgaaacagtgaacagcctcaggtattttactttaagataaaaaggtaaggaatgaaatggggaaggaaggaagggagggagggaggaaggaaggaaggaaggaaggaaggaaggaaggaaggaaggggttctgtcaatctgtatgtatttattgaaacattcaaaatatgcagcttcttcatatttcttcagttagatcaaaagacctctaaattttgatgaaataaggcccctttgtaagtttatcttatttaaagagccgtgataacgttggggtgaaaagtctagatggtgtatgttcaacatagtgcagtaacttttctgtcttcatttgtgtgttgaccttgagcatgtgtgtattgtatataaacacgtgtggcagtacaagttgtgtgtgtgtgtgtgtgtgtgtgtgtgtgtgtgttgtgtgtaggcttgattgatattggttgtcctttctgtactgatctctaactttatttttgagaccagtcatctttcactgaacctgaagcacgtagattctgacaggcagtctgacaatatcagtgtctggataaagaagtaagtactgagcgtgtgagatgcccaggcacattaggctctgtttatgttcaactgagaacccttctatattcacacaggcaagggctcccttaaggagaaggcaaggcaagcagctagaacactgagcaaatgtgtcctcccagcagcacctgtgaacaggagcaagcacagaagggctggccgtgtcctcaggcgcctgggccacggtccttgaatcacacgtatggaacagtggtgtgaggttttagctgtaggggagatggaagcttctctgtatcctttttgattgtttgattttagtcaccctcatgctccccagtacttcaaaggcattgctaagggccatgctttatagaacagccgtttccaaagcattcatacaaatcttacccacaagctctgctctgttctccattgtccggggtccacttccaggagagtggaagtccaagtcagtgggaaatgacttcttgcaaaaccaaacaaacaaagtatgtatttgcacatacatatctctgtctctttactttgataattatagttaatggtggctcctttgatgttaattccagattccttgataaagaacatgctaggtatagggccacacagagagcatcgcaagcataggacactgcatggaggagtgtcagtgtggtggcatcttagactgcttatttgaacaagatacagagtcagcaggattaaggaattgttgagcaagctacttagagaatatgaaccgtgtgcactgtggaaacccctgttagacacttaccacaagtctgtagagacagttggcatctctggtgcatggagtatgatctgtgtgcttatttaggaggctctatgagcaacttccatctgatacaattcagcttagtattcatgctgaaggaacagttctacaaaacccaggaagggcattgtgtttcctgtaatatgaagtaaaaatatcgaatttatatttaggtaagtgtggtacagatacttgaaaagacagataatgattgaaaatataatgataaggagctttagtacttcagttattgtttcacagatgtattaaacgagtcattatttagaaacttaaatgatttctactgcctttgaatataaagattttgggctgaaacaaatgctcgcttcatctcttagaagttgtggtgagtacaagactgaggtccagatccattctagctccctctccactccaggggcatctatcacagggagagggaaacataaagccatctttttaaaacaacaagatgtgcaggatatccaggagagtctgcaaagccacggtggtggcactgtccctacccagagatgtccagaagcagtgcgtatgtcatctgcatagggcgagtgatagcagacagtgagaggcgagtgtcatttggagcgacagggctggctggtgtgctacctctgagacagttggcgattcggccatcaaagcttcagggactttgggtggaccacttttgagatgctaccatgttggggagtgtcctaaatatgtaaaaaccctcttgagtgttacttaggtggctctgccctttttccataagaaaagtctctttaagagggcactaaaaagttcagttttgatgtgaagagtttcagtgttccaagtctcatttgctgtattcttcttctgtccttgagaagccggctgtgaagacagactgggagactgattgcgagacttagaggccaaggtcctgtctagcgaataccaggccctgggcttcatctccagggctgaagaaaggaggagagggaaagaggccgaaacagaggagaaagtctgtcagttcacctgagactgcctgcattaccttaagacttttgagcctaaactgtgaaggtactttcaaagccacaagatttttctgaagggaaactaagtgacccatgtgtgccctgtctatctctgtagccttttttgccctactcaagcagttgttttatattttacgtctgtatatgatagtggcatgttgaagtgcctattgtaccctgataaaatgatccaaaccgagagctgggatatctgtttccatgactcctcccagtcagccagccttctaaactggaaacatcacctctacagtgcttaatattctttggaagtcaaaggacttggcgtgcttagaactcaaatggaatctgttttgcacagcaaggtcatttgccagttttggaacctttgtactgaaagtcatggtggccagcagatagggtaattccaagcgcagcccctgactgataaagccacagactgataacgccgatttcatgatgccgtgagataacgtgttcctgagcatcatgaaaactggtagattctgggggcgtttgagtactaggtgttattattggtcaggagctgtctgacctgctaaggagattataagctgggagagcacatgtggctacaggagaaagaagaaatagaacatagacattcacagtgcaggctatgtgagtgggagcctttgctgttacgagagaaggtagttcagaaggacgcaggactctctgttgttaaaatcaatgaagttaaaagagcagctgcttgtaaaagttaattttctttgacatctgctttggtcccagtaataaaaaaacgatagctctgttgagcagtctgccctatctaaaccggcatcttcttgtgattgtgagatcagtttggaaaactgttgccttttgttttcagaaaatgaatattgaatcatttgtcctttaagatatatgcaaaggcatagtatatgcatctttaatttagtaggacagatttgagttggtatcctggggattacaggatacatagggccatcctagggattacaggatacacagggccatcctagggaattacatgatgcatagggccatcctagggaattacatgatgcatagggccatcctagggaattacatgatgcatagggccatcctagggaattacatgatgcatagggccatcctagggattacaggatacatagggccatcctagggattacaggatgcacagggccatcccagatctgtgctatgaagagcaggtgatattttgataaacattttctattccctttatttaaacatctaaatttgattcttcttagtgtttgtgaagatacaccgctgcctctgtcgactttcagtgagactggagactgctttgcttatttgaagagtcggcgctaagtgacagacagtgcctggctctgcatcgttcaccttgggaggagtgcacctttgatatgggatattttcatttcttgagttctataagaaagcagaggtgactggtagagggtaaaaccaccagggaacaaaacggagcaatattttccaagtgacccatgttttctcgtcatttttatgtgttttaatttagccagtgttgggcaaggagttcagagagggggatttatcgtttcaaaatgagccaccgtgcccttcgttgtcaacggatggaagcaccttcgtttaggaagcatctgctgtccctttaagatccatttactacatttcactatgtttcctcctcatttatcatggtcccccttttcatgcctatcttctagaaaaaacatcatgaaaaaagtattttttttttctataggctccttatgagcccctttaaaattttatagagaaatgactttgtttatttctatgtgtgtatgtgtgtgtgtgtgcctgcatgtgtatctctgtgtgtgtctctgtgtgtgtgagtgcctgcatgtgtgcccatgtgtatgtgtgaatgtatgcatgtgtgtccatgtgagtgtgtgagtacctgcatgcatgtacttgtaccacgtgcatgcttggcatcctcagaggctagaagaaagtattagatcccctggaactggagttataggtagttgtgagcttccttgtgggtgcctggaacccagcggggggacttcagcatgagcaacaagtctacaggttagtaactgggtggcaacaaaatccttttttttttttctttttttttttccatttttattaggtatttagctcatttacatttccaatgctataccaaaagtcccccatacccacccacccccactcccctacccacccactccccctttttggccctggcgttcccctgtactggggcatataaagtttgcgtgtccaatgggcctctctttccagtgatggccgactaggccatcttttgatacatatgcagctagagtcaagagctccggggtactggttagttcataatgttgttccacctatagggttgcagatccctttagctccttgggtactttctctagctcctccattgggagccctgtgatccatccattagctgactgtgagcatccacttctgtgtttgctaggccccggcatagtctcacaagagacagctacatctgggtcctttcgataaaatcttgctcgtgtatgcaatggtgtcagcgtttggatgctgattatggggtggatccctggatatggcagtctctacatggtccatcctttcatctcagctccaaactttgtctctgtaacttcttccaagggtgttttgttcccacttctaaggaggggcatagtgtccacacttcagtcttcatttttcttgagtttcatgtgtttaggaaattgtatcttatatcttgggtatcctaggttttgggctaatatccacttatcagtgagtacatattgtgtgagttcctttgtgaatgtgttacctcactcaggatgatgccctccaggtccatccatttggttaggaatttcataaattcattctttttaatagctgagtagtactccattgtgtagatgtaccacattttctgtatccattcctctgttgaggggcatctgggttctttccagcttctggctattataaataaggctgctatgaacatagtggagcatgtgtccttcttaccagttggggcatcttctggatatatgcccaggagaggtattgctgggtcctccggtagtactatgtccaatttcctgaggaaccgccagactgatttccagagtggttgtacaagcctgcaatcccaccaacaatggaggagtgttcctctttctccccatccacgccagcatctgctgtcacctgaatttttgatcttagccattctgactggtgtgaggtggaatctcagggttgttttgatttgcatttccctgatgattaaggatgttgaacattttttcaggtgcttctctgccattcggtattcctcaggtgagaattctttgttcagttctgagccccattttttaatggggttatttgattttctgaagtccaccttcttgagttctttatatatgttggatattagtcccctatctgatttaggataggtaaagatcctttcccaatctgttggtggtcttttccactaaaatcagggactagacaaggctgcccactttctccctaccttttcaacatagtacttgaagtattagccagagcaattcgacaacaaaaggagatcaaggggatacaaattggaaaagaggaagtcaaaatatcactttttgcagatgatatgatagtatatataagtgaccctaaaaattctaccagagaactcctaaacctgataaacagcttcagtgaagtagctggatataaaataaactcaaacaagtcaatggcctttctctaaacaaaatccttttcagagcagttgtgagctttggtgttccaggtaaaatgtcttacccagattttttttttttaaaaacaaaacaaaatggaattaacttgtttagattcagctccaaatggagctgtggtattccaactaacaaatgtaattgcttttaatttgtgtttcaaaacttttaagtctattagaggaaatagttctgtttcttttattattttgccttaggcagcagatacctaacctcctattccatatccagagtaatacattagtaatcagtcagaactgtttcctggacatggctggctctgatggcttcagggtgtactgctccaaaatccacctttggggaagccacagcagcaggaaggtccatatcatacttggatctcttcaagatacttttatgtattcatttgtatgtttatgaattttcacctacagcatgtttgtgcaccacatgcatgtagtggctgtgaagatcagattctctggaactggtactacacagggttgtgagccaccatgtagatgctgggacctgaaactagatgctctgcaaagagcagccagtgctcttaaatgttcagtcatctctttagcttaagtttttggtttcaaacatctgaattcaactcttttaatctggctgattgattgatgttttgaggacaggccctcatgtatgccacagtggccataaactccccatcttcctgcatcaacctcttaagtgctgtgactatttggccaccagaccagctctaaaagacaatagagcccttgctttgccattgacattagtacacttggccacctgcctacggttctggatgtcctcctcgacttttggttccagagctccgtggcctgtacttcctttgtatttctcatgttaacatctttctcccacagcggtgtcagctgtagtttgggtattcatcttgaatccctgcatgcactgtactccttagtttctctccttgctgctgtgtaatcttgccctctgcagtgcctttcactgctggagaaatagctcgtcctcacttgtcttaggtatttcagagtcaggactaatggtgtgggagatagatactatggagacaatcttccacctcacatctgcgtggtagccatttaaagagggcttgttagttagcaagatgtgtttatttttgtgtgtgcacatgtgggtatgtggaagccagaggccagcctgggtgttgtgcctttgctggtgttcctttagtgttactcgttgggtgttgcctacctaggtttttttgagacctggtctcttactaactctgagcttgttggatagtctaagtggactagccatggagctccagggaaccagccacctatcactgctgccccagaggtctcattataaatgcacactactatgcctggcaccgttttatgaggttttgagaatcaaacttaagtcctcatgcttgaatggaaagaacctggcttcctgagctgtctcctgaccccatcctcattatttgtacccaaacattatatatatctcaaaatttaagattatttaatgatatcaatcttttaagaattgtttttattacttttaagacgatgtgtgagtatatgcaccacttttttgcagtactctaggaggccagaagagggcagcagatctccttggacctggagttacaggtgattgtgagctgcccattgtaggtgctaggaaccaaattcatgttctttgaggagtgagcagtatgtgcctttaaatgtggagccatctctctagccccgtatcagtcttcaaaacacagtttatctaggcatcaccgagttcagttgtaatagctcatccctgtactatcagcactctagaaataacgccatgaggatcaccttaagtttgaaagtttgaggccacctgatctgatctacatgatgagttctaagccactcagggctatatagcaaggccctgtcacaggaaacccagtggggaggaaaatcagttaagcttgcaaaacttgtattgcttaattcaaatgtgctagatgtatttttaggtctgtcttctcaatactgtctcaggcctaggctatgctaacttgtatgcctgttcccctgaagtaaccataacctgggattcataaagaacaagtttttgtgttttctatatgtaaacaaacagaaacaaaaaccctcaaaaggtaaacaccccccaaatttgaaaatgaaatttctttctttgattactattcattttaacttgtagagaaaatactttatatatctactaataaacactttggtatgatagtctattgtcttttcagaaggctgataactgtcatttagttttgatttagattttttttttgtgaaagcagaaatttgaaaacttacctatcaaatgcagacatacaattttttgttcatcaattaatagagtgagttgcaagttcttgccacacattctgagctggctatctgttatgagtctgttaatcattattgctagggcggtggcagcctcagggaagaatggagcagagaaccaatacagtagcttagggaggcattcggagagcatctgtgatgatgatctcgtagtgacagccttagccatttgaagtcagtgtacggccctgccgctttctgcagtttgaggataggttccccaccatgcctccttcaccccaaaccatgcactacttttgaaaatgcgaattgttttacaagatgcagaggagagtcctcaggcacattctactcagatctccagttcagaaatcatccttggtagatctttgtccaagtctgcattttgttaatacaatgaacaccatggccaaaagcaacttacagtcagtcagtcagggcagggactcaacagtagcccagggaaagaaactgaagcagaagccatggaggactgtgtactgcctgggtccctctggctcatcttctgtttccttttaccaaaccacagtagccatcaagaaaatgctcccccaggtcagttggatggaagccattcttctgttgaggttccctcttcctcctgatgtgtcaggttgacaaccagattgttgtcaaccattacagtaaactgaagagtaagttggtggtagaggaactcaaaaccaagtcactctgtcctgggaagcggagttgtgacagctctctaccagggactctgctgctctgtcttgtgtagctggctgggtctggggcagccactcactctcggttgagtacctcactagtgtggccccaaaatgaaaagtttgcagatgttggatgtaaggtcattgtaataactttaacctgagagcctaagagaattctttgctgattttaattagggaagaaattaactcttaatttgaaaacttcaatcttttagtcagggataaattaggaaggaagcaaaacagaaggcaggcccggtagaaaatggagatgtgttaatagttcagggagaagggccggaggatggacagagatgaaggacttgaggaatttgcccgtttggagtgagcagctgtcttgtggcgctgtggtagagaggtgtctgcttccatctagaagagatgcttaattaggaagctgtggaaactgacaagtgcttggagaagtccagcttgtctgttctgttctcagagaactggcttttaaaccatctagataggttaattaaatctgcttagagaatagctttggttctgagacatggaatcgctaacaatgaaagtgatattttgcagagggatttggcattaagaactacattataggataggccgaacgtttgcctataaaatctgatgactttgataatctttctggtggtgacacactaggctggcatttttcctagaccctaaagacctgcttttgctaaaattacagcatattattgtgtcacagtcttatattttaaattcataatttgtgcatgtgttgacttaggtgaaacctggaatgcttgctagtcattatttgatcaaattatgttgttgtttgtttttggatctgttctgccacgaacttacagccccaaccctgagacccacagtagaatattttaaacattgtatcgctatttttattgatataatataaacatcagtttggtaagttgttttctgattttgggaaatctttcctgagatcagcagtgtgaggatacagtgtataataaataccaaaggatgtcttgtagtctgttacttttcctctgactttgttttagtagaatataagacctcttttaatgagagatttacttgttttgttgtcttgagtctgtttcacattctcagactacatcgggtggatgagtgtcttgacttcctagtggaagttctcagaggaaaatgcagttcacatggctgtgaacacacagaagaagccggtctgtctgctgttggtttgatgcatggcatttattgcaagggtttggctttcagtttggtctccaggcttcatttgaggtcacatttcagagttaaatacatttagtttgttttgagtcttaggagatgttcttggtttctttcagtaatgtggttgtgaaaattatggaaattatgaaggagtcggtgtgtattccgatttcctgattacttagccataagtggaagttcctctccttaatgctatcattttcctagtatcataactggaaagctttttatacatcttaatgtttagtgctttctcagattttccatacagagataacatgcttgtgagtagaggctcgtccacaaactcagatgtctgggctcttttcttacattcctttctcatcatttgaagtgtagtaacttaatttatgtcctcaagacaacgtagttggctttcacttttgttttgcttctctgtgctcctgcctcagcctgtgctggaaacatggagttattcaatcctgatgaattaatgattaagtccttgatttaaagcagaaagcgttctctcatatttgtgcatggcctccctggctgcctcccctccttagtgtcccctcagctgtcctgtttgtcttcaatgttacccgcccctccagcccaccactctcctgacccttttctctgatttcagctaacggccaggtcgctgcctgctgtgcagtccgatgaacgacttcagcctctgctcaaccacctcaggtaacaaaggcaaagccttggcacacttttcagtgctaaactacctcagtgtctaaacattgctttttatttgcttgaattctgtaagtcaacttgaatacttggctatccttggctaattcaataagaatatgtaaactatttgtttacacatttatactatttatagatttatactacacacacagtgcatatgtatatctatgtgtgtgtctataaataaataaataaacaaacaaatagaactatttatacatttataccatctcctgactatttgatctcaggtattaaagtataaatgattgtgactcttttatttgctccgagtcattctctctacatttttatttagcctacttatatttacaagacttacatagtcaaaaatactgtttctctttacagtttctaagttttaagtttttaaagatttatttattttatgagtattctgcatgtctatatgtgtgggcaccatgttctagctttgtgggaagaggtcaactggaactggcttgtgagccttcttgttgtttcgggaactgacccctggtcctgtgcaaaagcagccagtgttcttacccaccgtaccatctctgtccccaagcttccctttctcccttgtcactcagaaattttatattcaggcattattgtttttcatcttttccactgcttcttttcctttcctttgctcccctggggtcagggactttcatttttccatgtaattgattttgtggggcaaggctgtgaggtgtggttaaggctagtattcctggtgtctactagcattcatcctatatacatatgcttcacctcctagagctgcactcacaggtcaagaaacccagacctcaagtttgagtatgttgttcaatcttcactctctgacccttctaagtcttttgatttttatcttcaaagtatctctcttacttcactagcttgttatccattttccttaactcatgcttttccctctgatgtagttcacactcctgccagatgtgattatgttcttggctttagctgctctctgtctgttgccctccacccccttcattctgcttaaagcctgagcctggtgcctactctggaattcctgctggtaagaactataactggagaatggttgtgtgtcctttaggtcaggtgtcatgttctgtggtcatgtagttccttcttttcggcctgacccagacagaggcagtttcctgctattgcaggatttgatgctgttattgtcctcccactgcccgtagccagggttatatcccacacctactaggtgccatgtgatctgcagagtgaagtgcaacatatgcctacagatgtctctgatatcttttgttttccttctgaatgaaattcttatattttataaatcagtttgccctaaaattttgctggttccacacgtaagtaaaagaggttgcttcttagctctagtggatacttgattctgtgcaatcatgacagattcgcttccttccatctcagtatggtaattgtcacctagaatttagattaactaccgatgtctctttgagtccttgaaacttgaacaaactgtacatttgtttagggctttcattctccatggagttcattcaagactggttgctaggcaactaggcctggatgttgcttttttattgttattaaaccaaatggcttctcattttattactgtgtcagaggcatctgtaggtagggtggcagctggtgtgcatagcttggcacctcctgttctacagagtaaccctaggggatgtgcctttcaagcatgttggattgtctcttggctgtcaagtatgatgtttttctttgatctttccttttttaaggccaaagtggcaaagaactgggctaaggacgtagctcagtgggtagagtgctttttatagtgagcatgaaaccttgaggtcgatctctctagcatgacatcagcagggtttggcaacatatgctcttgggagatagaggcatgatgattacaacttcaaggtcattctccactgtgtagagagctataggcaggtctaggatgcatgggacttgagggagagggagagggagagggagagagagggaggatgctgatcacgtgacttgagagagtctaatggcaatcttgttaggaaaaaataattattgagttgcatgaactatataacttgtgtgacttggagggtgttattggaatcattatttgtcctaatgttggtgcctctaatgatgaaagagaaaagatgaatagcatttgaatagcattttaattaaatttctcaataaatctcatttgggagattattctgatacctataaaagtcaaaggaacagtagagagaaattgccgaattattttacagaatctcgtcactcagaattagtgcaatacttttgctaacctggtaatgtaggccattttgttataagatattactgagactgaagatgtagcatatccatattttttcattgaatttagctctcttattaaaagttaaacacagaaaaccatttgcctgagtatcgtgtagaagtaagtttattttcacattaacagtactcagtagttattgagtgcccactatgtgtcaattgagtgcccactatgtgctgatgaggtaaggtacagtttgttatcagagaatttacaggtttggcttcatccaagagatcactgtgttagcgggttacaaacctttgctaatcttttggttagaacaggatagcaggcacacagctttattaattaacctgcttacccatgtgatgtcttccttaaatgatggtatcaaggctcacttgctttacatttgttctttctaactcagtagtgactcaaattggctgctcaaatcagaggaagccttaatcctacttgcagagtctttaactccagggtagaggaggagactaaggttgctggtgaattagtaatttcagacaatttaggtttcaaatgattgcaaggaatatgtaaaggatgtgagtagctaggtacaatgtgagggtggttttaatgtgggcagtgtttgctggtcactctctaggtgatggctacagtcagggaaatggctgaacttaccaaagagagatgagagaggaaataaatgtcttgaatccacagcatatcagagttttaaccatatgggcagcagggcgtgggagtgggggtggggtgggagatgagtcagaagagaaactggtagaaataccatggagagattttccctaaggcctagccagaacacactgagaggacattgtttcaacgatgccaaaggaaagcatggagtattgtcacacaccaccgggaagttaggtaagaggtgtacaatgctgactgaatgtagccctcggacttagccacagtgttataataatggtacagctggaagtctgtgtcctaccaaggaataaataagaaatgaggccgtggggaccggacatgcaggcttctcttaggcttcaccctaaggcagggaagcaagaagggtacagtcatgggcttctaggttgaaggaagttctagtttttctgttaaacgtgcaggggtttctgatcatcagtagacgtttccttccctcttctctcagtccctccctccacccctcctccctttctcctcagagaagggcacagctcccatggatagcaactggccttggcttattaagttgcagtaagactaggcacatcttctcctattggggctagatagagacagcctgtgttaggagtagaggaacacacgtttatgggtgagggaagaggtctgtgggacctagagggagcatagctaagggagtcaggcaggagagggtacagaggaagagaaccaaggactcacaggggttggcactgatcttcatagtatgtgagctcctgttgagaagatcccacagggatagcaggcagatgtgtgtctgtaaaagggggtagaactttagagaaagtgctcctcatgaaagcttagtttctttaaaatgaacactacagcccacccctctcctcagaagatggtcctttgtagccccagggacttgggagatcaagacaaccggtgacttgaaccctggagttccaggccgtgaggcttaacacagcaaaaccccttttagaaaaagatgatgaatgaatatttcataagatacttcttgttaaaaatttttgttaggaatattcttcaattaggaaagttatctgattttgagttgctgagaagccaaacagaacaaccaaagaaactcccccccccccatgattccagactaggagagagagtttgtatggataccttctgtttttcttaaaccaggcatcgttagctgtccgtgtaagctcattgtcgcccctgtggctctccccctgcattttctaggcatggttatttagcgtactggtttatttttgagccgtacaaagatctttggttatgttcccatgaacctaggcatttactgtaaaggagaatcttttactccctaaccctggtacacatgaaatactatttataaagtagtataatttttaagaaaacatgtatttgtttatttatgtatatgtgtaaaacaacttgcaagagctggttctctcctcctgtcagtggccctgaggaccaaacccaggttagcaatggtggcaagcacctttacccactgccccagctgccagcccctcaggctccaagggtgtataataaaaagtattatttccacttactacctcactcagaatttaaagtatgaaagcatgaggttagagaggaaaacttggataccagttttccatacagtaatttgccagagattttatcccttaaatatactgtagtgcctcctcatcatgtgtgtacctctcttgcaccgtccacttgaagataggaatggtgcgtgtggggatatgttaccaatcacctttcttgttattctttttttttttatttttttattaggtattttcctcatttacatttccaatgctataccaaaagtccccccccccccccagtcccctacccacccactcctcctttttggccctggcgttcccctgtactggggcatataaagtttgcaagtccaatgggcctctctttccactgatggctgactaggccatcttttgatactttcttgttattcttatttaatgtcttgccccttattgaagaataaatagcttttaaaccatggttgttatactttttctcctaattctattatcctgtttcagcttgagtgaattaaaacttaaatagtgctaatacaacctagcagccacgggacagttctgtgcagaggattaacttgtacagcatcctgaatctgtaaggtagtcttactgatcttacagcattgcttacactaatgaagcaccttgcttcctctctattgcagtgtcacattcttatagttgcttgtatagaattcctgttcccactgcagtgcatttgcttacatgcacgtgtttctgttcaggcctcttaagaatgtggtatcactaatcccatgtcagacatcagacaggcagcctctggagaaagcttctcctggtaggcacagtgataaactgaagtgttttctctttgaataaactctcattttcaaatcagaacattgccttggtattcatgtgtcagttgtggtagaaatgaaagtaaatgttagcaaatggtttgtagactggggctcccaccagtcagaggccgcagtgaaagccggattaatcacaggcggcagctgtcgccagctctgtctcattcccagtttcgtgaactatgtattttctttcattcatgcagcaacacagcttgtagttccctgattattgcaaagctctgtgcagtaaattcataagattattatatttaaggttattcagggtcattataaacaaaataaattaggatatataattttaaatttataagcttagaattatattttttcatacctgtatcaataatgaccatatcttcttaaggatatatttgctaaacattggatttagagtttttagatatggttccttaactccaatctatttacaaaccaacatttttgaacacacacatgtctatgtatatcttactaagtagagaaaaggcaagtctcaggagaggtagcgtatgcacatggattagtttaggaatttaaggctggcttagcagtcttaccagtgtgtactactcttcaagaagacgagcgtttcatgtccaggactcatatctacctgtagctccagcttccacacacacacacacacacacacacgtgagaaagagaatgggagaaatgaactcttctccccagcgcagccattgctgactctgttgtaaccctatgggtatttgcatgtaattataaagcagctacattttgaaacagttctttcacctacgtcataataatgtgacaaagtagaagttgattttcacaactctagtgttgaatgcctgcacattgttcggtggagagcaggcagctctgtcttttgcttagctcctctgtgtgtgtatgaggagggagttgagattctgtgtgatgagggaatttgctttggaggagaaacgcactaacactcctatgctggactttctctctaacattgattggcctctagataagttaaaaaaaaatcaattttcatctgctgggtcaatccaaagctctttccaagtacagagggctgaggataggggcactggctttctgaaaagacccaaggatgcactgtagcatctactgtaagacattggcaactgcacaggagttttgcacagttgaactttctgggaagatggctgtactgatgattccagcaaccaatagtcatgcagctaccttatgctcatcacatacatatgcccagaggtgatggatcacaaagcttaaaacactatctatcaatggtggaatccacttcagggttagtaattgaatgtactgttaggggttggcagaaactcaggagatgggagaagctagctggaagaagtatgtcactaggaggatgcgccaggatgctatattttatcttaggcatgcacctaccccctctctttccctctctttttctcttggtgtgtgtgtgtgtgtttcctggacaccacaaagagaataacctcacctatcacatacttctggctctgtgacattctgctttaccttagacccaagcaatggagtcagcctactcttctgaaaccatgacccaaaataaatatctccctccttaaggtaatcgttggaagtattgttacagtggaaagatgacttacatgggtaagctcgtaaaagcttctcttccagggtgtggtaagacatttgggtaactgaaggttatgagtcataaagggagggtaggttctttacttggtgtggcttttgtctctttgtgttttccaatggtcttaggagacccttgtgaaagggtccgtgcctcccagctgagcagtttatctgtgcaggagtatagcagagactgcacagaggagggacagttgactaggacctcctgcttcagccaagtgctaagatgacaccacccctggctccagagttcttcatggcagctgaaggtgtggatgagaatggccttcatatatgcttgcatgtatagtctccagttgataaatggttttggaaggattagcaggtgtagcctgtgggtgtagatgttttcgtatcagaggaggcatgtttatgggggtgggctttgtcacttctgacagtcatgttgcccatggatgagggtataaagctctcagtgactgctccaacaccatgcctgcctgcttcctgccgtgataacagtggactaaacctctacaacggtgggcaagcccccacctcaacgtgttctcctttatgagtgccttgctcgtggcctgtcttaatcccaagaggacaggagctaaaacagcaacactacctgcccagtcattttcagttatttacctgggtggtaatagtctagagtgtagtctctatgagagtaaagaattggcacatcttgtttacctttgtttctctgttacttaaacaatgaccgtcatagtaagatactagtggccatgagaatctagtgcatgggtgaatgaatgcatgaatgaatgatacaagctctacacttttgcaattcgttcactttttcaaagttgctaaatactgagtttgaatgagatcgtagtttgttgatggtattctgagtgtcaaacccagagcctctctcgtgataatgaagaatctactctagtcctgaggtgacaattaggcccatagtcacagagcttttagtcatttccatttcaactctttaccttctcaggtaggagttttgtctttgtgacttaacagattgtccatgtacacaggactttccattcctgtgtgactctgaaacttactgaatctcacagactaatatttaagtagcaaagctgttaggatttaatgcctgaaacagaactcagacatgatgagccttcagtgactgtttcaggattaaaggaaaatgcgttatgtgattctttgagctgtgacttttagtaaaaatctcactagctgtctccacacctattgcctggccaccccacccctgctaatgttgaataattgaaaagcctacccagtttccccaagcacagaatccttgctatctgtgaacgaatgtggtggtggtggggttgtcttagaactccatgaacaggattctagctcagaagctttctgtactctgcacgctatttgtaaggggccgagagtcagccaacaattatcatgttgattgttgctgggacctgcatcacttagggattgattgccctagctgtggtgatgggagtgaagaaatggcagacatagttcagaagagctaggattgggtggggatgggctctgatggagaccggcagtggcaggcagaaatcctgtgtttattatgtacagtgtccaggagaagggttggctggtctgagcaagcgtctctgtagggattgatctcacggggaggatggttttgtcacagtggttttagcagaaggtcagcctttagccaacattgtactcaagcaggggacaattttgctgttctctagctttacctgcagagggctttgctatcccctgggcctgaggcattggagtctttgacacggccattctcacgtcagcagcacatccacttaggacttcatctcttctccataaagtttgcaggaagttcatccttctagcctttattcttccagcctcttcttcctcactactgccccagcaggcaccctttcttagtcttagggatcctgaaccactgccaagcagcctgtcctagaccatcattcactgaacattacaccaccagaatatgcaccaagaataaagggattgtaagacatttactggtgcaggcagagatttgttagtggccttgtatggtttttataacatatacacatgcgtgcacacacatgtatgttatatgtctatgtcatatgtttttatggcatatgtgtgtgtttaattttatgagtgtgtgcgcaagagagagtgacagactcatagacatactcacattttgtaatccaagttggcctcaagtgtaaggttctaggtgtgcgctggaacgctctccctgaattttacctttgaaagagactttaaagagagatgcacctatttaaggctatcttctgctgagatttgacagttgtaggctgctgatattttttgccagaagcacaatatgcagaatccagtttcattgcagtttcttggattgttatgtgtatacattggaataagcaaaacctgggccacatgggggagacgaaagcacctggagcgaagcagcagccgtctgggggcagcgcttaccagtggcagagccccgctcactcctcctccttaccattgcacctcctgctctccagaaatacagattgtactgcatattgtctgatgataggtttctgagtagactttttaaaaataaaattgagtaaaattcatgcttgtggaaaaataatttatattcaattttgtctgaactttattgatcgtgttctcatttggaataactgccaggaaactcacctgggctaacataagacagataccatttaccagggatttagctgtaaaaagaaactcatttcgatttcagtggtgacagctgctgaataagttttcttgcgatgtccttcacagcaggaaatgacatgatgggactctgtcttccatgatttcatacccacccaacaaatccacactgcagggggatttgctttctaaatgtctgaactgcctagcttatgtgggcagagtggtttttctttttctttcttttttttaaatgtccaaagtaggtaaaattgtgattacaaaatgggtatctgtgtgacatgcagaaacccctgtctcctctttctgaaattgtttttctctgtgctgtgacacaggtggctttatttgacagggtcagactgaaacttgggattctttacagaatgctgtaagccattactgttgattttggtagatgccttaatttccctttcatggagcaaaccaatgtgatttctgacatgccagttggttcagttcccttgtgctttctttgctgatttcctgttttatatcatcgtgcaaatgataaactcaagctttcctgacggagaggggtgatttgtgctgacctgtggtcctgtggtgctgggcagtgtgacgcacagatggggcagtgtgatgcacagatggggcagtgtgatgcacagatggggcagtgtgatgcacagatggggcagtgtgacgcacagatggggcagtgtgacgcacagatggggcagtgtgacgcacagatggggcagtgtgacgcacagatggggcagtgtgtcgcacagatggggcagtgtgatgcacagatggggcagtgtgacgcacagatggggcagtgtgtcgcacagatggggcagtgtgacgcacagatggggcagtgtgatgcacagatggggcagtgtgacgcacagatggggcagtgtgatgcacagatggggcagtgtgacgcacagatggggcagtgtgatgcacagatggggcagtgtgatgcaagatggggcagtgtgtcgcacagatggggcagtgtgctctgtatattgtgcttgagaatctctctgatgaggaaaggcattcccagaggatgggagagcaaggcttttactgtggtatagcatcgcagctgcactccacaccttatagatgagagaaggaaggagatggcagttgcatgtctaggtagaccaggcctcagatagtaatgtgtggaagcttggttttctccagactgaacctgtttagtttacctccagctaatcccaatcttaagattgcttaagggcaaagtacgtcaaatacatcgaacactgggtttccaagtagagtgtcttagagacaagctcttctgcactccttactcggccccgctgtagcctatgttatgcccacgagtcttggcaattttagtttggcaggctagtgactattctgtgaatatgcctacctagcctaggatcatttggctgtctctcgtcattgtgcatatatgctgcagtacccttagaaaagccatagtgggaatcacatgtatactttaacatcataggcaggaaggtcattttaatggcttctttttttacttaatatccaaactatgattttagtgtgtaattgacataccaaagtattaatgaaaaattttatattatctcattttaagtatttgaaatcaagagtacattgtagttattattaaacatcttaaccaagaataaggaaagcttaagggctcagcagtcacatttggctggtggttcctagctaatgtggacagagaatttctatattttatatgcccaaggagagtaaaactgattgaatgaagttggattccatttaaatctcctgtatctgaagccaaactattgtattttggaaatgtcccaaaggagtaattgttcctgtaatggtagaaaataaacccccaaacttccagatattaggcatccaagaacagacacctaaatgcttctacctcaagatgaaatatttcttacaatggtttaaaactagtagattagaaaggccttctggtgctctctggaagagattataaacaataagcatagaaagctgacacagtagcggcgagccgtgagctatgtctacctttatggggcagaggcagcggtacctctgtgagttcacagacagtgtggtctatcttgtgagatccaggccagctatggcttttaaaaagaaaaccaaaccaaagaaataattcagaaaggaaaacaaccaaggcatgtttaggtctaatacatttaggccttggtgaagaaaaactttggtacagattatagtgatggagtttacaaatcccctgatcttcttggtcacctttgatgccactacccagattccctttatagtccctgcctattgcagagctagataaagattctgagagccctgcttatttccttgttggctgagcctccacaactgccctgtaccaactgggctgggtgccgcacacagaagaactgccactgagaccccaccagttgcaaatgctccaacagaattttcgctcctacctaccgtctgggaaggagatgaagcagctgtcagccatccttgactgatgtgtcagggtgccactgaggggtgacgttcatcgtgtgcttgtcatcagtgccacagcgtgagaagatcctctccaccccaaccaactagtctttctgggagacccacagacccacttttgtataatttctgtttgtttttttccctccaactctcagtttccacaattcaataactgtccctagtgcaggtctatgtattcagtttccatgtgtgtgcatcaacgggacttacatttctgttgctcccacaaagcccagaaggcctgcctctcacttgggattcatgggtgggtgtgcggagaggtgtttgccacatctgtctttttagatactcatggcttatttatttagatattcatgtgtttgtaaatttgtatgagtgttttgaaaaaaccgtatgtcagtgtaactgtgattgtctgtgttcttgtctcagtcatctatcacacccccactccccaatattgcatggacttaactgggttaaaggtagcaccctgtaaacttgggtatataaatataggtttgggattctgataattaatcttgattgtcatcttgacaagggacaggcctccgggcatgcctgtggggcattgtctagaagaggtttacctctcggaatccctgtgaggaattaccgagttaggttaaccaagcgtcaacagcccttgggctgagccagccgtctgttttgttcttagttttgtcttataatttagtaattaggatttgttacataaggacagtaactgagatgtgggagaaacttattagaatctgaacgtctaatagcatttttaaaaaagagtccatcctgtgttatatgttctggtcagttttgttaaggctgggactaggtttcttttgcgggtccacagcactgttacattttagtaaaaggacactcagtccttttacaaccagcatcttcagaacatcttccagtgcaactgaaaacccatggggccacacccttcctgctttgtctacttttttgtaaccccagaaagcctcctagctcacccttggtaccttttacaggccgctcaagcaaatgataagtaatgtacccatagaataacgttggaattcctaaccttccccgaactagttaatcaagcgttatgaatgaaccaatgggtagtgtgtctttttcattttatatttatggcaaattagtatctcagataagaaacaaagatctattttcaagattccctgattagttaatcaaacatttctcttcatatttggcatgataatgatcatggacacagtatgaattttgtgaaacatttaaatggccttttaaaatttgtttttggaggaaatggcatattatgacacaaaaggtcaggagtataattgatattaacttgttgaaaaccaaacagtggtgaaaatgaatcgtcttcagaattaatattttctgttggatctgcatgtgtgctgttactcaacaattaatgaaaaacaaacaaacaaacaacaacaacaacaacaaacaagccatgaattggaaagaaagctcagaagcgagggaagggaagagtgaaatgatgtaattgttataatctcaaaaataaaaagataatgaaaagaatgctatcactgtttttctttatttaatataatcactatggcatatttataaaacaaatgcactatcttaacatcacaaaataagaatgtgcctggagttaccatcactgagttgacaggctttcctttggaagcatcgtggtaccgaggttgatggcactctgggtacagtggagacccacgcccctcacttttctcagtcctcttcagaagcatcccttgggctctccatgcaaaagccaaaattgctgtgccatgagttagcgtgaattaggcgttttcattctttgaggcagtgttgcttgcttgcgttctgttcgtgtctctatctttgagttgttccatgagaaaacaggaaagtcagccctggaactgctccagtgacctaagggaagccattagttaccttcattcttgggaccaaagatgcatgccaaacaccttctcggggagccttgatttcagcccatgggtttagtgtgccagggaagacagaggcagagtttgtggtgcaagaacatgtgggagaggttcctaacatcccggtggatcaggatgcagagaccctgaacaggaccagagatgggaaggtgggtgttctcttcacaggtccaccctcaaattccagtcaggctttctggacttaaaaggttccctggctttgaaaatagattgagcatccagaggtttctcttcgtacctcctctgtctttcccttcatcccccactccctcccatgtctctgtgtgtggagggtctcagaggttgaactcaggccattggacgtgaaggcatttgccgttactcactgagccatctcactggcctgagctgtgggtgacatttttagcatttaagccagagcagagctttttgtgattttgaacttacattaaaaaattcttttagccgggcagtggtggcgcatgcctttaatctcagcacttgggaggcagaggcaggcgaatttctgagttcgaggccagcctggtctacagagtgagttccaggacagccagagctacacagagaaaccctgtcttgggaaaaaaaaattcttttagtgtttatactcaaattgaagttttatttcattaaaataggttttctctgttgaaggagaatttgtatcttggaagcattcaagtaactgagctgtaagttccctgggactcttgtcttctcccctaggttaaaatctaaatccatctgttgagataagtcaagctgttaccttccctggcctagttgtaatactgcctaaaatagtttcttagtgtccagtttctctactttctattcattttcccactctgcttctttaaatgaaaaaacagttttaagcaaacactgtgtaagttcagtgcttggagattctcagggttttcccattgcctacagagcacaggctccaagggtttcttgtcatctgtctttgctttccatgtcaactctattacagccagtgtaagcagtcttgagtgtccaggatcctcattggttggtgcataaaggatccttaccatagatgagaaggggagtgtactggctagttttgtgtcaacttgacacagctggagttatcacagagaaaggagcttcagttgaggaaatgcctccatgagatccaactgtaaggcattttctcaattagtgatcaagggggaaaggccccgtgtgggtgggaccatctctgggctggtagtctcggttctataagagagcaggctgagcaagccaggggaggcaagccagtaaggaacatccctccatggcctctgcatcagctcctgcttcctgacctgcttgagttccagttctgacttccttggtgatgaacagcagtatggcagtgtaagctgaataaaccctttcctccccaacttgcttcttggtcatgatgtttgtgcaggaatagaaaccctaactaagacagagagtcacattcccagttccatttctgtcatcactcccagtggactccacctgaggcatgcgtgacaggtgccttcctttctagatgtgcacgctctgtgtactcccgctgtagtgtgctgtgattctcttttgcctttacccttttcttggaagttagctcatttgtatattatgttaaggctgatgcatttatataaatacttggcatatgtatatgtatatatattttgaagatgtatatatctacatcaatctatatatctacatatatgcaaaaatgacaattatttttataaatgcataatatgtgtatgtatgtgtatgtgtgtgtgtgtatatatatatatatatatatatatatatatttccagaatgacgattatttgtgtaaaatgaatgagtctaaatgtgtgtgtgtgtgtgcgtgtatttttcctcttcttggactgacttcatcccttgctgtgtagttcagaatggcgtcacattcctaatctccttaccctgctaacaggtgtgtgccactgctccctgcttgtgtttcttcttattcctctaaactcagtatgccacattaatctggctaagacaagttcctgtggtataggaattatttgactgtgttttatcaataatcacctataattatatctgtatatcattttaccactaaaatgtgtaaaacaccactatctgtgtatttgcaaatagctcttttaagtgactgcaatcaccagtcttaattatgcacatggatactgaggtttacaggggtcagagacacaaagtagcacagagccggattgtgtcccctctaggcgcctaccgaccgccttgccgtttgcctgtagtctattcactggtaaagaatgcaattgctctgctgtataagaatatactttactgatttttttattagcacattgaatcagtcatttcatgtgctttctccagcatttctagtcaagtctgacatctgtaattccattttacaaataagaatgttgacaaatcagggtcattacgtgacttccagttgtagaactggtgacttaaaacctgaagcaagaggtcttcagacttgcagcctctgctgtctccattaccctatggtacttctctgctttcctgtaagattgggaagagaagtaggtttttattcttgggattttatagaaataatggtcttttatgcctatgtaagagtctaaaatgaactggggagatggttccatggataaaacactgttacgcacgcatgaggactggagttcaggtcctgagcatccatacaaacatggcctgccgggcatggtgggcacagggtaagctggctaactggctgacccagggaagcccacatgtagacgttacctctggccttcacatgcatgtgcacatactcagaagccaccctcacacctgtgaacctaagtatacatacattgtacatacataaacctgccagacagtctcagtcattaaagtaacagcagtgggtttcctgtagcttgatctttgtatgcgttatgttaaatgtcattgatggaatgtgtcagaacaaatcatacattacttccagaagagggagactgtgggaaggagacgcttacacttaggtctgacagtctcatgaggtaattgcagcatcccagcatactactgtgggcttgtcccgtaattcatatctgttccttaatccgtgggattgaccgactgcagctgcttaaagagcatgtgtgcagttcagtgggaaaggaaaagtctgtgcccaatagacatgaagtagagcctggaattctttatggttaactcggctcttatctccagtgttttcttcagttgcatctctgtaagcacgagttgactggatacgtttctctatggaatacagcagctgctctttgttgtgtcaaactgaataccatgggaactttgtttatggggttggacatgggtagtagatcttgtcatggatataggagattacaaaagatgaatggcctcagatagtgcttatcaacttggtgtttccacatttgtaaataacaccagagagatgtttatgactggaagaggatgacagcatccagaagaaatggagtgaagagtcaagtttgcattcggctgcacagcagtcttggtgttttgatcctaacatgtttctaatttcttcatttgctaatgtaagctaggtgttctcttggaatggatatgaggacttaattagagactgcactaagagattccttgcacatttacacacttgagtattttaatgcccagggcttctactgcatgtcaggcctttaacaaaaatgatgtcgatttggatttcaattcagatcctcctgtcagcactgacagcagtcaccatcatctccatttgacagagaaggaacatgggatgccaaaaggctaaatgactgctcagggatctgtgggcgggtgtgttctcttggacacgcccctttccttgtgggtctgatgcagcttttctaatgaggcttacatagcagggctaagctttctcagtgtaggttacttgtaagtcatgcaattgttgccctgggttaggagtcaggagatccaggctgctgctacgttgtgtgttactaggaagtaattcattgcatatgccttattaaatacatataaagcacttggctttctgctaagcttcatgggtaaaatgtcttattataactttgatctgagagtaaaagttctctttgaagagataaaagtatttacaaatctcatttagtgttttgttctgtctttgcttttcagtcattcttacactggtcaagattatagtacccagaagaacaccggcaagatttccttagatcagattgattcggtaagcgccagcccgttacaacagacttgtctcaagtagagatccttgggtggaagctggcagagtgcttgctaccttgctgcttgctgatcattttaagagaaaaggctcgtatcttatgtatgtgactccttttattttaattgtaagaaaaccaaatttaaggggaagtagtttgcagtctttcagttagttttgaggatagaacttagttgttctttacagagagacattagatgctcactagagggggcagcaaaggcaacaagtgaggcctggtcctcctgacagggtccacaggcaagtctgcccaacgagagttcaagtcctgggaggaaggatgtatctgaggacattagagggaataaggatgagatggagagtgaaaatgctgagttaaaaccaaggaatgatgcttcatttttttaaaaagaattattttgcgtatgtgaatatactgctgctgtcttcagacacaccagaagcaggcatcagatctcattactagtggctgtgagccaccatgtggttgctgggaattgaactcaggacctctggaagagcagtcagtgctcttaaccgctgaactatgtctctagtaccatgatattttagttttgacattaaaacaaaaagacctgtgaatttttaaagtatcggctaaacattaatttgaattttctctttgaaattgtttctattaattttgtgttctttatgtctggtttatgttataaatcaatttcctattttcaattgtattttcagacttttctcttagagaaatggaatattatgtccatataaaccctcttagaatattcagagcagttttgtttgtaataaaaagatggacaatatctaatgctcttcagtaagcaaactgcagcatattccagctatagactgcacctggtcattgacctatcctgagttgtcccaggccagccttgaaccaaggataaggaattaccaagaagccagtcttcaaacacgacatgctatgtgattttgtttagtccgttctcttgagatgacaatgttactgaaatgaacagatgagctgtttccaagtgttaagacaggaggaggaggaggcaggggtggaggaggaggcaggggtggtgtaggacacagaaagcagcaattagccagcaggaggagagccggtgagacgtctcggttggtaatgtgcttgttatgtgtgaggacttgcattgggatcccagcatttacaaaaaaaagctgcatgtgctggtctgggcctgaagtcccagcaccaggagggggcgggcagacacaagcatcctagaagctgtgctggccagcaggtttagctgaagcagtgagcttcatgctcagtgacagaaatagaggaaaacctctggtctccacactcaaattcaggtgtgtgtacacacctgcagtaaacacaaacaggaaatcgggacccttgtgatgctgaagtcattttgcatcctgactgtggcgatggatgtataaacctctctccatggtgtaacgtccacacagaagtagatgcacaactgcgggaacctgaggaaagagtgggacatatccactttgtagttgcctgtcgtgcaagagtttatatctgaggaaaactgagacacgctgtatctctgtattacctctgtattacctcttgcaactaataatgtgaatcactagttatccaaagaaaaaatttaaaaaaggaacaagggaaacagatattatataacctagtatgttcaaagtgttaccagcttgactttgaatcattataaaataatgtcttgtttataatcatagtaatataggaatgctttctgtggcttatcttctttattctgacttagtcaaatctacagtcacagcaaatatgacatgtggtctagtatatgttcggcattgccacaacttgcttttttgtcttgtagctgtctacaaaatccttcccaccttgcatgcgtcagctgcacaaggcgctgagggagaaccaccatctccgtcacggaggccggatgcagtacggcctgttcctcaagggcattgggctaacgctggagcaggcattgcagttctggaagcaggagtttatcagaggaaagatggacccagacaaggtaatgctgaagagccatagcagcagcaaatgaaagcttgttagtctgaaactacaagatttgtttttgttttaagaatatgtatttatttatataatgtatatgagtgcactgtcactgtcttcagacatactagaagagggcatcagattccattatagggttgtgaaccaccatgtgattgctgggaattgaactcaggacctctggaggaacagtccatgctcttaaccactgagccatctctctagccccaagatctgtttttaaaatatgcactgaaacacaggtaaaagtatataaggtacatgtatcttagtttatgtaaaaagaaattcacaccttttttatttctttgttaaatttatttaatctttttttacagtccagattttatccccctcctggtctaccctctggctgttcaacatctcatgcccactccaccctccctgttcgctgcccccctctccattagaatgtcctcaccacccccaccctaccagacttccccattctctggggcctcaagtctcttaatctagcaagtgccaaaagcctaggccagtgtctttttcagtaggcatgctaccagcaggctaaatctgctttctgagctctgtttctataaggatgcatgcgcacgcgcactgtgaagtcagttaaaatgctttctttcagactgtgctctagagcatttatttcaacagccatcactgcagacccttccagctgcctttaatgagtctagaacatcaagtcctcaggcccactcctcagttacttttcttttctactaatatcagatggtaaaattatgtctagaaatgtgctttttgtctcatgtcatacaccacatgaaaaaacgtttgtgtcgctttgatttgcttcttctggatcaaaggctaatagaaaatgaagaatgtttacatgaagaaatgccatgtgtggtctcctattagcttttagagctgccataacaaaattccaagtgtagtggttcaagcaacagaaacttagtttctcgtggttctggagtttggaaatgcaaatcaggatgttggcagattcccctgttcctgcggcctgggcctgtgacttgaggacctgttctctgtgtgagtccacagccactgccactggccgccactgctgctgccaggcctctgcttgttctgcactagctgcaccgggtagtatcttattaaccttgcttgcagcctttaaggcactttctcaggacagaatacagtcacatctgagatcagggcttaaatgtaagaacattaggatggcatgactcggtatgtaacacatgttttattatatactttatttaaagacctggctctgtgtgtgtgtgtgtgtgtgtgtgtgtgtgtgtgtgtgtgtgtgtgtgtgtatgtgcggggtggggggagcactccatcccatacatgtggaagtgagaggaagactgcaaccctaattaaaacataatgtccacataaaacatttatgtggaatgcaaagcaacttttaggtaaagtgaaatgtgaaggtagattgttctagaaaacattgatctggagctgaaggacatgaacatggagtaagaaggaagcgggcaaatgtttctgcttaccctttcttctctatagactgtctccccggctggcacgctgttacctggtgttagggctgattgtggtcttggctgttgtcactaaggagtttctgcttctccgtttgctcttgcatttgattttcttacatacacttttagaggatcaatgttgagcatcaatagatacatcattcctaagaggacaacattttgttgtgagataatatcctgagaccaaaagctttgaagtacatctcactccagggaattagatttagagtgtagattttagccttagttttaacggttgtattaatatgtgtgatggattaaaaacttatagacaaagccttcttgtcagggcagggcacttgaaaattgcacctaactagtcaaatacaattctttggtttataaatgactttcacaagaggtatttgaagttttgaatctcatatttcttaagtagtttcttatatttctaacataaatacatcatgctttatgggaatgaatgtacttaagtaatcatagcccgtgtttgaggagtttcattttgttaatttaagttttttacttattgactttacaggctgttccctaatccctccccaccttacaatccttctccttcccgatccccttctcctctgagcaggtagggacccccttgggtgtccctcactctggcactttaagactctgcaaggctacatgcttcctctcccactgaggccaaacaaggctgcccagctagtagaacacatcccacatacaggcaacagtatttgcgatagcctccattccagtttttcggacccacatgaagaccaagctgtccatctgctatgtatgtgtggggaggcctaggtccagcccgtgtgtgctctttggttggtggctcagtctctgagagccccaagggtccaggttagttgactctgttgatcttcctgtggagttcctatccccttcagggccgaaatccttttgaggagttttcttagttataatttttgtattttaattgccagtctacctgaggaaaagcctcaccttgtatcccacaacacattaaatttatcaaacttttataaaggtgtgaggacacacagcattaaaatattcttttagttagaacttggttattaagttgctcagtcactagaattaagtggcactgggtaattgtgacgcattcacagccctgtatcctctcagctggattgcctgcagtggtattgatctcagttgccttcccctggctcagctggacatttggcgcttaagtggccgcagggtccttgcatgccatatgcagggtccatggcttgctgttgtgactgagccaaggaacatttcacaatatttcgtttgtctgagacaccaataggtaataacataggatagatttgaattgttcagcttactaccaatcactcaaaattaagttaattttctttttaacttattcacttacattctgttccctgccccctcctggttacttgatatgtgtgcgactatacatatcaagatgtggggacagagcccacagtttgtgttttcagaaccttccacatgaaggtggtgttctccaggttagatcgagaaaaatggttttgggaactaccgttaaaaaattcaagttgctaaatggcttattcaaccagtagccactgcacatcttcagctctcagttgttctgtctgcctccctaggcaatttgggcataatgatctgtcctgtgtcaataatccatacatacatttaaaagcccgctacatgccaggtcctagtaaatgctaagtgagtatgtacagcagagtgtctcagctaatgtactgctaatgaatctccaatatactccagtatcgatcccatgagcccttggggaagccaggctggacctggagaactcatagcttgttgccttccattgtaagtagtgcctttgttttactctagaatgttttctgaacatccttctctctgtgccaagtgatgtgaaaagggtaggaaagaactaacagagaatgcaggcttggacttaggcaagcatatttttttctgccatacataagctatatagctctgttagggttctccagtgggaaagaactagtagaatgactgtttattaaaaggggctgtattaggctggcttattcagtactgtctgagatagtggctgtctcactctggagagcctgagaacccaggtgctagctgttgagcccccaaggcttcatgcttcagagccctaacctggtgccaagggcctagagattcccagagaacctctggtcttcattccacattggaagactgaagaagcagggttcttataccagcaaaggaacatcacaatagtagcagcagcagccgcaaggtagatgagcttgctagccagagaaaaagcttttttttttcccccccccagatctccttagatttgtgctggcattgtaagatgccacacacatttaggttgggtcttccaactttgaataactaagtttgactgtgataattcctcacaggtaaacactttactctcagcatctctctctcctactcccttaagttgtacagcaaccggacatagaattcctcacatagctcctgcattctattgtggctgttgctatctgtccagggcttttgtcagatgtgaggaatggaatacagcttcagttcctagtctctgagaccatcatacgggggcagcaaggggggtggtgttcataaaggaattcaccagtgttttaaaaaatgttaaattatagaatggcagtttgaccacttattgatatctggtgtttgacaggcaatgtagttgttattgtatatctgattgtatagtcctgaagagaagcattccttaagtgtattttcctgatagaacaatactagaccctatgatctatctagtatcattcatccttagttagcagtattttgttttttaactgtgtctcctggccttacagtaaagcagagaagacataaaatgagctcactcaggctgagggtggaaagtgggatactgctttaattgaagcctgagactctgattctgttgaaatttagagcatcacccgtggtaaacgttacccttttatgaagagtgcaataagatttaggcaagaacatggtacaccagtaaacctggctaggttttattttaaacgctgtatttcctagtgtctggaaagagacatgaggcacatcacaggttgactgtgttgtgaaaattgttcaatttgacaccttttgtaatagaaattttcagttttctatttagtcactagaggtacaataaatgaggtctgatgcttaatcttattttctaccttggtgagacaggaatcaccagggaaaccggccacagcgggtctatatggggtgtcttgattaaactgatgcgggctgtcccctgtcccctcccccagtaggagtagtgtgccctggggtttctgcattgtattaaaagaagatgaactgagcatgcactgtttggttgtgggtgtgatgtggtcagctctctcaagtcctgctgtacgactccttaacctcaaatgtggccaggatgaacctgctctcctctttagttgccatcgataggacattttattagtgcaggaagagaaactaaggcacagatagtgattgtctgctaagggttacagagaagtaactgtctccatgaaatatgagaactaaattgacacttaccattttaaatgcttgataagtgcactactctataatcattcacacatttatcataagggacctatcaatccaacttgtagagaaaccttactcaggtgattggctacctacattttgattttctttttattgaatatctatgttggtgatatgctaagaaagtaattggaatggattaaacaaaggttctgcaaaaggagtctagtcatcagagttttaaaggttctctctctctctctctctctttttttttttttccgagacagggtttctctgtatagccctggctgtcctggaactcactttgtagaccaggctggcctcaaactcagaaatccgcctgcctctgcctctctgcctctctgcctctctgcctctgcctctgcctcccgagtgctggcattaaaggtgtgcgccaccatcgcctggcctgttttcctgaaaatgacatcagcttattcattagttgaaagccaggtagactgggctatgtcagaaggcaggtgagggggcaagaatgagatagagatggagcagggggaggaagggaagagggagggagagggagagaagagggatggagagagaagaaagtagaagaaggagaaggggggctatatgaatatgcaaaggacataggggacaaagtcttcactattttattataaattgggatcaccttccaatttattacaagttctctgggaagcacagacgttgttttgattttgtattcaagtaacatgtattgggtactccaaaatggtttacatcgctcagcaaacaagtctcttgagtagggtaattccgcttgatttgggtggcagcataggttagttgggggagtgtatactttggaatcaaattagagcccagacccatctgctcattataagttgtgtgactttgtgtgagtctgctcccaactccagctcctcgtgccttgggtaaggataatgctgggatttatatgatgattgtatatgatactattcttgctataccacatatgaacagtgcccactatttagcagagaatctaagttgattgctcctaagttcccatttaacgggaactagattgtggtaacaacagcaggagcttcgagtgaaatagtatatctgcccaggggcctcagagggtttttctggagaagttagtatttgaattggtccctgaatggtaacaatatagaattgggagacagtattttctgaatcgtgctatgtttctattataaaggctgttgataactgtggtttgtctaaagatatcattattcaagtgggtgattcttacattcaatcttggtaagagctgggtgttattaaatctcagctaaaaccttcctgctgggtgctgaggaactgcatgtgggtatcattgctctgcagttggatggaagtgaaaacctaagtgggtgattccagtgtcgaatgccagaagagggttggtggatccatggtcttcccttggctttatggcagtgtggttgttgtttgcttttaatctgtaagttgtgccttctcaaaagtgtatctaaaggcctacttagtctgcagccgcatctgacaggctctctgaaagcagtctttccctttgtggtggggattggttttcttactaatggaaaactggagagctggtggacagaggtcccaggacacttgtggttgatgacacgggtgctgctggtacgcagcatctctgaggcagagaagtacttcttggacatttgaggtttccagggcatggcttgaaccttgattattatatctgcacccacggcagacagtgatcttattcattttgtggcactgaatacatgcagaagtttatgattcctaacttactcagcctagcattttctctgaggcctagacccagatatctgagtgtgtgtttattatctattttctgaagcatataaatgtagttcacagatcagcttgggtttctaaatctgagctcctggtccgtggagcagatcaccacatgtcgttgccagcgcattcatctcagggaatggacactctgttatgttgatggactcacatcaagccttctcttacacttgtacagtcagaagagcagtctaactcaactctgaatgtgcaccacgcctatcttctttgatgtggaggagccccgacttggtactaggaggtggtgaggacttaagaccagttagcaggaggtcttcaggccctggaagaggatagtggaaaggtaccctttcctcctggccagttctcagcaacttcttaggaggattgttagttcttcctgtggtagtggcctcctggagccccagaagcatgatacattgtgtattgttgactggaacattcaaaactgtgagctaaaagaggcctttctgttgactgttgatctcaggtatttggcgtgataatgaaaagctgaccaaaacaacgactgtatcatcggttcttatagccacagtgctagtctgcactgtcattgtgctgcggactcttgggatagcgccatagctccatttcaggtttctgtctcagaagccttcatcagtgtcaataaaagcagagaagcagaaaggccaccatgggctagtcttttttcctaatgggatttaaaattcctacaagccctgggacagaacttttaataacattttctccagcgtcctgccccaaattttgagaggggtaattatttccctgatacatagtcaatggactgtaatgtgagagcattccagtagagctgctggtttgggtatagcgttctttgatggacagttggcctgtataccccagctatattactaatcctaaaatattgagagtataatgcagtgcgctcccaaatgtgtccgagtacaattccttattcttagtgattgagagtgcacttcaggacagggaagtgcttcaggctgatcactaggaacaccagttaccattgctcaggaaaggaagtgctgcttcgtagagatttcaagttgagttagtgtcagaaaagcagctctgtcttaaaaaaaagaaaaaagaaactgaatcgcctgtcaagcctattagtgcctaagtctcacctactatattctgataatgagtttgtttgtgagtagtgatggttggcaggctggctttatttttactttttaaaagtaaagttcagctgagttctgcaaacattttatttgacttaactttaaaattttatgtttatttcctgatatatggacatgagactctgatttagtgacagagtagaatatattaacgagaatgtctttgggacataattatgtagatttaaaggagtgatggcgttttaattatgccctttagctaatgcacttgcatattaaatccactcgtgtctttttgagctttcctctgaacctttgctttctcaggcctgaacgtgctcattaggtcacaggaataaccgaaagttatgtaagataagctgaaggctggcaaaggatggcttcaaagtacgttcaggtttgaaaaagaaatggctcctgtgtctaccgtgttctttgccaggtttaacaggaaggaaattgcagtctctgtgtgtgtttagctggcttcctcctttccaaataagcgacattccttggttgtactgtactgaagtcagatgacacgttccttttttaaagctggggtgtaggaagtaaaacgagggtatttcaaaatgatgattggttgtttctcttgggtggttgtgcttgttggttttgtttttgactttgttttcctccatataggctctcagtttaaccaaacagctacctaggagctatgaagtgatttgcccaccttaggagaggagagcactgtgaagcctcccagcttcttggtggggtttgcttttgtgagaagctggactaggcgaaaatcctcagtaaaatttaagatgaaaaaagacaaaaactaaaagctctgaattatcatgattatgattattattttccttttgaaaagaacctaggacaaactggccttgaaatcacctttgtagtcaagaatgaccttgaactcttgtttggcagactcctgcttcccaagtcctgagagttttccaatgtcgggctatactgaaagatcacaggatttaatggcccccagagggccagatagtagctgtgttggcttctgttgcagccactgtgctgctgtggcaggaagccaccacaggtgggacctgtgtggacatggcctatttctcataagccagttacccaactggatttagcctgtgagttggctgtagtttgccagctcttaatttaaaacatgtattcctatttattcaaaccaacattcatattgtatgtatattctgtagctgcttttatgtgctttttatccatgctcattataatggcatataacagggtgctaatatttaaaagtttaacatggaaaactacaagcgtacagaaacataaatccctacttctctatcacatggagcgattagctctctgcttctacacaggatttgtcctttattcatttgttactcatttgttttctctgggtctttagaaaacattgttccaaactgtgcttatgtggtactgtgtaggtcagatttctctagagaaacagtctcagtaacacacacaggtccagggagggaaggtgaggaattgtctcatgtgattctggagaccaaaaaatacagactctgctgtctataagctagagacttagaaaagccagtgatgaagtttagtctcagccaaaggcctgagagccgggacagctagcaacaggagaagggcagtgttcgccagtaaggctgtgagggagaagggtagattttctttctttaacatttggtttaggcttccacacattgcatggtgcctattcacactggagagagaacgcggctttaccaagcctgtaaaatactcagatatttgcagaagtaccaggcaccacatagtccagttacaatgcacaaaatcagccatcataggtagccctgcactccagtatgctctctacactgctccctgccctgcactttggttggtttttaatctattactttacaaagaacgagccatttctataaaaggcgtcattgtcccccttcgtcatcatctatggcactgtgccctttcctattccatgtctcatctttccagtaagaagccagtcctgccagctccaaccgtaggaatccttcctaagtgactcacccttacatttcagtttctgccacccaaaggggcatagtgatgcccctttgccatagccttcaccactgatgtctcacctgatggtctggcaatagaatggtcttcctgaagcaattatgctaatatttgacttcttaatttatcggccagaattggcctgtaaagagccttccctaggtcatcgtgaagactgatttcccctgagatgtaaatcacaaggaacagaatagtttcaaatctcactttatagattgggttgggatctcaaaaagctaggttaattgcctgaagtcgcagacctcatgacaggtctagcagaatcaaacccagtactgacaaaatggcaatgtgctttttagaaccagtgctcagtaacagctcgttcacttttgctctgtaatctcagagtgagcaacatgtagtgcggttttaattgttcctgcttctgtttcaatgaaggaggatttacacagtttcatctgataaactagagagagtttttgagaataaatgaggataatatgttcaaacttctgctccatcacgtagcaactgtctgctgactttgggcaaattgcttagtcttaccacagtcaagtttcctcatttatatcacagagattctaatagtaccttccctaaagtctggttgtaagcattaaacaacctgtgccttgcacacagtaggtattcggtatctttttgttttctgtagttaaactgtcctgtagttattatcagccatttaatctgagcattagaaatattacagaaattgtcagcaaagtgacatgagactctttactgatgcagacggtgatgactggccagccatgaactgattgtcattgaagacactagtgtctcaaggcttcaggctctcctgcaggattgttgagtatatttacagattgggcttgaaaggatgtaggcaaactgaatgttttgcgtttataattttccaacatttgagtcttatcaaatgaaggagggctgttgggtttttgttttcatttttgagtctgcacacttcccgctctgacagcagggaaagcgttcagggaacttgtatctgcccagctggacacagactactttacaccaggtgggaaacaagacaccttctgctctgctgccttcccgccctcacctgttaaaggcacagagccagcccgtcatgtagattgcccttctaatccctctgagttctattcatgaggaagcttttggaacatgtttagaaggtgctaagggcagagttgttctcattgcttgtagggagtcacactactttccacatgcgcttctgtgaaatgtctcgcagcggcactttgcgctgtctttgtactgcttcggtctgaagctgagggtggagggtgtgtgtgtgagcgtttggcctgatcctggagctttcctgtttgctcctttgtactgactttgctcattgcacggcattggcaaagcacatcactgtatttttcttaagttatcaactgtgttttgagccatgttcgaaagggcaactggtttataaatgactcttactgagaatgtgaaagaactttgtgtttggccctgagaagtggaacacttgcattttctagtgcctaagtcggtgtacaggcgacagtgatgccatctggcgtgctgtgctcctcatggagtcagtctggtgagtttgtggttacaaagatcaatacagtctgttctttatcagtctccaccttattgtttacttgcaagtacatcacccagactaggagggggaagtgtacactaacttcaggtttgctttaggaaaaagaatattactcatcttaaaccacagtttcagtattcttccctatatgtcttgggaatttctgtacttcctagcgaaacaccactatacaattaaaaatggaatagaataaaactattttattcaaacttttgtatttcggtaggttactttttgtccaataaaggaacgtatgtgtacaattctgtttcatggatattagggaggtagtgagaacaaagaacctggggtccagtgaagaaggtcgagctgcggtcctcaggtcccgagctgcagtctttaggtgtgcatctgtccaggcagggcctttgcaaaaacacatttccttccaattctgcctttccagcaaagtgaactgggtccaaagctgaaggacacaaccagaccctcacaccatcttggaagccccgagaagctgttcacacgcctttctgcacaaatgaaggagagcgtgccttttgtgtgtgtgcagccccagagttaagtcagtttcccggcactgaggctcttcctaacctgtgggctgtggctttgctcctctttcagagtttcctccccagttctgcaggagcatggcagcagtcgcttgaggtttgcttctgttcgtgcatgatcttggtcaggttagctttgctacaccgtgggctcccccatgtcctcatttgtgtgtggctgctgtcatctcagtgttaggggcttcttgtgaggaacaggcataatctctgccaggcgtgggacactgtcaggcatgtggaggagcctttgtgcacgggactgctagagatagtcagtagcgtgcacatctgagatgagagaaggaagcttcggtcctagcaatgggtagtctctgtagagaatgttgtttgagattcttatttaagttaatggataattaacatgaaagatgcaaagtgtaatattgatttttttgtttgtttgtttgtttgttttgagacagggtttctactgtgtagccctggctgtcctggaactcactttgtagaccaggctggcctcgaactcagaaatctacctgtctctgcctcccaagtgctgggattaaaggcgtgcaccaccactgcccagcaatattgattcttgaaaccaagatattgatgaataatgaagttttataagcctaaaatttatatgtgatgtttttccccttttcactgcttactatttgcaagtcagacatttttgaaaatataacttgaatataaattcatccgagtaaattgagcagaaaccccctacattttagtattcatatttaatatagaatcccagggtagattcatcagccctcggctctcacgtttttctctttgctggttaactcttgttagttactctgcccctcttcttgaggatgtgaaagcggatcgtgaatacaggaggaatcatctggttagtttgttaacccgtcacagtagctgcagagccagtgacacatctgagaaaaggtagcagagactcgtctgggaaaatgttaggaatcaaagctaactggcatgaaggagctgcattacacaccttgtacaaacaccatggttgtatacaggttgacagtgaaggccacaggcctgggtcttcctgttttctctgtgcccaccgctgccttttctttgcactcagagttcatgaagttgattcctttccttgctccccatgggacatcccagctcggtctccgtttctctggttctgttacagcagtacttgttgtcatgtaggcaagtttcctgtacagaccttataaaatccttgggtgctgagaaaagatggattttttaggattcaggtaaaagagttggtggctttgcaacatgtcctctgtgacttgaagaggctcctgcctttcagcacgtttgcaggaacgaaactaattggatgatgaagactgaaatgccgacaggttttgtttgaaaaagaagatatattttcctgtgtagtgtctcggagctgcatacatatgcccttgtggccacatttcattacagctaccaagcttactctcagaaagtcagatcccagggcactttatacactgatgtgaaataccatagtatctgttggaagaacggcgttgattttatacttatacttatacacaaggtaaatctaatcttatagccagactacccttaatatagtcacattgcataacaggtatctcagatcagcttctttgatctagaaggaagcagttggcgatcagtagtttacctttcaatctgggaaatgggatggaccacaggacttggaaaatagcatcggatgctgcttcacttgctcagtcacatttgtaacgctctaggacagtgtggaacgttaaccttttcagggtcagtgagacagctcagggggaaaggcccatgcagccaaccctgacaacccgggattgtccccaggacacacagggagagggagttaactgaatcctgcaagttattctctggtccccaacctggcacatgcacacacatacacaaatgtaataaaggtattttaacaaattgttgctggtaggtacatagactacctctaaggccctcagctgaactaactccctgggagtgcagatctcattagtacctttactgctcagagcccccattcttctatctatgaggtcaaactggatttgttttatagtgttaagatttaagcaaaataaatgtaaaagcataaacatacttgaagtgcttcccgaacacatgaagtaaatggatatccaccattacagcctttacagcttggctggaattcaggcacaggcctgggactgtgaactcaggcttgtcacttagacttcgctgtcactgtctcatcactaatgaggaggtatagcccccggtcatcaatttttagtgaggcatatcaggaaatgatatttcctcagctttgcaacaagaagaatgtttttttttaattaaagtttccatcaaattggtgccatttcaatatattttctttttgaatccaagatgtatgaattggcagtttactcacagaattttttttttgtgacaaaaaaatctatttgatttatgtaatgaaaaaacaagaaagactgcctgtatttctctagtttccctggaatgggatacatgaaaggtgttttcttgtttctttaaagcctgtggaccattcccctttagaatgtctattgtttccgccaaaagatttttctgcataaacttagattttattgtattactgttttgagttttaggctggcaagtaggaggtggcacatcctctttaaatcatgatggagacaagtccgtgaggttgggtaagcatcctgtctacccaccctgtcaccacacagaactaaaccagcgggagtgtgctcacttcttgagaaacgcaaggaaccaaaaatatcatcactaattagctcacagttttgaagttcataagcatgtgtcagatctctttaggacatggggtgtgttcatgggctgtttgagcctccaagggagagctgagcgctggttaactcaggtataaccatgtgtatgtgtgtctgtgtgtgtgggggtggatatctccatgcacctctcctacccctgtgttaaagtctccccactttacccctggaaactcctgtcttcatgtgcttatcatttgtgaatactactttatatctctgaacaaaaatttgaaataaaaacatccatcttttttatttttttccagcatcccccataatgctcgactgtctatttgtttaaggaaaaagtttaattaatgaacaaggtgctgtcagtgttgtgcagcagcaaagaagagaagacagattaaagcttctttcatttggctccgttgagtcccgaatgaatgccgtagtgttgaggagcagccaagatgtggaatttgagattacttgtttcaatattggatgaaggctcagctgagggagagagtggtgggtgcagggttcccatgggggaattgaggtgacttcttttgcataccatgtcaccttgtccccttccttcaggagctacacaacctgtgtttcttgaacaggcacattttgcaagtttatgtatggtacacgatgttttcatagcagaaagaagaagaagagaaggattatatgaaccaggaaaaagtcgagatctcgcactgcactgtgtgtttatgtgcatacctactgaatttaattaatgattttttaaaccatttcactatcaaaaaagagtaggcgtaggaatcagaggggtgcccctgcatcatggccattacgcatccacattggagaacacaactcaaacctacgtcatgtaactgtctgtgtgcacgcatgaaaccagtctatggagcaaacgttgtcgcttgtgacttgggtggtactgagagaagatgaatcctttcatatttatctaaaactgtctcatgtcattgtttgctgaggactcattgtctgctgttactcaagtttcaaaagtaatattgtggttgtatttcttcagagacaaattgatttgggggttattagtattcaacaaattactcttttaaagctgcacatcaaaatattattcctgtaattttatgagcattgtgtttctcattctgggtctgctcatttgtatgccagggaggccctctgaagcagcgtttgaatttcagtggaagttaatctgcatgtgaagaggcttgtggtcccaggagctggcaaggcagagcccgtccttagttcttggttttccccagccttgcttgttgttagatctcaccatttaaatgattcaatttaaatgaatataaaaagttctttctttaggaacagctgtttcttttaaacagaatgggaaatgatttctatgaatgtgagtttatgacacagtaatctaaaaacctacaacagaaatttctatagcagaatggtaatttgagacattagtcacatgcatgtatttaaagataatatgcatgtgtgtgatcatcaagaggagtattttgcataataatatattcaaataaatgattggggtaaaattataagcagttgttttttttaatgtctccaagtgtgatgtagcatagagaaacaaaacaattgtattaaggggaggaatcctttacataattaaatactataaaagaatgttaatatctatacacatttgtgtatttctacatagccggaacaaatgaaatgagtgcagcacaaagtggaacttggagacttagtgagataatcatattactccgttatcttagctctaaaacggggatcagaacatggggaatgctcttgtaaaatactgcttattgtaatttgcagggctgcttttaagttcgaatctttgagagtttatcactatttattttaaacatattcaccaccccatctccttccctttctactctctcctcccacccatcttttcccatccaactcttgagacttcatctcttctctccttccttccccaagtccagtgtgtttccagcaagctttgtggttggggcccaccatggtatgtagttagcctatcgcaggtcatatcattaaaggaaactcactctccttttagctattgagtattaatagtctgtcaactgctgttggggttgtgtcctcctgcctcctcctatgttggcattttgtctggctggagcttctgaaggccttgtacatgccatgtgattggtgtgagtgagtccttcctttgtgcatctaatctctcctgctggcgttggaaatcattgtttccctgatgatatccaccacctctgactcttacaatctctctattctctctgtaggggcgggacctctatattaattggcatttacttcaaggaaaggcttctctgataagaattgaggaaaggctcgctcatttgtggatatgtcattatgggccatatgtccatttagaagaagaatgcattgggttctctcccagggcctatgtctatgtttgtgtctcccttgacggtggctggtatnnnnnnnnnnnnnnnnnnnnnnnnnnnnnnnnnnnnnnnnnnnnnnnnnnnnnnnnnnnnnnnnnnnnnnnnnnnnnnnnnnnnnnnnnnnnnnnnnnnnnnnnnnnnnnnnnnnnnnnnnnnnnnnnnnnnnnnnnnnnnnnnnnnnnnnnnnnnnnnnnnnnnnnnnnnnctcccctcccctcccctccctttccccccctctctctttcttcattcactttacatcctgattccagctccctccctcctctcctcccagtccctcccttacactccttcctcccatttctccccctcctttctcagagagtgggaggtccctcatgggtaccagcttgccctagtacatcaagttgtagcaggactaggctcatcctttcgcactgaggccagagaaggcagcagagacagcccctgctctacttgttaggagacccacatgaagaccaagttgcatatctgctacttatatttagcgggcctaggtccagcccgtgtatgctctttggttggtggttggctcatgatcccaggttagttgactatgtaggtcttgtggtctccttgactcctctgactccctcagcccttctccccactcttccataagactctctgaactctgcccattgtttggctatgggtctctgcatctgtttccatcagttgctagatgaagcctctcagaagacagttatgttaggctcctgtctgcaagcatagcagagtatcattaatagtgttatgggttggctctctccaatgggatggatctcaagttgggctatcattggctggtcattttctcaatctctgttccatctttatccctgcacatcttgaaggcaggacaaattttttaggtcaaggattttatggatgggatgatatttccttccctccaatagaagtccagcttggctacaagagatggcctgaccacttaaggctccatataccctacaggggaggagtcttagctagggtcaccctcatatccttccaggagcttcccctgtcccaggtctctgactcatcccaggaatggccacctccccaccccgatttccattctttcccccagcccttccctcaacacctgacccccacccatgttccctgcctccatccacttctgaaatatattttacttctcctgctgagtgagattcaagcatcctcccttgggtccctcttgttgcttagcttctttgagtctggattgtagcatggttatcctgtattttatgggcaatgtccacttataagtgagtgcgtacatctttctaggtctaggttccctcactcaggatgatattttctagttccatgtatttgcctgcaaaattcatgatgtcctttttttttttttaatagctgaataggtattacaaataaaactgctatgaacatagttgagcaagtgttcttgtggtatgggctggggagatggctcagccattaaaggctaggctcacaactgaaaatataagaatatgtggtatcttcagtaatagcttactgtgtagatctggaggtagccaggagtattggcactaacctgctaataataacctaagacattgagaaaaggccatttctgtcttcattacagtgatcaaccattgtcttcagtgccccaaatgcaccagacagaaggaagggagagcctagagctgtcagacgacacaggagcgagtcatctgctccactccactcctccacagtctgtccttaaaaaagatggcactttttaaaaaaataaatctcagtcccataggagaggttatagaatgagaaaagattattttttttcattatttaaacaagtagaagtggaaatatatgaaatttgccaattgtatagattgatacagtatagtctggcaagtccatagtccctgcctgttatgtatagagctattatgtgccacgtaggtgtaaaagacatagagtttaacaaaatagacagacaaagctgtgtcttgatggcttgggtgtctctccttagcccagttttagtgtgtcctgatgctgaccctccatctcttctgagactctagacaaagttctcagtcacagcacagcctaaaccaagtccagtattattcttgccatccctagagagagtgagtgtatgactgtgctccagtttgtctccccctnnnnnnnnnnnnnnnnnnnnagggttagagcccatggccattgtggtaggaatccctccctccctcccctcagttcactcactcatgagccagccccccatcagtaaggcagtcacttctacagtcttatccctagtccccgattttgggatcaaacccaagaccctgtgcatgttaggtaagcactctaccactgacctacatcttcagcattaggctttactccttatgataacttttgagtgttctcatacttatacttttagtactgaacctatagctcaggaatagagtctttgtctggcatgtccatggccctgggatcgaaccccagcactgaacagaaggagaccccaaactgtaaaagcataccatattagccagcagcagccctgtatgttcctgtctctggatgtgtcaagagaccacagtgattgacttatattctgtgcaccttactctgtagacaaactctcctctcgcactaatgcacacttcccagaaagtatatctattgttaacgacacatgtctgtacttcagtgattctgtgagaagagttactaagtggtttgaaagttagcttttaaagtgagaattgatatgaaacatagataattttactatttgtagtctaatttgtgcctgtgcctctgtgtgtgtttcagtttattaatgcactacagattgaaacatacgagtctgtattcaggagacagtttgccattccccagctgtcttttgggcatgttcgtgtttgaccaacttactactgacattttaattttacattaaatctctacaaatgactgagagatttgttacagcatccagagcacctgtaatgtgaaataatggtttcctttcaacatgagtacgatggtaaaactgaagggaaaaaaaggcatttcttcctgtttcatatcttctgtgtgtagatagtttgaaagaatagcatagcaccataaatcaagtgtcttaatgaggaaccacgctgttgctgtgaggagcaaacagataacctgaagccagacagtgaaatttacatagctctcccctggtagagccatctctttgctttgctgagaacacaatctgtcagtaatttgttacgtgtggttacaagggcgagcacgttgttttgggctctgattcagaaccttcatcacgatctgcagggtggagtaagctgtcctgtagcacacccccagaaggagggagaagcagttctcttccatccagcatccttcctctggtgtgtgctaagctgcccctttgtagtgaatcctgcttgtgtgtcatttacataagagtgtgatacactgctctcattacactgacacaactctgagcatgtattctttctgtaagaggcatatttgaatcctgtaattacatatttatacccattgaggttagtgaactttgttactcggcctttttgtccctgtcactaggaagaactgtagtgttataatttgtatggtgtgcaaggcaggctgaagcttacagtggctttatgcaaacacagacgtacatgatatatgtcttactgctataagacagaatctgttttcgtttgcctgatactatggagtgaagtgaccagacaaattaaaataggaatagacttgggaggaagtggacagaagctacaggtaaaacgtagacaggatgatggtcacctagcagaacctgagtatgtttacttttgggaagtgtttgtaagtcactattgctttatccctgaggagagattctcatttgtgtgctctcatggaagagctggcagggcagtgggcttgggttcctagtcagcccacagccataaagccaaacatctcatcactctagggcatgtcctgccgagtccgacatttggtagggtaggcctatttagtgcggtttttatttttagtgctttaagtttatgataagtttactgaaatgacccagtccataggcatctgtgctcagaatcttaggagtcaagacagcttccatcatgcaccaggagattgttgcccacacctgagtgcggatggtgtcaaaggtacagtgtgaattgttggcttggcgtttatgaatgagggaccaggatggccgtccgagctgagctgtggtaccgtaatgttactaaagtaaaagcagatctggacagtaaagcaatatccaaggatttcctcgaggaactactagaacagagagaatgaggccttatcatagagcagggcacatcaaacagtgtcagcaagtgagcatttacagcctaagaataagtgcagtcagtagatgtaaagttaggggagtattccatgggtttggaaagatgagctgaagttctatcctttgtcagttgcctcactgactgccaagcctgggatcccaacaccctgatatttgctggatcactttcacagtgagccttagtggagagcgaatggcaactctgccatagtgtatgccttgtgcttgcttagtgaggttggagcccagacctgccctgtccactcaggctttcagtttattacccattggcacaattatttttaagctaaaaagtcccccattttttctctcttcctatgaagtactttgagtgttatgcttagtaatttcacagaaaatttgctcaagaaccctttgcctcagcctcctggaatatgcattttatttaaagaagcacagaaataaagtgtaaccttttataggcattttattctgactgttagattcagacctctcaagatttgcctttggaggtgactcattaaatgtcttccacggcttctcaggacttggcaagtattacctaggtgccatggagaaacannnnnnnnnnnnnnnnnnnnnnnnnnnnnnnnnnnnnnnnnnnnnnnnnnnnnnnnnnnnnnnnnnnnnnnnnnnnnnnnnnnnnnnnnnnnnnnnnnnnnnnnnnnnnnnnnnnnnnnnnnnnnnnnnnnnnnnnnnnnnnnnnnnnnnnnnnnnnnnnnnnnnnnnnnnnnnnnnnnnnnnnnnnnnnnnnnnnnnnnnnnnnnnnnnnnnnnnnnnnnnnnnnnnnnnnnnnnnnnnnnnnnnnnnnnnnnnnnnnnnnnnnnnnnnnnnnnnnnnnnnnnnnnnnnnnnnnnnnnnnnnnnnnnnnnnnnnnnnnnnnnnnnnnnnnnnnnnnnnnnnnnnnnnnnnnnnnnnnnnnnnnnnnnnnnnnnnnnnnnnnnnnnnnnnnnnnnnnnnnnnnnnnnnnnnnnnnnnnnnnnnnnnnnnnnnnnnnnnnnnnnnnnnnnnnnnnnnnnnnnnnnnnnnnnnnnnnnnnnnnnnnnnnnnnnnnnnnnnnnnnnnnnnnnnnnnnnnnnnnnnnnnnnnnnnnnnnnnnnnnnnnnnnnnnnnnnnnnnnnnnnnnnnnnnnnnnnnnnnnnnnnnnnnnnnnnnnnnnnnnnnnnnnnnnnnnnnnnnnnnnnnnnnnnnnnnnnnnnnnnnnnnnnnnnnnnnnnnnnnnnnnnnnnnnnnnnnnnnnnnnnnnnnnnnnnnnnnnnnnnnnnnnnnnnnnnnnnnnnnnnnnnnnnnnnnnnnnnnnnnnnnnnnnnnnnnnnnnnnnnnnnnnnnnnnnnnnnnnnnnnnnnnnnnnnnnnnnnnnnnnnnnnnnnnnnnnnnnnnnnnnnnctgtgtcagtgaatattcctctaatcaaacatattatcaaagtatacattatctgtctgtctttacttgaccaatgggttatggacatcaaaaaggttcagaggttcagtccattatcatcaaggcaggaacatggcagcatctcggcaggtatggtgcaggaagagctgaaagttctacgtcttcatctgaaggctgcaagtggaagactgggttccaggcagctaggatgagggtcttaaagcccacacccacagtgacacacctactccaacaaggccacaccttcaatagtgctattccttgggctaagtatattcaaaccatgacatgcagtattatggaaagaacttgggttttggaatcaaagtttgcttttcaggtttgctaattctttagtgtttgtcttgtgttccattgcttctcctctttgaaccgcagtgtcctcttgtgaaccgccatggggactgatgatctgaaccaatcttttaaaagcacccagcagcatgcctggtggcgcctaagtgcctttcagtgaatgttaagtccctttccccttgtctcattcactgaaagtcccatgcatcccataagtgtgttttatgaatgcagaggcaggccttccaggtaagaggcagttgtagagggaaatcagagggcagcgttaatcatttgaagaggcatttcatatgtagtgagtcaggatgtagttattgaaggacagcttaagaagaggagggtgttcccacccagtacaatccccaaaatcaaattcaggggggcagactgattattcttttctggaacagattaatctcatcattgcatgtagacagttggctctcacatccttagactcagtgattgaagtattcaggaaaaaaaaaatcttttcattgctatcattccctaacaatgatggtgtaacaactattctataacatttagactgtattacttgttataaataactggtgatcatttaaagtaggtaagaggcttaacaagttggatacaaatattacacagtttgtaagttattggacactggtgtgtagattctcatatccctgagattgctgggaagcatccctgttagacaccagagactggggggatgattctaaccttcactgtctcctccctgagaaagtttgtattgttattgttatttaagatgtttgtttgtttagtaaacttcagagaccagggacatggcagtaacagaaaaaccctgtgtgtgtgtgtgtatgtgagagagagagagagagagagagagagagagagagagagagagagagagagagagagagatgaaagacccatggcagtaacagaaaaaccctgtctgtgtgtgtgtgtgtgtgtgtgagcgtgtgtgtgtgtgtgtgagagagagagagagagagagagagagagagagagagagagatgaaagnnnnnnnnnnnnnnnnnnnnccttcctcctccttcctcctcctccctcctcctccctccttctccctccttcttcctccttcttcctccttcttcctccttcttcctccttcttcctcctcctcctccttcttcttcttcttcttcttcttcttctcttttcttttctttctttttttttttttttggtttttcgagacagagtttctctttatagccctggctgtcctggaactcactttgtagaccaggctggcctcagaaatccgcctgactctgccttcttaatcatgagtttcaattacatataatggttacaaatctcatatttttaaaaacaagttattctaagtcccacatctgaacactcagtttctcctgtggtttctttccataatgcatctatatccgaaggtaggagcttgtctattacagagtagcagaatctgagtaagccagatcttttcaacagcaggtttctcttgtcctgggaggtttgcagttacaagaaaggagatagatatcatgttattttaatttcacacaattcttattctcccaacacagttaaccatctacctgcccttatcctgttttcatagtaaagcacatatatggtcacctggagcacttcaggtcagagatgctttgcttttcttgagacaacagaaacagaaggtctgctcaggccgctggctgcgcagcagtaagtcctcaaggagccccaacgctcgtcagcaaattcataaaaccaggaaaatcagattcccagtagacacagaagctcaatctttatagtggacaccgacacccagttactacctttggtcattagcctgtcccctgtaggtgaaacttcaagagccctttgtaaccaggcttgcctggttcttgttctctgaccttagcaggccttttactcggtaactaagaatgtgctttttatcattgtgttgtgccctaggatttctgctacaaaacaactggaaaaataccctgacctgatttaattaattgtacataaaaagcatctagaccccatctttttatctttttaactaaacatacttttaccttttttatagaaatcgtcagctaaattattaatctatccgagtggcattgatttttgagaaatcactactattggtatgcattgtgattgctttacccagtggggaattggaaacctcccaaggatattcatgcagtacaaaacccagggtgactgagtcaacaagaactagcagcagtaaggggtcttcagcaaacaggaccctccctcggggttttccctctctgggatacacttatcttggcttcactggacggtgagctgttttcctcaggctccaatactggctgcagatcctccactgcatggctactgccaatggagcatgtgtgtctccgaaccccgaatcaccttgttgtttgatcctagctggtatcgctgatgctgttactactgtattgagtgatgtactctctctgtctctctatctcttcagtttgataaaggttactcttacaatatccggcatagcttcggaaaggaaggcaagaggacagactatacgcctttcagttgcatgaagattatcctgaccaacccaccaggccaaggggattatcatggtaagtgcttgtgatggatgctggtgagtgctgtttgcattagtgaaggacctagcttgtctgtgtctagttggagccccattactctgacagtagtttgtcttattgctgagctcactcagcttgtgcttggcttctgctggagtaggtttcctttcctcctctgttcttgtcttgtgttctgcaaggagcttgggatagaggtgttttaaagctgtgagaggtgtggaagccctagtttcacaataacacattttgttgatgttcaaaaggccttgtgctgaggcacagtgtattgtttgtcttactactgtcatctgagtaacagattaagtaagcagtttaacaaagccccggtgtcaagggtgtatgccagtttgcctaagttgtgtacacacacacacacacacacacacacacacacacacgtttttcagttcaaaaacgtattttctaaaataattcaaccagcacatctttaaaagcttcccattttgtctggtatgtcagggaatgattaatagtttatattagtaacctttctagattgccaaagcttgctgtaaccagatgtcagtattttgttttgttttagaatcttaaatgaaaccaccatgaaaagaacataccgttaagctgttaaaaattgggcaatcataaacaatatttttagaatttccctcccctcccctnnnnnnnnnnnnnnnnnnnntcccctcccctccgtttctgtttgcttgataggtgaatcaagttgctataaatagatgtggcatggtatgtggtctgttttcgagtgggttccatgactgctgcttgtaatatttgtcctgtttctctggatggcatattttatagatatgttatgtgcatttgagtataatgcagtttaatctgaagcttcattgttggtttttgggctaggtgatctatttagagatgaaagtgggggaatcagaattattttattatggcctatatgtccttttgtgtttatcaatgtttgttttaagaaattgggagcctcaacatttggtgcacatatattcacagctgtatcttgttaatatgcggtgacttcatctcttttgactacttctggccttgaaaccagaggagcagagttagctggttttccatttctgtttgcttgatagatgttttccatcatgggcgtcaccatatgtatactagtaagaggtgcatctcggaggcatcaggcaggaaaccagttcttaatttctatagtgttttgaatctgtagctcttaaaactgcttaggacttgtgtctgtccgctgactccaacacctgttcttgcaagctgcccttcattctctagcatatgaatcacagtgttctaagcctggtctcttcatcagcaaccctgctattttacgtctactgcctgcttggcatcttcacattgagcctctccagtgctttgcaggttttctctccttgaaataggcttgagatgctcttccccaagaatgtcaggttgcaggagactgggcaaggactctgttcagatggcgttctctggggaacagaatgttctaatggaactacttttcctgtccctctatagaagcctggtttacgtatccatttatattatctatatggtaaacactgtgagatgatagattttctggatgtaaaactcagagaagtattaagctgtcctaatgtcatctcttgagctactctgagatgtgtttatgctgaaacttcaatcacagatcagccagttggctctgcccagggcactggctgtgatggagttctgctcaggagtttcatcttctgtcagttgcgaatctctgcacttacctcaaatagaccttgagaccctgtttctttgttactgattttttttttcagggaaatagggtattttttctttatttaggatagagaagtgacatctgacctcagtatatgctcagtcagaaactggacatgtgtcctcttttgttttcttattaataaaattatcagccacctacattgcttcgacttcatcacctaatgctgcttagaatagttgaagaaccagttatgaatctatgtaagtctaactgtattctggcctatcgtctcttacagctgtatcattctgcacttttgtttgtttgtttgagttccttctttttattaactcatgcacaactacttgttttctggtttgttgaaacagtaagtcagacaacacttgccacagtaatgcctgtcaaagtggcttcttatgaaaactccagcaccacattcatcagaaggacactctcgacgaagtaggcaaattttgccattttcatccaccttatagtatttcagcacatccaacttaaccttcttcctcttatgcttgttcttcttgggagtggtgtaagacttcttccttctcttagcaccaccacgaagtctcaacaccagatgaagggtggactccttttgaatgttgtactcggacaaagtccggccatcttccagcggaggtcagcctctgctgatcaggaggaatgtcctgggtcttggcctttacattttctttagtgtccgagggttcaacctctagcgtgatggtcttcccaaagatctgcactgtagatcaccacctatgccatctccacccacgaagcatcagaaagatcactctactcttttaacactgttgttagctgtgggtgtgttcacctgtcttttattatcttgtttgttcagcccgaagatcattctctttgaagtgaagagtaggaacagggaatgttatctgtaaaagtgacaccagcctggctaagtactggcttacttcctctgagttctgagtgagcatattgggaaaagaaccttccttgagtttccttcagtttcctcctggcgttgtctttcaggactcttgcgtgggtcagttcaccttgtcaagtataatttgggtgacactgttcagtctctctctctctctctctctctctctctctctaatacaccttaattcttctttaattattgtaaattaattattattaattaatggaaacaaccaataattaccattgcttctttctcattgggtttttttttctatatttcaaacccagatgctgcaaaaataggctctttttaaaaatccagtaagatatttgtattctttgagaatttcatacatgtattcccactctttgatcatattcatcctcaccactcccctaactcctcccagacccacccctcctcacctcaccacttcatctctctggtttttaatttaaataacttactgtgttccatttgtatccagtcagccttgtggaatgccagagtctttactatgtatcatatgttttctcaaaatgtttcctgtactaaagtgtatttgtttaaatctgaataaaggaaatgctataaatttgcagttttcatagtcttagagatctgcagggttacaatggaggcttgatttatactcaagctcttccagaaatgaatttttccttcctggcccttttccattgcgttttcacccccaattcccactgatttcatataaaatgtgccattgctcccagttagcttgtctgtgtattatgctgtgcttaaacagtctctgtctttcttctagtggcccattcttttattttgctcatgaaatagtgataatgcaaatacacaatgtgtagtgtttctttctaacagtgcctgattgtccacgttgttcaccgctctgattcctctgagttttggatatttctattatctataatactccttttctgtacctttatgcaaaattttcagactgcatcatgagagtatgcaaattttaggtaaactgttacagctacttggtgattttgtgttctggtaagagagcaacaagattaaaactgtttccctcttcctagtgagtggccgtgtgagcctgagagtgcagcactgttttacataactcttgagcctgcagcatcctgacaacacagcagctaaatccccatttagatagagaggaaagtggttgcacctacgggcaattgactttttattaataagctgttagacagttaagggcccttcggcagccactcaagcgtggtgctgtgctgaatcctggtaaataacctggttgtcctgcggcttgtgttctgttgtcagggtgccccttccgtcacagtgatgcagagctgctgaagcagaagatgcagtcctacaagatccctgcctcggggatcagccaggtaggtccacttctgcttagggtcctccatgattgggcagctgctgtcctctcagatttgtttataggagtgatgctgtgtaatgagtgcatcaggactcacaccacactcctgtcttctgggtgaacggggccacagccgtgacttttctggttcctattccttggaaatcccaggtcttccgtctgctatgctgcagttttgtttctccaggcggtaaaggagcacagcaatcccaccccacagcttgtttgtttctttgcttttctatcagctgagggcctcgttaaaaacataaatatatgtttaatgtattgaggtttaatgtagtgatgctaaaaattcttgatagagtctttcattttggaaggctgttttccatggaaataagatgctgtgcagtccatccaggagtgttctggtaggcagcagtggttgcttggtttaatccgtatgtctgatggcagctaatttaaaaacaaaacaaaacaaaacaactttgttttgttaagaatttaagtaacaaatgcacaaactgtaaacaaaatattcaagcgattacatcttttagtaagtctgttttttaaaaggtaccatgacgctgttaggaccattgtctacaattcagtctggacttgctttggattctgtgagctgaaggagcctctctttcctggccccagaatagtcatggtccattcttagacagttatttttttatttgaaaaacatcaatgtacaagaaagcactactgtccaaaatttagacgagtctagttaattcagcttgcttgttcagttctgacccacttattctaggcaaggagaaagtctatatgcagtctggagtctaggtagtattttctgaaagaactgatcgtggagtcaggaactggaagcaggaatgcatgaataaaagacaggactgtgtagggtcattggtattcaagctagtgatgatgatggatccagtactgccaggggctagcctcagatgttctttcttgttggttcttcttgaggcaggggaggaggaagaggagaaggtcagcaggggtaagacttggtcttaggagatatttagggttgctgtatactaataaaacatttacctgccttaaatctaagtcacttggcttcagtagctgacctgtcttctgagttcctttgaggtgagaaactgtttagcaccttgtcataaaacagcaggagattaagtaaagtagtccttgctctatctacccgggaactgtggggctctaacttccagcctgttagttgaagtcccaggaagaaaaaaagaactctttgaaaagtgattttctaagttgtaaaaagtttcctataaaagttctctaagaaaaagggggatagccaggcagtggtggcgcacgcctttaatcccagcactcgggaggcagaggcaggtggatttctgagttcgaggccagcctggtctacagagtttgttccaggaaagccagggttatacagagaaaccctgtcttgagaaaccaaaaaaaaaaaaaaaaaaaaaaagggtgggggagggggataagggtatatctaaataaaaggggaaataatcagtaaaggggatctgggctaagaaaatcaggacaagaaaaaaattctttgtcctcagcacagatgtatatctctcagaatacatgatcacatggtaaaaagttcatcacaggtttacacataaattcaagtcaaaattgaataaggagtttacaacagagaatgtttacatgcatatccattaggagtaattatctggctaaacatttatcatttgtcccaagcttaacaggttcatggagagttgaaaactctttgtggccaaggtattagtgaaggtttgtatagataaacctagtcaatattttatcttctgtcctagcacctatagtatatcattagttccctttttatgacctttggttagtggttttgcaacctcttggaatttgctctgaatagtagatgcctgcctgcttgtatgacactaaagactagcagcattctcattgcaattttgattatctgagagaaactaatagcagtctcactataaaagaatataataattactaatataattttaggaattcttataggatcatcattaaggattcagaaatcagcaatttgtctatatagcatcactacaagacagtatgtttttgttgttctgcagagatctgctcaaacaggtgggctagtgactactaattattatgtaaatttaataacaggaaaagcatattaatagcaggaatctttcctaaaatgaatttttcctggaccttgcctactggggtaaatttgtcatagattttaatccaaggtggacccatctcaggaagatctcctgctagtttttagcttctcctatgatggctcctgacacagtatataagcaaatatgggcatcttagaagaactagttagtttgggagttgagttttatatgtaagcaaattagaacagcagagagaagtggttttaaagctaattagagaagccacggcaatagttcctagttatagttataagattgggaagactattaggaagccgaggagtctggatgtgatgatccataactagtaagctgctggtggtaagctgaagtcagctcttctgaggctggggaaaatccaggcagaatcctggctactgctgtcaagataagagggaatgggactaagaaattcagaacagaaataggagcagagggaatgtcagggttctgtaatataacagaacttacagaatgaatctgtatatataggaggatttgttagagccacttacaagctatggtatagcaaatccaacaatggctggctatgaacagaaattccaagaagtaagtagttgctctgttcatgaggctagatgtctcatgtggtcttcagcatagactagaatcctgaagaagtaggttctaatgccattgaaggaatgggcttgctagtaggtgagaacaagcccagagcacaagcttccttcttccttgaccttatgtaggcttccagcaggaggtgtggctcagattagtggtggggattctcagctcagaaaatctggattaagggtgtgtcttcccagtagtctagcaagactgtcctttcagagaatccactgaatagatgactcagacaaatgcctactcccacagccaaagagtagatggatcttgggaactcttacggaagaaagattcggaggaagggttgttctcccagaggggataggaactccacaggaagaccaacagagtcaactaacctaggcctccctgcacaaatgtagcagcatgtgcagcttggttttcatgtaagttccgagcaactgcagcgggggctattccaaaagctgttgcctggacatgggacatgttcttctagctgggctggccaccttgtctggtctggcctcagtgggatgaatgcaccgagcctccaagagacttgatatgccagggtagggagagagagagaaggattgtgggagagggtgaccgggatgggggacagtgagcaggacttaaagaagtggggaaaaaaaaaagtgtgttggtgtgtcttcctatctcaactggattagaacatcttcctgtttcaaattaagcaaaatctcctcacagctgtgccctccattgttgggttttagttaattgtagatgtagtcaagttggccatcacaggaaggaaatatatctgcagaaaaggttagttttacaaaatatcttgtagagaagagcttttaaaagatgattgagttctacttttgtaaagtagtagctgtattgttgaatgggttattcattgttggtgttggtctaagggtccatagaatggtgggaacggaaagcaaaaacttacttctttaaaagataatgaataaaggtgaccgtgggtgacgcaggaaaactgcctgagtgatgcccaggaaaccacaagcatggggctgagggaggattccatcaggatagaaatgctgaagggaactcaagccagaatgaagatggaactgaaaagcccaacaatccaactagaaagttcaaaggctctaggccaaacaatcaaggcgtatgaaaaaagtttcaacataggaacgggcacagaggcagtatgagacagcataacaaaaaacaagccctagaactttaggtggagatgagggagaagaatcctaagttcttcaacaagatcatcgaagaaaactttcccaaactaaagaaagacacccccacccagatacaagaaactctgaagaacaccaaatgtggaagaatgaaattagacccatatctatcacgtccttcaaaaactaactccagatagatcaaagacctaattaatatattccatattaataattacatattaattaatacatgcatattatatatactatatataaatatagtattatcacagatggtttcttttttcattaaaataagattgttttcatatacagttagtcattataagttgtaaaactcacaaattggttgcattcacaagatttttcaatcaccaccttgtcaagtttccaatctgtacatcacctcagaagataaccagtgtttattagtctccagcgcttggcaagcagcagtccactgtcttccacgatgctctctcctaatcttctcgccaactttcctcagcgtcctgtccgagatccctggacattagtcacaaagtcttaacttagtgtccttttttttttaaatttatttttagttttttaagtttctactggtagaggaagtgtctgttcatgtattttgctcacttttctgttggtttgttgttttcttgatgaatgtaataattctttttgtagataaggcccttgtcagatatatgacttaaaactgcttccccttactgtagactattaatttcttgataatgtaatttgatggaagcagattttaatgtgggtggagtccactgtgtattcttttgtatctcatgtctctgatgttgtatctaaaagtccatttgccagcattaagatcatgaagattgacactgcgattttcctgtatctgctttatagttttgagtctttaatctgttttgagttaggttttgtgtacagtgtgatgttgagtctctttgcattttgtatgttaatgttcagttttccaaacaccagtcattttaaaaggtagcttgctagttgggggatgtagcttagggatgagacctccaaaatagtgcagagtaagttgaatgtaggtgtataaggtgttttctgaactattagttccattgttttggtctgtatgtctgtcttgataccagtactacagtttagatatcacagctttgtactgggttttgaacccagaagtgtgaattctccaattctgttcttccttttcaatactgactcggctattctgagcctgttgtaatctcctatccatttctggatcagctctagaacttcaatgggtaatacttagtgtgcttgggtcgtactgatgtctgagcattgcatgcaagttcctaacaaaggacatcttttctttattggccagtcactcacacaggacatctttcttttactcagccagtccctaacatggggcaactctcctttactcagccccttcagttccctccttgtgttccacattcctcggcataagcgtttcttctttctctggccattcatgactagctttagaaagacttttttattcatgtatcttccagcatcggtaggttagtttatcatagtaggttttgatggattctgtaacagcaggtcttctgagactggatgcagcattatctcctttgcatctggatgccttgcatttcctgtgtagttgccttcaggattgtaagtaaatccctcccactcctggcttaagtaggagtttttgtttgaacctcctgagacagtgggcatgccaggtgccttgtagtatctgttgaggcgggtcacagacttttggttttcttcactttagcaaggcgctgtattatgtcagttgactttcgtacttcagaccacttagtgtcagtccagtagccattgtcagggcgtctatcctttaactgtgctgctggatttgattggtgagtgttttggttctgtttataccagacaggcactctgccactgaattgtaaacgcagtccagacttgctagtattttattggggttgatgtatgtatatatgtatatatttattcataagggatccccatccattgttttctcatgtttaaagttttaattactttgctgggaggttttgaaattttgatttgatattttgcttgttatagttttgtctgatctcttgggtcaattttgacagcttatatttctaataatttgtctactttttgtttgttacatgattttcttggtttcttttaactctttgaacatacttatggcatactgtgttgttcgtggctacagtgtattccacctgtgagtaggtcacactttcttatttctttggatgttttatactgttctttaggaaaggagagaatctgaacatgcaggtttctatctatagaagtccaggtctttatgtgtgacccatgtttatagcctcgtgtagcagatggttctctgcgtactacagttgtagtatggtgactgactggagtgggctgaccagatattgaattgatttctccaacttggggcatatcaagaggcagtgtgttaggaaagccgctctggaaaggcttgggtgtattgactcatttatcagtataactgccactcatcagaccaacagcggatggtgctgtacctgctgtgtggagctggctggagttggatctcaagccactggagtcagttctaatgtaacactgttggtgttaaacacaccatatgaagattcatatagaaaagcattgtaaagtagctttgtcatattttagattaattccatgctagaaatgataatatttttgacatatttattttaaagtactaaaagtatgttgtctgttccatttgagctttttacgtgtgaccatagaaaagttaaaataccagccatgccctgggctataccttggtaggagagccctgctctcgatggtgatctctgagctttgagtactcgagacttttcattatcagagtgattaggttctgtcttcacattgtaccttagtacaactactcatttggtagaaatcatactatttatgaatatctttagtttcttttccattttagtgtttttcaatagagaaggaatatttgttttggaattttgattcagtataatcattaataattatgatacaattatgtaaatattataatattataatattattcactaaagtggatctgattagtgctttcaagaaacttaagtagtggtattaaagccattgaatgtggaaaagtatatgttctttgtactttttgggaggctagtggacctgcttttcacagtccaaaaactttcaggcaattactgaccctattaaatctaaactggtaagtgccttttaatgaagagatccttttaaatggacagtttaaaaggcttcaaaataactatggcagggtttcatggcagagctgataagcgctcctataaaatctcatggctccttatttatgtgtgtataaatctgagctaccgaagaccattgtcatgttgtcagataaggagcacccactatgggtgatggtgtccagtctccatcactgagggcacagtgtctgctgtggtgccagggctacttctgactggacagcagcactgggtactgtcgttagtggtggagttgagagtgtgtcattagtcagtcgcagaactgcagtagagatgtgatagccaggattatatgtttagttttgtgacaaaatcatcaaatatttaattcaagtattaaaatactttttcccttttagaggccacagatagttatttatttaaaaaatactattcaagataaatagttcaaggaaaagtcacacatgaagttgaataacatttgccttggttgatgaaaacattctctattttttttaaaaatagaaagtgtattttaaaaaatagcatttttatagttatgtattttctatagatttttctatgtcagaaattttgatatagatagaatagtatttataggtactgatacagatagatacagatagagtggtatttggtactgttacataaatccaacgtgtccactgtagccataaaactgcttttcttatttgttcttgtggccatttttatagagcattttgtcaaagtccccatctgttttgtagaaacaggctttaatagaaaattaactaactgtatttgtaagtcaatacttgacactcttaattttctcagctctgacccacttcagagccatggtgtgcagttcctgttagagaattaattctgtctgtctgtctgtctatctatctatctatctatctatctatctatctatctatctaaagtgtttatatgttatacgtaatgcatatatacatgcgtataatgcatatgcaccttgaattcctttatccttggaaagctattcagtggccggctttaagtgtggcttctctttctattatactagcatttccattagatacaactcatccttttataagatctttaaaaatactcacgaatcagtataagtgtcttccacctgcctataaagctcatagggcatagcagttctgaactatcttgctttttcatcaggacaaacaagaatgtatccaaagcagagcaggaatttgggactacatgctggagctgagggtcacactagcacctgctgtgcctctaagtaggcgtgtcacctgagtcctcagttgcctttcctccagttcctagttcatttagttgatgatgtttcctaaacacaacacactgacattaatctgcacggagaaattcagtacctgagacaacattttaattgctttgtaagaatcatttggtacctgttttgctgaatgaagaatgataaatgctctgataaagaccagtgtaatcaaggtgtcacagatccgaaggagagcgggagagagtctgccacgtggggatggtattcaaatcagtggcaggaagtgaggacacagaacaagaaaaccacattcacccaatgttaatgaacagccatttggctggcacagtgactcagcaggtaaagatacttgccacacaagcgtggtgacctgagcttcattccagaatccatataaaatgtggatcgagagaccaaactctacagttagctgtcctctggcctccacatgtacaatgtgactctatcccagttgctgttgaagacacgagaaatactgtgagaggtgatactaatgagacctccctgatggagctaacatcatggcaggtgctgaatgcaggggagggttggcatttaggagcaactctggtgacagtgtgggtctgttggaagggaaaaccaagaagcctgatgataagacaaagtgatgggggctgggcagtagagagcagagggaagtcttaaaggcatttggaagtaaaatccgatcaaaactagacttgtaaacagtaacaaatgagcaaggaaaattcttgacatgctatgttatcaagcaaatgaaagcatattttcaagagagagacacttggccttgttctcactagtgaaggtcatagcagagatgccatggctgatgtttgggatataagcagagcactatatgcaggcaggttgcacacttcatacctctctctgccaagcttccctttcaaaataaggaagcttagtggagtggaaagtctgtgtggtctgagtcttgaaaagtcaagcttttcaggacaaagcaagactgatgttgcttctacagtaagacacacgctgaccttgaatcacacacgtgagctgcacatgattctagttggtgggtgcagcgtgtgctgctgtgcttgtgcattgtgccagtcaccaaggccaagggtgggcaggtggcagctttctgctgccaagcgacccttgagcatcactggcgggcactggagtaaatggtgggaggaagctgcacctgcgctcagagtttagacttggaacatgtaccgggcattgatatttatgtttatttctcttgtttgtgtggtatttcccacccgtgtgggtgaacatcctatgtgtggattggcttggcaaagctcagtctgagagatcgcagtcattcaaatcagaatgacggttacttcatctgtcttcagagacatcttggttatcccactttctgaggatgcctttcaggtgtggtggtaaatgtctgccgcaccagcactttgaaggtggaagcagaagagccatgagcttgaagctagcctggacgacatagactgtggctgcaggtgcaaaccagaggacttgcagcactgaggagagcggtgaacacaaagtcccatccctaactgagaagccatttgtaactgatgcctgctggagaggggagatgtgttttctccagatgagtttctgggtaaatcagtcacactccaggacaggctcacaccctaggtactcacactggggacaggctcacaccctaggtactcacactggggacaggctcacaccctaggtactcactctccgggacaggctcacaccctgggtactcacactccgggacaggctcacaccctgggtactcacactccaggacaggctcacaccctgggtactcacactccgggacaggctcacaccctgaggactcacactccgggacaggctcacaccgtgggcactcacactccgggacaggctcacaccctgggtactcacactccgggacaggctcacaccctgaggactcacactccgggacaggctcacaccctgaggactcacactccgggacaggctcacaccctgaggactcaggcagcacaaggctaactttgtggggtttggaggtgggtggatgggtaattttctttattaatttgatatttgtttggtttggtttttatgtaattggtgttttgttttgggaagggacagggacacaggaagagagataagaggcacaaggacatgaagttgtgtgggtagggagagaacctgaggagctggaggaagggcaaacatgatcaaaatatagtataagaaagaaatgcaaataagaaagaatactgacaaaagggagaagagaaaaataattcccttagagaaatgatcagtaatttgtcctgaggataaagtataattaatttcctttgctaaacatagcaagtacaaatggatgaactttttttgtgaagatgaaaagctgaattattttattttttaaagtttaaattcttggtggattttatttgcctactagaggataaatgaaagttgaaggggaaatcaaggcatatacatgacataaactttgtcctcctgtgtcactgagagccaggctgctgtaatgatgctcttgcatcaaaattttattctataaatactgggatgaaaaaccaaaagttgtattgccatttgagcactagtgccacatcttcatggaaactttttcttttgtaatttgttttcaaggtcggtgtggctgttaagcttgatgatacttttctggagcgtaactggaaaactcgctgggcaggcttaggacttgcctgtggcttatttccttccagctttcaggagccgctctttggaattagtgctgcctgcgagaggaagtctttttctggggtctttgttggggacaggaagactggagagttttgtcatggctgttgaagaaccctccgagctacagcagccactggagtaccatgctgcagacttcagggcacttcccgcacttctctggctttcccagtcccccatccagttccctcttcccactgtctgctgctttctgtcctccttacgtgagtgcccacctctgtgtggattgtgtttccttgacccattctgattctgatccttactctgcactgatctctgcctactgtcctcggaaggacatggctggcctatggtttcagtgtttgcatgagcttaggctcaccgtggtgagcacgtggggagtctagcctagtgaagatgacgagtgaaggtaattaggcatcctctaggagggagtgacagccccatgagattggcctgctagggctttctcagtcttttggcttcctgtcttgtcacatgatacctttcttccatttcatcctcattagatgccaaactgatacaactacactatcttgggcttttagccttcaacatggtgagctaataaacctgtagtgaatcgggtacccactttagagcatcctgtaatggcagcacagtgtgcactatgcagcacacactcatacagggagtgatctttctgagctcctgggactgtgctggaaaagaactctgttgagaaggactgtccccgactgtgtcgtctgccttccccagttctttacccttagcaacacttcgattctgacccaaattctgatccccagagtctcttaggcccttcttggatttcttgaacttatacttgtgctttttatcacaaacttagagtattgggggcatatcttggtcttcccttccatctctaactttgtatttcctgccttgaagtccttcagtccaacaaccattctattcatgcctgtcttgctaactgccttaacacagtgtttaatagtgacgttcatgtcagaaaaattcaacaaaatcaatagcaaacctgcatcatatcacactagataggctaatgctatcacatctgaatcacacaggatgttagcattatagctgcatgtgtcataactgtgttatttccttcctccctccctccctaccgcctgacacgcgcacacacacaaaaaacctcaattagccgagtttatatggtattttgtattttatatgagaaataaatgccaacatataagaaacagctgaatcattaaaaaaaaaaaaaaaaagactcattttcacctcctttacgagtggtgaagagattgtaagagctacaggaccaggaactcatctgagaagctgtgtcttctctgtgggacaggtaagctgccccgtgaaacctcaacagcatggctacctaagcaagacctgaacacacacacacacacacacacacacacacacacacacacaggaacagcaggtgacataccaacactgatgggagagatctcacaagccaccaccactagatgaagagttataggcacttaatggctgctaagagagggagaatcagacttcccacggatgagccccttaacctgtttatccagtaccaactgtcatccctaaagcatacacacacaagcagttaagtggactgcacgctgtatgaccgtagataaggttatgtggagggagacagtgggagacaggagcagggtaggactttaagggacagaagattaccagaggatattatgcgtatctaccaaatgtaatagtaaaagtcatttgtacaactagtaaatgaagatgtaaaggctttgtatgtgccttgtgtcctgttgttggcgagttcaagtcaacctcttagaaagacactgtttttaataacctagatcattatgttaggaaagcatttgagaagggtggttttgagtgatgttgtaaagcatcagggcccgttctgcttgggtgttttcatgtgaagtacctgcctcttagaaacagtgtctgcctgttaggaaacgctttagtttctagtctgagtacttccaaccactgtctctgttctcatcctggtgggacccaccagccagacccagagtctggaaaatgccctctgtcctaggcagtctatagagttaggctggattggagaaagtcagtgcacttaagccccgagagatcacctgtcagcctgcatctctgcagtatagatcataatctagactcttaataattgtgttcttaggtagcttcacgttttctcttaaattttgaaagactttaagttgtttgtgtagtcctctatggaaaactagattaagctacacatgatttcttaattcttcttaaaattgatcctgttcctaatgagagctccaggcaactttgttttaacaggatgcgtttctcatctgaaatgaaaatagcatctgacagcactccctgattgcctcagagtactctgtctcttggaattctccttggctcactttttcctccgcgaatttggttttaaacttcctctgctccatctcctttattctaaacttgtcagtttttcttgctagaaaacaaacaataacaacaacaaaaacccaatatcgtctttgctttcatcagatctataaagttaaaccaattttttgttcatctccaatatgctatgctgtggttaggaaggctcttttaaaatagatgtgtgagtgatttcaaatcaaaatatttttgttacagaagggtctcttttgtaagatgagtgatggcagatatagctgtgttcataatctgaatttaactaaaaacaaacaacaacaaaccctggaattttcaattaagtctgcatttcttaccttctgtcttacttttttcactttagttttacatgtgaagccacatgtgctggggagctttacccaacaacttgacataagctagtcttgcgtgggaagagtcttagtcatgggttatctgcatcaggctgcttggtgggggttaccttgttcgttcattgatgtcagaagacctagccagttgtggactgcaccagtctcttgttttaattttccatgaaaggaacataaacataccacatggttcagttttatctctgaattaacttcattttcaggtaatttatggcatcagatattaaatttgtgtttgaagtctttgaaatgactgttgatatatgttagtctcctgctgttgttatctgtaattagttgcaggttcattgttacacagctataaaaatggccgtgggaaagcattgggatgtaagctcaaagtgctcgtgtcacaaaatttgtgatttcatttttttatttattgtcattcattttcaatgtatttatttttcatttttctctaattaaggaaaacgtgtcatggaggtagacagagtcctgggttctgtgacagtttgacatttacacagatttttttttttcagatgaatgttaattgaaggtgatataaaatttggtttaagacagttggaagaaaacagtcctttaacaaagtcttgctgctacatgatgccccttttacaactgtgattttcttgtgttctgtcaactataaagtgagattccatggagggaataccaggacttccgggctgtgctcatttccgttgtggcaggaaggttagccttttgaaagcaggtacaaatgaacctttctccggagttcttttcccttcatctgaggttatctcttaatcccagcatttttctgcgcttgctaaatggctcaaatatatattttatttatttgggtgtgccagaggcaaaagacagggtggtgttgctaatagatgctcagaataggctctttactctcatgtaacttcattacagaatagggaagttgactgaaggtaagccattgcctctctatgctggtctagagcaacttagctcagttttcctgttggattcacggcagtattagtgctgtgtctgtgtaaatagaggatgtgaaaataagtctgaagagtgtatttgattgctttatgactccataatcagattactagattcatagttacaggtttgttttttttttaaagaccttgcaatatgaaatgctgacagtaagcatcaaagtcaaaataccagattctattctcatcttgtcaaatcaatgttattaaaagccacgggtggcaggtcagaaagctcactcgctatcacttgccatctgtgttttaatgctgagctgcaccacttctggataatctcagcatcattgtgctgtctgggctgcaggagcacagcacgctacgtgattatttattgagtttcttctttggaatggagattatgagaaggccaacagctgtggccgcagtggcttagaagaaacttaacatgttttgtctcttctctccnnnnnnnnnnnnnnnnnnnnnnnnnnnnnnnnnnnnnnnnnnnnnnnnnnnnnnnnnnnnnnnnnnnnnnnnnnnnnnnnnnnnnnnnnnnnnnnnnnnnnnnnnnnnnnnnnnnnnnnnnnnnnnnnnnnnnnnnnnnnnnnnnnnnnnnnnnnnnnnnnnnnnnnnnnnnnnnnnnnnnnnnnnnnnnnnnnnnnnnnnnnnnnnnnnnnnnnnnnnnnnnnnnnnnnnnnnnnnnnnnnnnnnnnnnnnnnnnnnnnnnnnnnnnnnnnnnnnnnnnnnnnnnnnnnnnnnnnnnnnnnnnnnnnnnnnnnnnnnnnnnnnnnnnnnnnnnnnnnnnnnncccctccccctcccctctcctcttcttctcttttctttcttcctttttttttccccattcattctagattttggatttggtaaaggggaatcattaccaagtagcctgtcagaagtacttcgagatgacacataatgtaagtaaattgtttaactttatagattggttgtatgtggcttgttgctctgtgttttgtttggtgcttttatcatggcatggtgttacttaaaaggtttataaaagggccaaacaactaagatggaccataccagaaaaccagaaatactatgtggaagatgtgtcataagacgacctgaccacactagagctgtacccaccgctccacatctaggttcaaggttgttaaggttttttgtgaagagacagattggaaaacctttaggctttatgatgtctatcacaactagtcaactgtgccacaacattgcaaaagctatcatagaaaatacatgtcatagctgagaacatatagaagtttgtccttaacagcagttttcagtctgtgggtcatgacccctgtggggttgaataaccctttcacaggggttgccaaagacaattgaaacacacagttatttatgcttcataacagtagcaaaattataaagtagcaatgaaaataattttatggttggaggccaccacaacatgaggaactggattaacaggtcttggcattaggaaggttaagaaccactgatctataaagagggccagagctgactcagaggtcttagtctgccaagtcttcaacacggttagatctggaaccttagctattcctgtccagaagaaccaatggcactcttctcaaagaaagtctgatatattgtggctgctgcttaatagtcatctggtctgcttccctggtctcctgtgtttgtacgtacaaccatgtagctgcaaaggagtcaagaaacaggatgatgatcttgcctgcctccttagtactgaaagtcctgagggtaatgtagatgagcactgagcgcttctggcggacacagtggggcttgaaatctggaaagcaagaagcacaggctcgagaggcctgcaagtggtacaccggagaatgtatgccctgctacagcattcacgtggacaaaatccacagctctatgcaagccaacaggaaacatgtctagcacaaattcagcccgctgggtccctcattcacagccgataatttggacatggattccacatggattccaaacccaggacacacatctaagtgtaccgtaggctttggaggtccatgcacctcctgaaatagcttgtcactgaatcctgatgtgcactgttgtggatagtggtgtcctgagcccttccctgcccccagaaaggtgctgtttttgttgagcccattatcagatactgtgctagattttatattcatgttttctattaagctgtcaaaagatttttaaaaaaattctcttatataaattgctgaatttataagtgttcataggaaaattgtcttatcaataaatgataaataatatgagtctacgtttgtggaacccttaatccatactacgcatatcactaagttctttgagccctccagccaggcactaatgtaacacattgatgaacacagcatagagaagcagaacagcccagggaagttcttgttggaatggaacatggatttgaacctgtgctatctaagtcagtaaaggtctgattgccttgccatgctctatttctgatactagagttgaaggaaatctggaggttattcctgacaggaaaatgctaaacactgaggcacattcaaggttagcagatctaactcatatactatggcttatgtatgggaaactgtgattccaaatgactcactccacctgtctccattgaccaaaggaacaggtagagctagagattggcccgctgtgaatcctatcttctacatctaataggaaaatattacctttggtgaaaacaccgtatttttataaaatttgaagtatttattgtaagcaataacaaggtttctttagcttgatcatgacaggacccacatagcatcccgtgtctgggcttctcagcaccagccttgaatacctgctcagcgagcacttctggggtggtcccgggtcagcaccagccttgaatgccctgctcagtgagcacttctggggtggtcccgggtcagcaccagccttgaatgccctgctcagcgagcacttctggggtggtcccgggtcagcaccaaccttgaatgccctgctccctgagcatctgtgtggcaggtcctgggaagatgggaacaaatgtgtatttacctaaacagggaccaaccacagaccaaggtgtagatactgtcgaagtccaacttggtgaaccagtgagttttattacacaggaatatgggtgaaggttacttacaaaagcagaaattactcaaagaacagcatcatcaaactccaccccagcatgaataaaaacttaggaaatctggagcatactgtacaacctgcaggcactcagcagttatgagtgtccttcccaggtgacacatttgctctcagccttttttaggtcccttgtctggtcttgacttcctctggtcagcttagcttacctgcttcttccagaaatgtcagcttctctgagagtttctgagcagtgctaacagcctatctgtgactagagagggagagaacccagtgaatctgcaatctcaggaatttcctgacgcttattgaatcatttacttcctgagtttaaggagcttccctgcagggtggcatagttcatcccttttaacatgtgtgtctcaaggagctttcccttagaacatccggtcgtgtgtcatacccccccccacacacacacacacacgcgcgcacttgcgcgcgcacacacacacacacacatttttgcatcctttttctcacaggtttccttcccaaatggaatattttaacctcagaggagactacttcatgttagaacctagtgtcttgcttagcttgcttagcttgaaacttttaacttcataatatgctctccatcatttgtgaaccttttaagtaaaaagcctccaaactttcaggtttgagatcctcttatctttaatttttaaaaataagttaggtttaagattgagttatactaaattatcccctccttttctgtgttttgttttgttactacagcttggacaggcctcagttgttatatagcccaagcatgaccttgagttcctcatcccctgcctcggccttctgagcactggggtaataagcaagcgctgtactgagtgagtcacggcccagctcaccgagttcttaaacatggccagtgcaacgagggctactacaattgcctgtttcaaaatctgccctagtttactgaagatgtgcatcgaaatcctttccgatctagaaatagggtagcttagactgtgtgaaaaccaatgaaacaaggttgtggggattctctagatcgattactatagatttttaaatgcaaatacctccatttattatctttagagtataaaaatagaatcttttttattactcacttcctgccatcccatctccctcccctgtaaacctctgggctcattttccccaggtctctgtgatgaaattcacttaagtgcaagttttgaaaatgaactccttaattggtaccatttgtagcagccctgtgatagctccatatggctctgtggtaacaccagctgcctcattacaagctgtcatctcaaaacctcttgattaaaacccagatatcccataggtaggcagcattgctcccactcttcccttctgcgtttgccggggcacacatacgagacccattaatgtggaggtcattgtgtggaatatgttgattcctccagtggctgtcaaaagctgacctcatgaaagctgtctgcctcagtggttttcggttttgtatttcatgtgcaatggtgttttgctgacatgcgtgtctgtgtgagggtctctgaaactggagttgtggatggttgtgaggtgccatggtgggtgctgggaattgaacccgagtcctctggaagagcagcctgtgctcttaccactgaactgtctctccagctcccaaggagtggtattcaagacagttgcatgttgctgcctcatgtcatttgcattcctgtaagctttgtaagtggaaacatcaggccttatataggttaatctctgaatcttaacttaaattggcttctttagagattgatccctttgaatattgactggaggtatattttccaaactgtagagctcagcttcttcaccatcatataaattgctacaaaagtcttgtgaaaacctatcacgttttcttaaagccacaccaccatctcccatttagaaccccatcgtagcttcctaagacatttctcagagtctacacatgcctcattccatttcttccttcttcacacagcagggagtgatatttacactaatggaatttgattatttcattaacctgctttaaagacctctctgtggatttccatttctctgaagatgaaatttgaagtttataatgggttttattaaacactgtcctggttcttactagttctgtggaccctccaggttaatcagttacatgctttatatctgagaccacttcctccaaaggcccatgtacagcccacagtagggcctttaggggtgggatctagtggaaggaagttaggtcatggagatgatgtgctgggatgttggccattgctctccacgctcccattgtatgatctactgcctcagtgcaggcagcatcggacaagggaccatgtatagaaatcccagaactctgagcagcaataacctttccccctttacagatggtttgagtattttatcacagcaacacaaggtgcataaagatgaaaaggcaccacagtgtgtctctctcctgataccaaaacataattcagaatcatctacaaagaaaccatcaccatctgtagcagtcggtgaggaaggggaagcagaagcagcaggggatttgtgtacgatagtgatgtgtttccacatcatggctcaggggttcccaagaacggagggaatcaaacagagttgtatctgtattttttgttgagtaataaagaaaatggcaattgcaaaaagaggaatttggatagtgtcctttccacaggttgactttaaagagtgcttactatcattttggtgtgatttccatttgtcccctttccataacaagcacaccaagtttatttttctgagcaagaaaaaagactacatggacccgtattcttcaatacaaaagggagacagggttcacccagaagtgcagtagagtcagaacattaatcacaccaacaagcagcttccagaccacaggtttagcaaactgagttagggctgtgtgtggttgagagagaaagccagaaacaccacccagaccatggcagcagctggtctcaaacccctgggccctgctgcaaacggttagtaaaggtattaaagtggaaattcataaaagtacaggacttaaatatatttaaaggtaagtcacttaactctccttcctttgtcaatcctgtgatgtaaaaagcaaggagctgttgagtatagtctgtggttaaattcaattccatctctctttcatacctgtaatatgcaagcaacagtttctaggttgggtttctttaaagtgggaagaaaaggtgtaaccgtgacttttttcttctgggaactctactgcattttaattgatttatctttcttgactcttaaaacatgtgacttggattccatagaaccacaactcttaaactttatattccattagtttaccccataacaagccaatgtcatagcaccgttattacacccatttcacagatgagagagtgaggcttagaaaggttattgtgagaggcaggcctggtgtacaaagtgagttccaagacagccagggctacacagagaaaccctgtctcaaaaaacaaaaacaacaaaaaccaaaaacaacaatgaaaggttattgtgttttgtcttgctcaccatgaattctgagacttcggtttagttccgttatcatctgcagttatggctgtattgaatactttaacagcttaaaggaaagtgttgaaaaatccctcatattacaaaaagaaagaaaatcccccttatattactattttgccaggtattagatgacttttgtgagatttttcttttgtacaggctttgtaaaaacaatctttaatggggcctggagagagctcagtggttcagagcattctggtgattcttgaagagacccaggtttggtccgcagcacaactctccgtaactccagttctggggaatccgggatccttttctggggacatttgcatacatgcaaacagaacacttgtgcgaatacataaaagaaagaaagcttttaaaaataatatttaaagccaagttttataaaactttgccagtgtatttgactttgcataaagccttttaatatcagaatataagtactctagtcaaaaggcctcagttccatatgtttgtttaattccatcagtgtgtagtcctgtgtatagtaggacattttcaatgtgttgtgtgttgcgcacccctccccccattcttaccctcttgttaggccctttgttcctttcaacagtttcatgtttcctttcataccataaacacatacacgattttaatgtgtgtgtaaagtctgggaaccacaaacaagggaaaagagaatgttcatctttctcagactgccataaattccttactaggattatctccagtttccatttttctgcaaacaacataacttcattcatggtgcacacaaatattccattgtatgtatgtaccacgttttcttttatccattccttggttgccagatggctaggctggttcataacttacctattgtgaatagggctacagtaaacagtgatgtacagatatttctaagatacattgacctcggtaaatacccatgagtggtgtagctggagatacgttttcattcatataaatccagttactagcttgataactgagtaagctatttactctctgtaggcattagtttgccagactatacattgaggaggttcagtttaaaggaattgtagtgtcctcatggtctctgattttctgtacataaaatgtgacactttgtgattgaaatgtttgaacttcttatgaaacacatcagctctttcaggagctaaaggaaatcagatataataaagaagttcatgaattatggtattgttaataaaattataaatttatcatagagcatcgaggaaacacttagaagttaagcagcctcctcgttaaaaagataaagattgctttcttggtgatctgggtaaaactatatatatatatatatatatatatcttagaactgtctataaagaacccatcacttcacaccacaacctaactaaaatgcctggccgccatttatttagctgctaaagcagcctggagctcctccccaggaggtgctctttttctgtcatcctctactgactgaggatgagcagtcttagctctttctccctccccgtccacattaacgcaccagacattctgtgtagatctgatcacacccactcctccttagggactcgtacagttccaactcccttaggcctagagagttatgcaaaacagaccttgactttccaggacctctgaggtgtgctccccaccagtctgtctaacctatcatggcttctatcatgagctttttacaccaggccatggaagtaaggcacttgctccccaggcgtcccctccacggcttctgcagcctctgcaccacctgcctccccctccaggctttcgccttctccctctccctctctgtctacccagccccagctcaaacccttgctcacaaaaccttctcccctccacctcgcaagagtgacaggcatttatctgtggctcctacaattcctatttctgaaaatgatgtttcagctaggaattacaaggctgtggttttctttagctttagttttagtcaagtgcattctcatgttctgaaaaactactgcttataacacagccatgtatataataagccatgtgtatagtaagatgtgaagtatatgactgaatgttctgggctcaactcagtaaatattcattagatacctgctatatacaagtgagttcaagacaaagagttgggtgttaaaagctgaaacatggggccacagacctgtggtctcagctactcaggaaactaaaacaggagaattacaaattcaaggccagcaaggctcacacagccaaagaatagatacaaacactgtctttaacaaataagtaaataaatagtaagataaataagacatagtataatggtttctgggctaaaaatagcaaatgaaaatcccacatttataaccaagcaaagctggagcctagtggtggctgttgtcacctgtaactgcagacaggaatgttgggcttcacttcaggttgtgtgtcacatagcagcagtccaacccattaactgagctgaagaaagtgacttaagggtcacattttaggtagaagtctccgttatattatgccacacactgaatataaaagcctcctcagttttcaggagtaaatgctgtatatgtttgcaatcctttctttcaccttggctcaaggacagtcatacagatcgtagctccatccttgggcaagatccttctcagttgtgttacctaaaaaccctgaagaccattggtactttagctgagtgcatggagtagaatgtggttatgtcacctggcacacagtgggtgggcagtaaacatggagtagaatgtggttatgtcacctggcacacagtaggtgggcagtaaaaacttgctgataataagatgtttttgttcatcattggtaaattttaggatcaaaatcagaataatactgcttgcccctccattcttttgattgctaaaggcacagagtaatgagaagaaatacgagctaatcctcaaggttcagtgtttgaggaagagaaatagcataagctcttaggttcccactaggtttaaagagatttttctacaccaggatggattacaggatgcccccagttaacatgaagaggttctgttaagtaggcttgcttgttcagcctgttcattataccaaacgagattccgtatgccagacttaagctttgaaatacactggtgccagggaccagaatcaaaatagtcaaagtgattttaatagtacttcaaaaaagcttggcccgagatgtgctaagcctcttgctaaggcctagggatgcagtaacgtgtgcaccaccaatgactattgtaacacagagacttgcccaggtatgtttcccagactcttactgtcgggcggggagccagagcccaggtggtacacatgctagagaagggccccaccactgagctgcacttccagccagccttgtgcagtgttatattttattctgagtattcatcagcagacactggaattgagagtgcacaggatgccgagggctgagtggccatccacaatgttgcagctcaattactgtgagcggaggtgggaagcagtgcgtttgatgcatgtttgagctgtgttgagtcatctattctgttgagtaggtagtgacaggagtcaaagccagctgcagaggtgtggcctgagcatacacaggtactagccatgatgctgtgggatcttcagcagaagctccgctgcgtggggtaaggagtaggagcagctgagctcacaggtcttcagctgtaagatggggtggggacagcactgaaagctatatttctatctctgctgtgtgctaacatggtacaaatttgcttccttgggcaggtggacgattgtggcttttctttgaatcatccaaatcagttcttttttgagagccagcgcatcctaactggtggcaaagatatcaagaaggaaatcagtcagccagaaacacctcagcacaaacctagcacccagaagaccagggatgctgcatctgcgctggcctccctagactcctccctggaaatggacctggaggggctggaagagtacttttagtaaatgatgtggccactgtagtatctcctttcccccagcgaatacattcctgtttgaaaggtttacaaaggcacacccatgcacacacacacatttactgggaagcaggcttgcttccaccttacttttgacagaatgggaaaggaagcattcctattgaaactgttaaaatcctcaagcagcaagacaattaaaactaacttttaaagttttgtataatgttggccaagtcctcttttggattgtttttgctaataaacaacatgtatatgactatatctgtgcaagtgggagtcttatttcacagtggatcaggtattatttctttgtttgaaataaatgctcatcgctgtcaatcgatatgggggcagagggagccctgagagagtgtgtactgttgacatgggcaaggccttgctaggacaccaaggcctgagacttctgggatcggcaaagcctttctattatctgggtgggaatgctgacagtgttttgcaaaaccaaccaaccaaccaaccaaccaaccaaccaaccaaccgcagcttcctcctcccggtgcctgcagcctagcactgcaaccccacagacggccttctgagattagctcagctgtctcctcgatgcacgtgtaaaaagcacaccgagtttctggttgctgctgctgctggtcacttcatcagagcaagcacggcctatgcagtcccctgtctgctgcagatgtgtctgtgttctgtcctgtcttcattccaccattgtcccggtctaatgaagattagacacttttcctttttttccttttttgattaccagctaggagaagttctggtccccgtgagtggcagcagactccctgaaatgaacagtgacttgagaagcagacactgtagctgttcatttaagagacaggctgttaaatggtgctctccatctctgtcattctcctcctgcttcttactgaagaaaggaggtttggtaattctgaagcatgaattaccaaatagtttggcgactcgtgttcctttcaggacaagcagtggagctgagactgtagagaacggaatgctttggatggagagaatattagtccatttcagacactgtggttagaaaagagagtgatacggtttcagtcttacgatgtgtcaaaggtttcttagaatatttagtcacacatttaaatgagaggccaactgagcaattgattggttttgtgaatgttacttcctacttcagaaatcagccttactttactgtaaatgactgctcttccatggaagcctctgctgctccatcatccttagacttctcaacaggaatcagattggagtctatcattgtaaactccgcatctgtctgtctgtctctctctttttctttctcttactgttcttactgtttttggacaccaatgacaaggcagtgaaataatagtgctaataggattttcagttcaccgtcatagaataatgaaactctttaatgttttcccttattttccccttacactggaggcttggaaagaaggtaaagtcagcacacaacgcatttacgactcttcataatagggaaatgaatcagcacgcatttccccactacctctattcacatggtatatttagttttagcctgcacatgagccatagaaggtagcaaaattgcttatcaaaaaagacatcataggggctggagagatggcttagaggttaagagctctggctgctcttccagaggacctgagttcagttcccagaatccccatggtggcttacaaccatctgtaatgggatctgatgcccttttctgccatgcaggcatacatgcagatagagcagtcatatacacaaataaataaacctttaaagcaaaaggacattgcaatgcacatttctctttgatcatccctttttactgattcaatacttatttaatatttttgtaccacccttaacttttggttttttgtagagttcctgcctggtccttaagtcactctgccagtctctgtgagtgaatccatccatccatccactcccatggtatccacttccaatatatatgcaaatggttcccatgccttacctcctatgaaatctctcctcaaagcacagaccagtccatacctgctacatagctttactagatccgacatgcaacttatacttaatgtatctaaaatcaaccctgtttttttttcttcctacatctgctttttttttttttatctctccctatgtcaccagacatctaagtcctcctgagattctgttttaatattagaactgttttaatgtctaaaccagtgggtctcacttgggggcagctttgccttgggagttatttggtaatgtacaaaacatttttggtatttctaactagcagggacttaggggatagagactaaggagcctgccaagcatcctacaagataatactccacaacaacgagcgtgtctggccccaaaccgtagctgtaatatgactgagaatccctaatctaaggtttcctttcttcctttcctacattgaactgcattaaactctccttaccattgttagcattaagtgctaggattatcacatcatactgtgagcttagtacaattctaattattaggatttgaaatatgaacacacacacacagaggcatttactatacgtaggttttatagtccgatgaaggggaacataatagatgattgatcttctaagtatgataatgatgacacatgagatggttgaatatgacatcgtcttacatctgaacctggtcccctttccatatctttccttaaaatttaacctaagcacttctttccatgactctatcacatacatcagggaatatgattgctttatgtgagtctttccttgataattttcactgtctctctggttccatattgtctctcctcattctgggccttccaaatcagcctccttggtacccacagtgctttacgccctctaatcccatgtggactccatgtcacatgttagccaactgacatatgttatagataatgtgtgtattcatcttcacatgtgaatccctaatgaatacatcttgtaggcagatgcttgactacctcaggcactcagtaagcatgtaaataaatcattgcttgcttgttatcccacaggaatctcaaattctgtgttttaaaacctacaagtaaaattggattgtggactgtagagatatggctcagtgttcttgagtttgtacagcacctactttgggtgtctcataagggctgtcacgcaagctgcatctccaatgccttctttgacccctgggcaccacacacacatgtacaaacccacactcagacatcattacgtccataattcttaaaaatacagactgaaggaaaggccatccagagacttgccccacctagggattcatcccatctgcaaacaccaaacccccatacgaatgctgatgccaagaagcgcttgctgacaggagttgtatctggcttttccctaagaggttctaccagtgcctgactaatacaaatgctgatacagccaaccattagactgagcccagggaccccaatggaaaagtccccttcccaaggggaaggactgaaggagctaaaggggactgcaaccccataggaagaacaatatcaactaactggaccagccagagctcccaaggactaaaccaccaaccagagtacatatggagggagccaggactccagatacctatgtagcagaggatggcctatctgacatcagtgggaggggagggaggcctgataccccagcatagggggatgctacaggggtgaggtgggtgaatggatggaggagcatagtcatggaggcaaaggggaggagggagggggaataggaaggatgggatggggggttgtggaggggtaaccaggaagggggatatccattttagatgtaagtgaataaaatgattaataaaaaaataatgaactttgactcctgagaaaaaccatcattagccatgatcttgtcaattttcccagtttcctgagcttccttgctttacctgtgaaatgggtataataatcgcacctattttaagtatcgttaattaagtgctatcacgtgcacaacacagaattctggcaagtggaaacagtaattgctaaggtgctgtaatttgatgttaatcccttttaagaaacaccacacatggctcctccctgttttgagtaggtatcctgtgaaacctcttcaggtgagaactgttcacagggtacttactggctgttcttaaatggagggacggaggtgacaagaatgtctgtgctgagaaagcagctgtacatttttcttggggctctcatggacacatgactttcgagagaaagtgatgcctacctatgtggtaccctagtttccaaggacttaaatggcaaaggagtttgaaacagggtctcatcatatcacccagctgatcttaaactggtggtcagcatctgggatactgagttatagatatatgcccccaggcccaggcttaaagagtgcttcccagtagatttccatcttggcacttccgcaacagactaagaagagtagacatctggattttcccgaaaaaaggagattctgggagacaactcgtatagactgactatagatgtactgactcctggcctggacattttcccctatgcttgagtttcacattggggcctccacctacctgccttggccaagaagctcaactgtgcctcagtgagaccaagtctttgctattatcttggggaagttacttgagcttcttgcttagctttttcagttgagagcattacctaaatcatagaacatccaaagcttcttatgttgaacttgattcatggtaagttcaaaaacaaacaaacaaaataaacaaaaacattgttagctattcttttagaagaaacctactaaattttgtttgcaggactatctaaataaagttttcaaactgcagtgaatatttttgtggatcagagtcatgttttagtttaagaaacataataatttgttcccaaaatgaaaacactataacccttagcccttcagttaaggagttcccggtgccaggcttcctaatttagtctttgacatcatcagagacagactgagaagtgtagaagcagatgcagcatacaaagacatggtaaatagggtcataccttgtgtgcttgtttctcaaacgtagttgacatcatcccctgctggactcaggaatgtgtgctattcccttgtctacactgtggcatctctcctatccttgcagctcagttcttcctggactaggctgtgaaatgcatcaagacagttggaatggagaatgactcatgccttgttgaggagaaccagccagcttgcaaaggtgtcaatggtcgtttaaaacgcagtcagtgaaaatgaaaatatccacagattcccaccatttgcattagatgaatacagtcttggaagtccttgggtgctcccttctttcaagactgacaacagacacttgtccaacctctaaaccaatgaagtgaatattttatgttggggatcccgctatctctcttgtaactactcaagtctatttttataatgaaaagcagccatgtacaatatgtggacaaattaatgtgactgttttgagtatgaaacaggccagatttgacctgtgagaaacagtttgtcaatgtgtaacctagacgaagagaaaaatatttgaagaataagaattaatggaagtgactaaatcttgtgtgtgtgatatatatatgtgtgtctacatacatacatatatgtgtatatatgtatatgtgtgtgtatatgtatatatatatatatattcagaatggaatgcatgacttaataccttccttcaagaaatagatccagtccaatggatctatttttcactggcaagtcctgtccaatgttgaaacaaattaagaccagttttatacaaaacaggaaagtaatgactagaaattccccacatacgttctgaagcccgcattgccctgcaactaaaaccagacaagaaaagaaaatgataggccagtatctcttaaatatagatgcaacaatccttaccaaatgaacaataaattcatgaccaaatggggtctattgaaggattgtaaggttggtttaatatgcatatatccatgtagcttaccatgttaacaaagagggaaacatcatttagtagagaataagcatttgacaaaataacatctgtccgtacattctagaggagatacaatattaaatggtagaagataatcaccgggacacacattctcactatttctcttcaatgttgtgctaagagttttaattattgtaatgaggtaccttagttaggattttattgctgtcaagagacatcatgaccacaacaactcttgtaaagaaaaacatttaattgtggctggattacagttcacaggtttagtctgttttcttaatgccaggaaatatggtgtcttagttacggttttattgttgtgaagagacaccatggccatgacaattcttataaaggacaacatttaattggggctagcttacagtttagtccattatcattatgtggaaaacatgacatcatccaggcagacgtgatgctggagctgagggttctacatcttgatctgcagacagcaggaagagaagtggcttgagtttctgaaacctcaaagcctaccccctagggacacacttcctccacaaaggccatacatactacaataaggccacaactcctaatcgtactactccctgtgggacaagcagtcaatcactcgagtctagggaggccattcctattcagtctactacatgaggcaagaaggagagcaaattgtccagtcaaaaaagatcagcctgtttcgtcactttggcatgactgtatcattagaacatcttactcagtctttggaatgaatcagtaaataaatatagtagggtccaaggaggcccagataaacattactagcagtcatcaaaagttgaaaattttataaatatcattatgatagcttctaagtcatggaacacatcaagtaaatttaacataatatgtaagacctatgcaccatgtacttcaacacacagctgaaagaaaagcgagattaagatggcttcgggcttaaaccatcctgagacagcctctccagaaatgtcgatgcatacagctgttaacacaaccaacttcccgaaagccaagggaactgggtgaaagcacagtacttgggtttcagcaaacttaaagctgaagtggaggaggcaggaaagaaagggttgttgcctttgcaactgctttctttaagcagagtgtttcacagaaagagatgtctcctcctctgggaaaagacagataattaactgcaggacttagtcctgagcacatgatgtatattcccaggctgtaaatggcgcctctgcaataggcgcattaacctcatgtctcagaacccgtcactcaacctcaaacagcatcaagttgagaaagaatccaagcactgggctattataagtcagagaaataagcacagaatttggccttgaaactcagtgctaggcctactacggtgaaacccagcatttagcagagtctaatgtcttttgccctgggccagtgttcatacatgaggcccctaaacctgatctggtttcacatggagcccaaacggacatttgtcttctcactagtgttgtctctaggcagccacatggtcttcaccatgaacatacctgatcaccaggcacgcagaacagtgtggactctgttgctgctggggagctgcctgggtctgtgagccctacatgtaattcagcctcatagttctgaggccaaataatgatgcagattcccccagtgcctgaccaaggctgttgactgtagactggtagggtaggcagaggtttgcaggggatggatactaaaggtatgttcagaacctatcccaagaggcaaaggtttagttatgagaaataactctctaaggccaaaacagtgagcacaatgaccaggttcagtgcaaatcccatttggggagtccactaaatgagatatcagcagtggacacaggctcagaaaaacaaacaaacaaacaaacaaacaaactgtttagaatttctggaaggatgggtaaaaataagtaaacgatcatgagtgtatttccagcactggtgaatttaagatcacagggccagtctgggctacatactgagatcctgtttcagaaatgcaacaaaagcaaaaacgcagtccagattgggcaggctggaatgcacaggtttcaccacctggtaccaagcacctcgaacttccaaggagctcatcatctaaagggcaaagggaaagctcaggcattgaacagtcgacatatgttttagaagacaagatagacttttataaacaggaaaaaattcaattataatggaacttaacaaaggagatgggtgcaacttgcaaaaaaaaaattggggttcccggatcccaccgagtatagtctgtgcaggtgagagtgtggactgcagaagctaacagcttctgggacaggcagaagccacagtgctactgaggcagccccgtttcggggtccagatatttgggcacctactctgccagaggagaggtgtctgccccgcccaggaggtctttgctggaatatctgggggagccatcttggttccgggatcccacggagactagtctactcaggtgagagtgtggattacagaagctaacagcttctgggacaggccctgttttgggccttcatcttgtgccaggaggcagatctgaatgccaggagagcttgcctgcagagagtgctctaaccactgaaactcaggagagagctagtctcccaggacagctgctagaagctaacagaattacaagaggaacaatctctaaccagagacaactataacaactaactccagagactaccagatggcaaaaggcaaatgtaagaacttactaacagaaaccaagaccactcaccattatcagaatccagcacttccacctcagccagtcctgggtaccccgacacacccgaaaagctagacccgaatttaaaagcatatctcataatgatggtagaagacatcaagaaggactttaataagtcacttaaagaaatacaggagaacactgctaaagagttacaagtccttaaagaaatacaggaaaacacaaccaaaccggtagaagtccttaaagaaatacaggaaaacacatccaaacaggtgatggaaatggacaaaaccatacaaaaccttaaaagggaagtagacacaataaagaaaacccaaagtgaggcaacgctggagacagaaaccctaggaaagaaatctggaaccatagatgcgagcatcagcaacagaatacaagagatggaagagagaatcttaggtgcagaagattccatagagagcatcgccacaacaatcaaagaaaatgcaaaatgcaaaaagatcttaaatcaaaacatccaggaaatccaggacacaatgcgaagaccaaacctacggataataggagtagatgagaatgataattttcaacttaaagagccagcaaatatcttcaacaaaattatagaagaaaacctcccaaacctaaagaaagagatgcccatgaacatacaagaagcctacagaactccaaatagactggaccagaaaagaaattcctcccaacacataataatcagaacaacaaatgcactgaagaaaaatagaatattaaaagcagtaagggaaaaaggtcaagtaacatataaaggcaagccaatcagaattacaccagatttttcaccagagactatgaaagccagaagattctgaacagatgttatacagaccctaagagaacacaaattccagcccaggctactatacccagccaaacttccaattaccatagatggagaaaccaaagtattccatgacaaaagcaaattcacatattatctttccatgaatccagcctttcaaaggataataacagaaaaaaaccaatacaaggagggaaatgatgccctagaaaaagcaagaaagtaatccttcaacaaacataaaagaagacagccacaagaacagaatgccaactctaacaacaaaaataataggaagcaacaactacttttccttaatatctcttaatatcaatggactcaattccccaataaaaagacatagactaacagactgactacacgaacaggacccaacatttgctgcttaaaggaaacccatct

SEQ ID NO: 568 - DNA, 1937 bp, Mus musculus
gagcggctgtcagcgcgggtgtttctttcagcctggctgctggctggttaaacaatctactgcggctttatttgggacggagagaagccgtggagttggaagcttgtgagctgacctggtgggaccgagtgacaggtggtcaagatgcagttctcaggaaggatccggaagaagctgcgattggcgggtgaccagagaaatgctagttaccctcacagccttcagttttacctgcagccgcctactgaaaacatatcgttgacggagtttgaaaacttggcttttgacagagttaaattgcttaaagcaattgagaacctcggtgtgagctatgtgaaaggaaccgaacaataccagagtaaattggaggccgagattcgaaagctcaagttttcctacagagagaacctggaggatgagtatgagccacggcgaagggaccacatctcccactttatcctacgcctcgcgtactgccagtcggaagatcttagacgatggtttattcaacaagaaatggatctgcttcggtttcgattcagtattttaccaaaggataaagtccagagtttcttgaaggatagtcatttgcattttgaggctatcagtgacgaggagaagacccttcgggaacaggatatcatggcgtcctctccaagcctaagtgggatcaagttggagtcagagtcagtttataaggtcccctttgctgatgctctggacctgttcagaggaaggaaagtctacttggaagatggctttgcttatgtgccacttaaggacatcgtggccattatcttgaacgagtttagagccacgctgtctaaggctttggcactaacggccaggtcgctgcctgctgtgcagtccgatgaacgacttcagcctctgctcaaccacctcagtcattcttacactggtcaagattatagtacccagaagaacaccggcaagatttccttagatcagattgattcgctgtctacaaaatccttcccaccttgcatgcgtcagctgcacaaggcgctgagggagaaccaccatctccgtcacggaggccggatgcagtacggcctgttcctcaagggcattgggctaacgctggagcaggcattgcagttctggaagcaggagtttatcagaggaaagatggacccagacaagtttgataaaggttactcttacaatatccggcatagcttcggaaaggaaggcaagaggacagactatacgcctttcagttgcatgaagattatcctgaccaacccaccaggccaaggggattatcatgggtgccccttccgtcacagtgatgcagagctgctgaagcagaagatgcagtcctacaagatccctgcctcggggatcagccagattttggatttggtaaaggggaatcattaccaagtagcctgtcagaagtacttcgagatgacacataatgtggacgattgtggcttttctttgaatcatccaaatcagttcttttttgagagccagcgcatcctaactggtggcaaagatatcaagaaggaaatcagtcagccagaaacacctcagcacaaacctagcacccagaagaccagggatgctgcatctgcgctggcctccctagactcctccctggaaatggacctggaggggctggaagagtacttttagtaaatgatgtggccactgtagtatctcctttcccccagcgaatacattcctgtttgaaaggtttacaaaggcacacccatgcacacacacacatttactgggaagcaggcttgcttccaccttacttttgacagaatgggaaaggaagcattcctattgaaactgttaaaatcctcaagcagcaagacaattaaaactaacttttaaagttttgtataatgttggccaagtcctcttttggattgtttttgctaataaacaacatgtatatgact

SEQ ID NO: 569 - protein, 503 aa, Mus musculus
QVVKMQFSGRIRKKLRLAGDQRNASYPHSLQFYLQPPTENISLTEFENLAFDRVKLLKAIENLGVSYVKGTEQYQSKLEAEIRKLKFSYRENLEDEYEPRRRDHHFILRLAYCQSEDLRRWFIQQEMDLLRFRFSILPKDKVQSFLKDSHLHFEAISDEEKTLREQDIMASSPSLSGIKLESESVYKVPFADALDLFRGRKVYLEDGFAYVPLKDIVAIILNEFRATLSKALTARSLPAVQSDERLQPLLNHLSHSYTGQDYSTQKNTGKISLDQIDSLSTKSFPPCMRQLHKALRENHHLRHGGRMQYGLFLKGIGLTLEQALQFWKQEFIRGKMDPDKFDKGYSYNIRHSFGKEGKRTDYTPFSCMKIILTNPPGQGDYHGCPFRHSDAELLKQKMQSYKIPASGISQILDLVKGNHYQVACQKYFEMTHNVDDCGFSLNHPNQFFFESQRILTGGKDIKKEISQPETPQHKPSTQKTRDAASASLDSSLEMDLEGLEEYF

SEQ ID NO: 570 - DNA, 27764 bp, Homo sapiens
actcgaagtcaatatgttactgtctctaggtctgaaaggtagaggaaaaggagctgttaccagacccaaagtgagagggtcctttagagtctgttgccaccttgagagaagcaatgacaggttgagggacacaggtggccttgcagggaggggataaatacattgatctcactttcttctcttcttcctatttccttttggggcttttaattgacctaacctaactggaagcagaaagcacagaaatctgtttatatggtccattcatttaagaacacagagcaggggagggggctagagtggttttaggtgatggggtgggaaaaggaaaatatccagcatatacagtattgtcctatgacttgcttttttagttaacattatatttatgtgattcatccatgtcgatatgcttactgtaattgtagtagttcattcatttttcacttaaaaaattccattgtatgaatacaccagaatttatttatctatttctttttctttttttctctctttttttttttgagacaaggtcttgctgtgtctcccagcaggagtgcagtggcaggatcatggctcatggcagcctcccagcctcaggtgatcctcccacctcagcccccagagtagctgggactacaggctcgtgccaccatatctggctaatttttgtattttttgtagaggcagggtttcaccgtgttgctcaggctggtctcaaactcctgggctccagtgttccaccctcctcagcctcccatagtgttgggattacaggtgtgagccactgtgcctggcccagtttatccatttctgatgatggatggtttccagtgtttgagtattttgatattgccacgaatgttcttgttcatgttttttgatgtctacgctcaaaactttctctagagaatatacctagactagaatcacatagtgggataaagagtcatatgttttcaaatttaccaggtaatgccacatttttcaaagtagttgtatcaattaacagttttacttatagtacacgagttcctagtcaacacgcaatattttcaaactttgaaacttttgtccatctggcacctgtagaatattatctcattgtggttttaatttgcatttcttcaattactaatgtaattaaacatatttacatatgtttatttatcatttacatttccttcattgtgaaatacttgttcaggttccctttctcttttctactgtttattttattttatttttcttttttttaattttactttaagttctgagatacatgtgcagaatgtgcagtttttttgtttgtttatttttttttttagtatttattgatcattcttgggtgtttctcagagagggggatgtggcagggtcataggataatagtggagagaaggtcagcagataaacacgagaacaaaggtctctggttttcctaggcagaggtccctgcggccttcggccctgtttgtgtccctgggtacttgagattagggagtggtgatgactctttttttttttttattatactttaagttttagggtacatgtacacattgtgcaggttagttacatatgtatacatgtgccatgctggtgcactgcacccactaactcgtcatctagcattaggtatatctcccaatgctatccctcccccctccccccaccccaccacagtccccagagtgtgatattccccttcctgtgtccatgtgatctcattgttcaattcccacctatgagtgagaatatgcggtgtttggttttttgttcttgcaatagtttactgagaatgatgatttccaatttcatccatatccctacaaaggacatgaactcatcattttttatggctgcatagtattccatggtgtatatgtgccacattttcttaatccagtctatcacacattttcttaatccagtctatcattgttggacatttgggttggttccaagtctttgctattgtgaataatgctgcaataaacatacgtgtgcatgtgtctttacagcagcatgatttatagtcctttgggtatatacccagtaatgggatggctgggtcaaatggtatttctagttctagatccctgaggaatcgccacactgacttccacaatggttgaactagtttacagtcccactaacagtgtaaaagtgttcctatttctccacatcctctctagcacctgttgtttcctgactttttaatgattgccattctaactggtgtgagatggtatctcattatggacttcacgtccaaaacaccaaaagcaatggcaacaaaagacaaaattgacaaatgggatctaattaaactaaagagcttctgcatagcaaaagaaactaccatcagagtgaacaggcaacctacaaaatgggagaaaattttcgcaacctactcatctgacaaagggctaatatccagaatctacaatgaactcaaacaaatttacaagaaaaaaacaaacaaccccatcaaaaagtgggcaaaggacatgaacagacacttctcaaaagaagacatttatgcagccaaaaaacacatgaaaaaatgctcatcatcactggtcatcagagaaatgcaaatcaaaaccacaatgtggtgatgactcttaacaagcatgctgccttcaagcatctgtttaacaaagcacatcttgcaccgcccttaatccatttaaccctgagttgacacagcacatgtttcagagagcagggggttgagggtaaggttatagattaacagcatcccaaggcagaagaatttttcttagtacagaacaaaatggagtctcctatgtctacttctttctacacagacacggtaacaatctgatctctctttcttttccccgcatttctcccttttcttttcgacaaaaccaccatcgtcatcatggcccgttctggatgattgctgtctctttggagctgttgggtacacttcccagatggggcggccgggcagaggcgttcctcacatcccagacggggtggcggccgggcagaggcgctcctcacctcccagacggggcggccaggcagagacacccctcacctcccagatggggtggccgggcagaggcgcccacttcccagacggggtggccaggcagaggcgctccccacctcccagacaaagagcggccaggcagaggcgcccctcactttccaggcagggcagccgggcagagactcccctcacctcccagacagggcagcagctgggcagaggcgctcctcacttcccagacggggtggcggccgggcagagacacccctcgcctcccaaacggggaggggccgggcagaggcgctccccacctcccagacgaagggcggccgggcagagacgcccctcacttcctagtctaggcggccgggcagagacacccgtcacctcccagacagggtggcggccgggcagaggtgcccctcacttcccagacggggtggtggccgggcagagatgcccctcacctcccagacggggcggccgtgcagaggcgcccctcacctcccggacggggcggccgggcagaggcgcccctcacctcccagacggggcggccgggcagaggcgctcctcacctcccggacggggcatccgggcagaggcgctcctcacttcccagacggggcggccgggcagaggcgctcctcactttccattcagggcaaccaggcagaggcgctcctcacttcctcccagacggggcggcggggcagaggcactcctcacttcccagagggggcggccaggcagaggtgctcttcacttcccattcggggcagccgggcagaggtgctcctcacttcctcccagactgggcggccgggcagaggcgcttctcacgtcccagacaatgggcggccaggcagagacgttcctcacttcctagagggggcggcggggcagaggggctccttacatcccagacgatgggtggccaggcagagacgctgctcacttcctagacggggtgaccggcgggcagaggctgtaatcttagcattttgggaggccaaggcaggccgctgggaggtggaagttgtagcgagccgagatcaagccactgcactccagcctgggcaacattgagcattgagtgagcgagactccgtctgcaatcccagcacctcgggaggcggaggcgggcagatcatccgaggccaggagctggagaccagcccggtcaacacggcgaaaccccgtctccaccaaaaatacaaaaaccagtcaggagtggcggcgcgtgcctggcaggccgaggcgggagaatcaccggagcccgaggcagggaggttgcagcgagccgagatcatggcggtacagtccaggctccgcaagaaagggagaccgtagaaaggggagaggggagaggggagacgggagaggggagaggggagaggggagaggggagaggggggagagggcttttctactgttttttatttttttcttattatcttgatactaacaatgaccctgtgttaattttatcatctcgcaatttgtggatatctaaaaaactgtgtatttatgtactttaaaaagttttatgtacttttaaaaaggtcaagtgtggtggcttatgcctgtaatcttagcactttgggaggccgaggcaggaggattgcttgagtccagaagttcaagaccagcctgagcaacatagtgcagccccatctctacaaaaaaatttaaaaatcagccagtcttggtggcatgtgcctgcagtcctagctatttgggaggctcagctgggaggatcgcttgagtccaggaggtggaggctgcagtgggcagtgatagcatcactgcactccagcctgggcaacaggaaaccctgtcttgaaaaaacaaatgaacagaaactccctccccatgcaaaatcccttaagttcttaatttaatgtagttaaaatgatcaatctttctctttttagcttgtttttttaaaaaaagtttaaaatatacataacacaaaatttaccattttaaccatttgtaagtgtacagttcagtggcattaactacgttcacattattgtgcaactatcaccattatccatctccagaactgcttatgctttttcttaatgtcttgttaaataaattctttggaccatcaagaccataaagaccgtctatatatttgttttaaattcttaaaattttgcctttcatatacaagttcttaaatcatctggaattgattttttatatagtaggaggtagggaatacatttttcctccctatagacagccaattgtcccagcaccatttagaattgtctatttttttcttccattgatttgtacggtggatctgtcatatactaagtttcctcataggtgtgggaccatgtttgggttttctattctgttccattgattgatgactttattcttgtaccaatattgtaatgtcttaaatactaatgaattaagattagccttccatctgcctgaaatgctattctcctaaagatagacatgactaaatcccaagttttcttctggtctctgtttcatggccacattcttagccagcctttcctggctatcttttctaaaatttcattatctccttgaaaaactttacattcttcttttctgattaatttctttctgtttagtagttgttatctaacataattatttatgtctttaacttgtttattgtctctcttccccattagaagatttataagagcaggattttttggctctctcatcattctcatatccccagcatagaaaatgttgcctggcacttagtaagtgtttaattactatttctggaacacaccaaataatgctgatatatggaagggtagtgtttcttcaccgtgctaccattaagaatgtgctttctgtcagttctcctgctccttgattttgactaataaagcaatctaaagcaaatggagagagaatgaagtgctttctttaggttgtttcccagccaactccgagaggtaggcagtgaaatggggagggtggagggccagaggttggctaactctgcattagcttttatgggtcagctatcttgctggaaatacctcatgttctctgcttttcatggcaaacacagctggtaggacctagaatttacagcatgcttactcagtaaagaagcttaccacgcctttggttttcagggcgacacaccccgctcagaagaggaatgaacactcacttagatttaccaagcatggcaactaaattctcagctgtaagtgtgacactttttgggatagaagttctggagctgtggaggagttatctcagggtgaatgccacgtggggcagtctgtctgtagctgggtaatgcccaaggcaggcactgaattgagcagtgatgattcatggaaattctgccagagaaggtactctgtgctttattacaggctaaactaggaagccaactcattctggaaggaatgtgtataatgttttcagatgaggacttgaagttttataggttggagtcacatttgattcaaaccatctgtttaatgggaagctgaacccagcattttttttcatatgtctctcacagtattcaacaattcagtatgggctgggcgcagtggctcacgcctataatcccagcacttagggaggccgaggcaggtggatcacctgaggtcaggagtctgagaccagcctggccaacgtggtgaaaccccgtctctactaaaaaagcaaaaaaatagctgggcatggtggcaggcgcctgtaatcccagctactcgggaggctgaggtaggagaattgcctgaacccaggagttggaggttgcaatgagccgagatcatgctactgcactccagcctgggcaacagagcgagacttcgtctcaaaaaacaaaacaaaaccaaagaaaaaacaaaaacaattcagtttcataagtatttattgagggcccatggagtgccaggcactggggtcacagaaatgaatgaaacagtcatccctgtttttgagatgctatggttcagtggaagtaaaacttacatgtttatgtatgttttccttcccatgattgtgaggtcaatgtctgtatttacaagaatcttggttgccagggctgagcattgtgtcaatcaattttttgtagatgaagtgaatacatgaaagagctcacagtgatttactgaacatggctgctgaaatgtataacattattgtgcattattgctaccgtgatatgcggatttatattgcaattgcctctggattcagaaaaacacccttcacagtgaggtagtgaccaaaactgtggcattaggaaacaataaaaatgctggaatagctgaccaacacagggtattttgttccccggggcttaaaatcagtttttaatatgatgaaaaggcagctattatgtgacatagtaagatattggtatgttaagcatgaacatatatttccagttttctctgagctggtcatgaaatgacactggctacttcgtcttttaattgggcagatattgtaggaagtactttggggatcacagagatgaacaaaagggctcatccaaagaaagcttaaaacctagtagtgctggaattcttaactagccacatatggtgatcttgaacctcttgaaatagtatagatgtgtgtgtaggtgcatttttctgaagagagctttcatcacattgtccagtggttcatagacctaattaacatccctctactacagaagttcttaatcttgatcttccaaaagataaagaacttctgtagtagagggctataattatttaaagaactacaccatatgggagtcatgaagagcctcaggggtttaaatgaggagcaaaacaggtggcaacactgagtagtttcattataaaatccttgacaattttgcaggagaaaatttctttgcctctagtgataaaaacatttttcatatttaacagtagttattttttctatgagttacctcttcttcttcttgtcctatttttctgtttgtgtcttaggatttttttcctaatgagttaacttctttgtatcctgatggcattaaccttttcgatgttatacttttggtagacctttctctagtttgatgagtgcaaaatacttctgtgaattttttacatgcataattttatactttttatggtcaagtctttatatcttttttctttgtaatttataatatttaaatttgtttgctatccagagataagatattcatgtaaatattcttatggtctgtgatgcaggttttttcaggcagtttatatgctttcaggtgtcttctttggaccacgtgatgtatttgtattacgtatttgtattatgtatttaatacagagaggaagaaatgaggtgaagctctgctgtcatattactggaattggtgtagtgagatcgttagcacagtggggcctggagagtttctctgggtttgaacatggctctgacattttgtgtccttttgacttcatttaacttctctgttcttcagtttccgtatctagaaaatacgtttaatataataacctttgggaggccgaggtgggcggatcacgaggtcaggagttcgagaccagcttgccaacatggtgaaaccccatctttactaaaaatacaaaaattagccaggcgcctgtaatcccagctatttgggaggctgaggcaggagaatcgcttgaatcccggaggcggaggttgcagtgagccaagatcgctccactgcactccagcctgggcgacagaacaagactctgtctcgggtattggtggtgggtcggggggaataacctatcttatgtggttatgataataaaatgagttgatatgtaaaccacttagaacaggtcctgatataaagtcagtgccagccacagtttagtccaggctgggtagatgctttgaagcttgatattgtttcaatgtactttgcatttctaaaaacgtgaacatttcaaagcattcatttgatctcctaaggactacctataccggagcctcattccagcacatttgtaagcgaggcacgcctcctagaggccacgagtgaagttaatttccagttctcgaaaatcttacagacagcggagaactggtgtggtggctctgacgccccgcttgtgagtctgcagtcggacatctggaaagtaagcggcacgtccgcgtgatttccagtgcttcatcttcttccaccctaccttccctccgaggctgggttcttctaattcctgtagattgcagagcgattcctgcgaatgtgccttctttcattcattctagttcattccacagataattcagctgcgcgcttcctctgtgcgaggcattgccggagagcggggagcgaattgaacgtggaacctgccagtaggggcttgccgcccaatacgaaattcaacatatgtattgtatgtagacgggcaaactaacgaggatcttgtaacttgttttctcatctgccaaatgggggtaatacgatcttataggaccttataggtcgctgaaagattaaacgagcggaaaaaaaagagcccctaatagtgagctaggtgcaaaaaagatcctaatgccttttttcctcattcctccccagattgaaagtgatgagtgccagccctgcgggttaaagcgccatattttcctcaatatagggaatatttgttagtgtccccagacgaagttacattggttcaattttcggcgtgtgggagttttcgccactagcattcagcaccccagttttaaccgttaaagctaccgactccacatacaggaaatgcatcttaaaatttggaaaaaaaatccccaaaacactgacatccaaacactttaaagctgccaaggtggacggaacaccttgaattcccagacgcgctccactgagcatgcccagagcctcaggccaaaccccctcctacccgccaaggggaggtggggcagggctggccttctgtgctagtcacttcctcttccggtttcatatgaactctcccgccacccgggaacagtggctgccaccgtttgtgttttcccgagtttgaattcttgcaggtaggggaaacttccgcgaatttaggacagagagcaatcctgttattaaggcttgcaagtcgagagaaaggagagatggatcactttgcaggcagcagtagcagaaggacagacttggcgggttggttgtttggggcagacacccaggtaccagggaggagttggggagagataggtttgccagtggagtgaggaggggtgttggggatggaacttttgtaaggcacttgtggatgctcccgaaaaggagttccgaaagacagttgctctgtttcccagagtcataacagaggaagtgagtaactggacccagtccatcaagtaagaccctcatttagccagaacctacagcactttcctctaagttcaggattgcagaccacgtaaaaccttatgttaactcttgggatcgtaaagatccaagaacagtgacacacaggcctataatgagcaggcaacatcacctgactttcatgttgctgaaaattaggatcaccacctgcatctgctctagcgcctctcccacccccattacaaaattattataggtgtattgtagaaaatctggaaacgagagaaggacatcacccaggaattgccactgctaacattttgtgcatgccctcaaatccattttttttctgtgtttgtggaattattttttcgtgttttttcttttttttcccccaactttgttttccatcattttacgctttttgtgtacttccttctaaggtgaccaagatggagttttctggaagaaagtggaggaagctgaggttggcaggtgaccagaggaatgcttcctaccctcattgccttcagttttacttgcagccaccttctgaaaacatatctttaatagaatttgaaaacttggctattgatagagttaaatgtaagtactatttaaattagaatgtatatattcttgagaagctcacttaccctttgtgagaatgaatgaaggtaattcatttccttcattcagcaatccattcaacaagtatttattgaggtaattcatatccttcattcagcaatccattcaacaaatatttgttgagggtttggtactcattcatttatttattgtacaatgcatattattgagtgccattatgttctaggtggcagggattttgagatgaataatgttattttttgttgaagttttattctagtacatggagacagacatccaaaataatagtcataattcagtattttaactgctctagtagaagtaaatggtagtgctgttgaaacaaagaagtgggagtgactgacttagtcttattaaatgagcttcttagagaagttgaaatgtgatctggacatactgaagaatgagtagaaattttccagcagagaagaagtgaagagtttttccaagctgagataatggcctatgcaaaggcttggagcatgaaagagaatttcatatttgagctaacagtaacaagttcaggaattcagggtggatggagaagtatggagggcattttgtgccatgctaatgatatgatattggggtgtaagaaggatgtggccaccgtcctgggggcctacttaatcctcagtgtgttgctagagaaaagaatgggctagacatgaattgaaacagaaacactagcgttgtcttcagagtttatgttccaggatatccctgtggggaaatcagaaggaaaggtgagatactgttaatcattcttagaggagcagggtaagcactgctaatacagagaggaggcactcagtgcctgtgtgttgaatgaaagaatgaagacaagggagaaaagggttttagaaagcttagcagtgtcaatacttcatagggattaagatggtgattgaaaagtgtcccttgggtttggcacttgaggtgaaatgataagggcctgaactatgataatgacaatggcagtggtaggaagggagagagttaagggatactgaggagttagcattgataggatttggtgactggatatgaggagtgagggagcaggtgtggagtggctgcagttcctgcttggatgatctgatgcatggaaactctgctgctggagatgggcatggcaggacgaagagtaggaatgaggggaggataattaatttggatacccatacctgtgggacatggggtttatgttcaggagacaattagaagttcttcattcttgacttcaaaaatgcctccagagaataattcatctgaggaaagattgatatggtgctttaggaacctttgaacagtatgtagcatctgttcaggatggttcatttggctgtttggatggcctttcttcttcactgttgtgctctgtcctcggcttcatcaggaaaggaagggatgctttttttctgttgaatctacgccaagtaaatgatgcctactgcctaacaggcagctcccatacgaaggatgcaaacaaggagtgcctagtttttttttccatactgacatacttttctgttcctcaggaatgattattcaccatccatccctcttccctgattgagaatccctggtattaaattatgctgtgggacatggatattttctgcacatagatggacattatcctcttataagcatatgtagtttatatgatgtcgttacaggaaataaactggcaattacctgtcatgttctgtaaacaagtaattatggaattgccctccatagattttgtcttggatttagttttaaaacattatcttgcatttataccttttttcttttttttagtgttaaaatcagttgaaaatcttggagtgagctatgtgaaaggaactgaacaataccagagtaagttggagagtgagcttcggaagctcaagttttcctacagagtaagtaaaaaaggaaaaaaaagttccttcagtttctatgcatttatgtattgagtgtcacttgtgggaaagatattatattaggcactgggcttttataaagactaatgtatcattagcctgaaggttcttcagtgtattaggggtgattgacatgaagtcagatgattataatatggcagggtttctcaacctcaggactaacatcattttgggtctgataattccttgttgcagggattgttctgtgcactgtaggatgctcagtagcatctctggcttctacccctacatatttccagacatgccaaatgtatcccgtgcaatacaggatgatgactgtgtttatagatgcatgctccaggaactccaaaaacatacataattatgcagctcagattggggaggtttgggaaggctttccagaagaggtagtagtggagctgcatgttgacagatgtgattagattttcattttgggaagatgactgccagcagcagattgacagggtcatgtctgttaggagggaaaccagttagaagcccggaaatgatgagagtctgaattaaatgagagaaggggaccggttgaagagacattaagaaggtagaatcaaaaggttttagtgactgattgtagggggaatggagagagaagagttataaatgacacccaggtttctagttaggaaaattagtggatggtggtaatattttgagatgtgatatgcaggaggagaagcaagtcttggaagacgtagagtttagttcttaacatgaatttgaggtgcctgtggagatgtctagtggacaattggatatacaggtctgaatatacaggaagacatgtggtgggagtagatttagcagaaggttggaatcatcaggagtaggtaagagcaccctagaaaaatatttgagtgagaagagatgacggtggaagttaagacatgaggaataccaatattgaaggtaaagtggaattggaggaatttgggaaggagaatggaaaggagctttctcagaagtaggagatgaaccaggatagtagtgtcatagaagccaaggagggctagagtttcaataataatgatcatgatattaataatgataatagggaataacagcagatatttatattaatagtatgtttgctatgtaccagattttgttctaagtgcattacatatattaacccatgtatgtaattcatacagcagtcttatgaggtgggtattattatcatccctattttacagatacagcctatttattcacagactgaataacttgcccaagctcataagatggtaaatggtggagccaagatttgaatctgggtattttgtttctgtagtggtgcttttaaccacaatagtttcagaagcttaagatagattatgtaagatgaattgtacagtgtccattggatttagcagctggatgggcccttatagataggggcagagaccagaacaatgacagtggttggagaaggaaggtggagcggtggatatagaagatgtacttttttaaaatgtgtagctgaaaagagaagagaaatagggcagaatataggggttgttttagggaaaagagaagatatacaagcacacacttgtacatatatgacaggagatacttaaacatgtttataagctgagcagaagagctagaatagaatggggaagaggggagcttgaagttgaaactttgagagagcatttgataagtcagggtctttaagaggcacaagcaaatgggttgtggggtttaggtgcaggaattagcttttcatatggtttggctgtgtccccacccaaatctcatcttgaattgtagttcccataatccccatgtgtcatgggagggacccggtgggaggtaattgaatcatgggggtggttacccccatgctgctattctagatagtgagttctcacaagatctgatggttttataaggggcttttccctattttgctcagcacttctccttactgccaccatgtgaagaaggacgtgtttgtttccccttctgccatgattgtaagtttcctgaggtctccccagccctggggaactgtgagtcagttaaacctctttccttttatgggtttactcagtcttgggtatgtctttattagcagcatgagaatggactaatgtagctttacatgccaggaagaggagatgctttgtagagatgtatggaaggcaacacaacatgtgtatgcggaagcttgggactgaaggattctgcctggtagcctttattttctgtaaagtaggtgaagtcatctgttcagagagaagggaaaggtgctatagtaggggtcttgggacaactggtgaagactgacgattttctgagaagtgaggaaggagatgattttgtgtcgaatctcaacactgctgcttactctggacaagctttgtgaccctgaacaagttacataacttctctgtgcctcagtttccttatctgtaaaataagattatagtagtgcctccctcatagggttttttttttttttaaaggattaaatgggttcatgccttaaaaattcttagggcaccgcctggtacctagtgagtgctcaagacatgtttgttcttattattttggatccaactgttggtaaggatctagttgagattataggccacgaaattatattttccaaattcccatagttgtgttttttctccagaggttcttagcattttgagaataggactgcagagtgtagttgtagattaagaatctaggttttgccaaatggttgaaattaaagaagctgaggttggtgtaagaagtggttgaggtggtgagcaccttggatataggctggataagaagaaaattaaaagagaggggttggtgggaagaaaatagtgcggtccaaactcaaggggttttgtcaagattagtttacttctcggtttcatctgattgatagcttaaggtaaatgataattatcctgaaaagcatattaagaaatgttttggcaatgagaacacatggacacagggaggggaacaccccacaccagggcctgtcagggggttggggtcaaggggagagacagcattaggacaaatacctaatgcatgtggggcttaaaacctagatgacgggcagcaaaccaccatggcacacgtatacctatgtaacaaacctgcacattctgcacatgtatcccagaacttaaagtaaaaaggaaaaaaaaaaaagaaatgttttgggactgggtgtggtggctcatgcctgtaattctagtgctttgagggactagagtaggagtcttgaaaccaggagttcataaccagcctaggcaacatattgagactccatcatacagaagataaaaaattagcggggcatggtgggtgtcgcttgtagtcccagctgcttgggaggttgaggctggaggatcacttgagcccaggagtttgaagttacagtgagctgtgattgaccactactctccagtctgggtggtagagcaagaccccatctctaaaaaaagaaatgtttttgaaacttactttaccattggcttaggctggctcagtatttccttacacctcttaccattctaatgcatttattttattcatgtgtcattatttttaaggaaaacttagaagatgaatatgaaccacgaagaagagatcatatttctcattttattttgcggcttgcttattgccagtcgtaagtatatgtttatattctcacagtcaaatctggtgtcatgggttataaattggtgtgtggtaagttgatgtgttgtgctaaacataggaaaacccagaataacatcaggagccggttgatcatggggttgaacactgacagtaaattgtttggaagaaattgtttacttaaaaatattgaaaaaaattctatcgcagaattttgcctgatgaaacacttcttaagtttgtgagatagactcttcatttgggattttaaattggaaaggattttattgggaagaaggacttttgatatttttcctgcaaaaaaatggtaatatttataagaaacaattaatgaaacccacacttgaatttgatacaggtttttggaatttgagctctatgggccagttaaatcgaagatatttttgtttggtagttggtttcttttaagttaatagtgccacccagaggtagtaaagttagttgcttttataaaaattgtttttccctcacatgttaattttggtcacataatttagttatggctgtctttttttaaaattaataggcttatcaagtgagactctggaattgcttactatcccaagataataattgagaaattacttaccagttttggttctagagtttttcttctgtaaaaaagcatatgtagtttgtgaaatttatataataaatatgttgctgacaatctgtgaaaatctcctaaaaatgtgaaatcatattttgcatccagtagggtaattattttattatataacgataatgcccattagtatctgccttataaatgaacgttattgcttttaaatattgtggtatatatgtgcatattaaattttgtgaaattatcaattataaagccataagcaaagtttcctttgcaaagttaatctgatcaaagttgccttaaaaaatttggtgtcttttatttggcatttataaagacacctcaagccaaaggagtgccccatttccccattttcttttttttttctcttttctctctctctctttttttttttttgagctagggtctcatgccattacctaggctggagtacagtggtgtgatctcggctcactgcagcctcaacatccgtgggctcaggtgatcctcccacctcagcctcctgaggagctgggactataggcacatgctaccatgcctggctaatttttttgtagatatggggttttaccaacttgcccaggctggtctcaaacttctgggctcgagcaatctgcctgccttgacctcccaaggtgctgggattacgggcatgaaccacgacgcccagcccctattttctaacataaaatgaatattttgcagttacattaaatgcatgaagtattttatgttatttaaaaataatgcagctagtctcgaagcattcttgtatttaatctttttaatttttaacaccccctataccttgtacccaacccatccttagaagattgtgatatgtggtattgatattctccttaccgtgatagaggacttgcatgtttttaactgctgtccattggcatcttgctgatgtttgaatattgttttataaacatttcttagatttaataattactggatttttagtttgtactcataatttctgtcttcatttcagtgaagaacttagacgctggttcattcaacaagaaatggatctccttcgatttagatttagtattttacccaaggataaaattcaggatttcttaaaggatagccaattgcagtttgaggctgtaagtatatttttgtagttatttctaattgttctcaccattcatttttcccttctgtcttaagtgctggtactaatgtgtagtgtgttctctttacattctccaagtacctgcctgaaacagtagctaatagctttggataacaatatatctttccttctctatgactagaagaaaagggactccttaataacaaagtctcacacttacttgctctgttaaatgtgtgctttattaaagcacaagaaggtttagtttataaaggttcatctttaaccaaaattttgtcggccaaaataaagctaataatgtgttaaactagacaagtggtagtttcttatttatagtcgtgaaatttagaggaggtaatactttatttaaaagtcagttgtcaggcggggcgtggtgcctcacacctgtaatcccagcactttgggagtctgtggtgggcagatcacttgaggtcaaaagtgcgagaccatcttgaccaacatagtgaaacccccactctacaaaaaatacaaaaattagccaagcatggtgctgcgcgtccataattccagctagtcaggaggctaaggcatgaaaattgcttgaacccgggaggtggaggttgcaatgagctgagatcatgccgctgcactctagtctgggcgaaagagcaagactccgtctcaaaaaaaaaaataaaaaccataaatcaaaaatgtcagtaagatctgtatgaatagttttaaaaaataattttgcagacatatctgaatgatttacatattgtaattatataaaaaaagaagagatctttgggactcatttaatggggatgagtattggaaatagaatttgtatcttttttttttttttttttgagatggagcctcactctgtcatccaggctggaatatgcagtggcctgatctcggctcactgcaacctccaccttctgggttcaagcgattctcctgcctcagcctcctgagtagctgtgactacaggtgtgtgccaccatgcctggctaatttttgtatttttagagacgtagttttgccatgttggccagggtggtcttgaaccccctgacctcaggtgatacacccgcctcggcctcccaaagtgctgggattacaggtgtgagccaccgtgccgggcctagaatttatgtcttttaggtagatatatgccacaatgggaatgtagaaacattatgttttggaagttttagagcagtcagatggtagtaggactggcagagactctattttgttgttggaatgcgtggcttaaagccaaataaaataaaaaagtagaagttgcaataggtgaaagacattgtcctgtctgacaagtagaagacatatccactgtagcaaggaacactatggagtatatgagttagggaaaagagactgtgaagggaagtgaacaaacattttgtagacgtttagtgtcaaatatatgctaggtaggcagtttctatagtttctttcatttacttcatgaggtttctaagtcacatctacctttgcatagacagatgtcatgcatggtaccatctgaaccaaacccactgcatcttccactttgcttttaactttgatccttggtgaagtccattattgcaattatcaattacagttaatttatccattcctattagaaatagtttattttttgcttttgttgaaattactgatttttagtaggtcatagagagaggtgtccttgagaaggtctattatttattctagggcagccatctccaacctttttggcaccagggactggtttcatggaagacaatttttccacggactgaggtcgggggatggggaggggtgtggatggttttgggatgaacagatccacctcagatcatcagtcattagattatcataaggagtgcacatcttagatctctcacatgtgcagttcataatagggttcgcactcctataagaatctaatgcctccactaatctgacaggaagtggagttcaggtggtaatgctcgctcactgctcacctcctgtgcagcctggttcctaatgggccatgtgctggtgctggtattgtggcctgagagttggagaccccagttgtagagtgtctcagcgtcacatatacttttttaaataatagatttattgagctagaattcacaaatcttgacatgcacccttttacaatgtataattcattggtttttagtgtaattacagattgtgcaatcaacactactatgtaattttagaacattttcacctaaaaatgaaacctcttacccatttatggtcattccctattcttcctctcccaacccttggcaaccactaacctgctttctgtctctggatttgtctattctgaacatttcatataaatggagtcatacaatatgtggtcccttgtggttgacttcttttacttagcataatattttcaagtttcatctgtgctgtagaatgtatcagtattaattttttaattgccaaataatattttacctgttcagcattcgagggacatttggatggtttccatattttggctattatgaataacgctacagtgaatatttgtgtccaggtttttgtgtgaatatgttttcctttctctcaggtgtatacctaggagtagaattgctaggtcatagggtgattctgtgtttaaacttttgaggagctatcaaaatgttttccaaagtggctgtatcattatatatcttaccagcagtggatgagggttccactttctccatatcctcaccaaaaattgttaccttttaaaaaaatatagccatcatagtgagtatgaagtggtatgtaattgtggttttgatttgcatttctaatgaagctgaatatcttttcatatgcttattggtcatttgtatatcatctgtgaagagatgtctgttcaaatcctttgcctgttttgtagttgaattgtttggctttttattgttgagtgttctttacatattctggatacaagtccattatcagatatatgatttacaaatattttcccccactctgaaggttgtcttttcttgatggtattgtttgcaacaaaaaggtttttttttttcagatgaagtctaatttatctttttttcttgtcacttgtgcttttggtattgagtctaagaagtctttgtctaatgtgaggtcataaagatttactcctacagttttttctgtaagagttttgtagttttagctcttacgtttatatctgtggttcattttgtgttaatttctatacacggtgtgaagtaagggtccaacttcattcttttgcatgtagatatctagttgtcccagcatcatttgttgaaataaccattctttcctcattgaattgtcttggcacacttgtcaagtcagttgactgttgatatggtttgattgtgtccccacccaaatctcatcttgaattgtagttcccataatccccacgtgtcatggaaaggacttggtgggaggtaactgaatcatgggggcaatctcccccatggtagtctcatgataataagttctcactagatctgatggttttataaggggcctccccctttgcttggttctcattccctcccctgccgccctgtgaagaggtgccatctgccatgattgtaagtttcctgaggcctccccagacacgcagagggctcaggattaaacctctttcctttataaattacccagtctcaggcagttctttacagcagcgtgagaacagactaatacaactgtaaatgtaaacatttatttcagtactcttaattttattccattgatctgtctgcttatccttatgtcagtagtatgtggtcttgattattggttactgtggctttattgttaagatttaaaattgagaagtatgagttctccagctttgttcttttttaagattgttttggctgctctgggttccttgcattttttaatgaattttgggatcaacttgttaatttctaccaagaagctagctaggatttacactgggattacattgaatctgtagatcagtttgggaggtattcttttgtaatgatattaagtcttccaatccatgaacatgggatgtctttctatttatttagatcttctttaatttttttcaacaatgtcttgtaattttttgttacatttatacctaaatattcttcaatgttattgtaagtggagttgttttcttcatttcatttttggaatgttcattgctagtatataaaaatccaggtgatttttgtatattgatcttgtatcctgcaaccttgctgaacttgttttttttttttgtttttgtttttttgtttttttgtttttttttttttgagatggagtcttgcactgtagccgaggctggagtgcaagctccacctcctggattcatgccattctcctgcctcagcctcccgccggccaccacaccctgctaattttttgtattgaacttgttttttaattctaacagttttatagtggattcattatgagattatgtttactacagagatattctgactcctttctaatcaggatgctttttgtttctttatttttgcccaattgtccagctagaatctccagtacagtgttgaatagaagtggcaatagcagtgatcatgatctcaggggaaagcatttagtctttcactatgttgcatggttttagctgtgagttttttttatagatgccctttatcagattgaggagattttcttctaattctagttgaatattttcattaagaaaggatgttgtattttgtcagtgcttttcctgcaccaattgagatgatcatgtggtttctgtcctttattaatatggtgtgttgggccgggcgcggtggctcacacctgtaatcccagcactttgggaggccgaggtgggcggatcacaaggtcaggagtttgagaccggcctgaccaacatagtgaaaccccgtctctactaaaaaaaaaataccaaaaaattagccagacgtggtggtgcgtgcctgtagtcccagctactcaggaggctgaggcagtagaattgtttgaacccgggaggtggatgttgcagtgagccgagatcgtaccactgcactccagcttgggcaaaagagtgagactttgtctcagaaaaaaaaaaaaaaaagttctgttacattaattgatttttggatgttacaccaaccttgcaatcctggaataaatcccccttggtcatgttatataatcttttaatatgctgcttggtttggtttgctagtattttgttgaggatttttgcatctatattgataagggatactggtctgtaggttttttgtgatgtctatatctggttttggtattaggatcatattggcctcatagaatgagttgggaaatgtttcctcctcttccgttttttggaggaggttgtgaaggattggtttaaatgtttggtagaatttaccagtgaattaatctgggcctgggcttctctttgtgggtcattaaaattaccaattcattctctttacttattatgaatctatttaagttttatattactttttgagtcagttttagtaatttgtgtcttttttggaatttattcactttatctaagttatctaattgattcatgcagttattcatagttttctcttatccttttgatttctttaagaaaataaaaggattggtgatgatgtcttctctttccttcctgattttaacaattagagtcttctctttttttttgtcatctaggtagaggtttgtcagtgttactggatttgttcaaagaaccaacttttggtttcattgatttttctgtgttattctctagactctatttcactagtttttactacagtctttagtatttccttccttctgcttgctttggtttggtttgctcttttcttctagtttcttaaggtaggagtttagggtatttatctgagatattttttctttttatatgtagacatttacagctataaattttcctgtaagcactacttcagatgcaaaccatgagtttttgtatgctgtgttttctttttcatttatttcaaagtattcttttttactttgacacattgattagaagtgtttaatttccacgtttttgaatttcctgaacttctgttactggttttaatttaattccattttagtttgagaatatattttatatgactgcaatcttttaaaatttattgaattttattttatgacctagcatatggtctgttctggaggatgttccatgtgtgcttgtgaagaatgtgtatctgctattcttggttggagtgttctgtagatacagtctgtaagatctggttggtctatagtgcttttcaaagcttcggtttccttgttcatcttctgcctatttgttctatccattattgaaagtggggtactaaagtcttcaactgttattgtttatttattatctttaattctgtcaatttttgcttcatttattttggggctctcttgttagttgcatatatgtttataattgttaaatcttcttgatgggttgacccttttatcattatgaaatgttcctctctagtaacatttttttgttgttgttttaagttatgtttgtttgacattagcatagccattccagatcttttatggttgttgtttacgtgatatgtctttttctattctttttattttcatcctttatgtgtgtttgaatctaaagtgtgtttgttgtaaatatcatatagttggatcatcttcttttcttttttattcattttggaagtctctgacttttgcatggattgttttatccatttatgtttaattactgataacttagtatttccgtgtgccatctatgtgtttcctatgtcttaaggtttttttgtttctgtatttctccattactgccttctttgtattaaaatggtattttctagtgtaccattttaattcctttgctgtttattttactgtattttttgagttattttcttcgtggtttcccttagaattacaattatattttattttaaaacaatctagttgggattagcattaagttaatttcaatagtgtacaaacttttgttcccatatgctctgttccctactccctgccattgtcctagtatggtcatacaaattatttcttaatatatcaacagaggtaaactttttgtgttctagattgtatgaaaaatgtatttataatactgtcaaacttgagtgtagtttgccttggtatacaggcaaatacctgtatgttgggaatattttttattggcattttggagatattgcttgctgaaccttttagcttctagagttgctcttgagaagcctgatttcattttgacttcttattctttgcatgtaactttgtgtcctttgccagtcccactctcttgtgtagtgaactttcatggcgatgtctgcaccttttttcacttttttgggttgggaacttggtggactcttttaatctgaagatttgattcttcagttagaaaatttctttttattattgctttaataatttcttctatgttctctttttataacctcttgttaggtggaatttatattttctggattggtactcttattttcttttcggtcctgacattcaatctttgtgtttttattttattttctgaaaactttcatcaactgttttctcaattttctatttatttatttttccctcctgtgtttaatttttttcttttaaatttacttaaaaattgaatataaaattgtatgtattcactgtaaaatataatgttttgaagggtacattgtggaatgattacatctagctaattaacaaatgtattacatcaacagttatttttgtggtgaaaatacttaatatccactcacttagcatttttcatcaatacagtttgttgtcattaactgtagacatcatgttgtacaatgggtctcttgaacttaatactcttaactgtgattatgcatcctttaacagacatctccctaacctcttttcctccctaaccaccccagctactggtaatcactattttaccctctatttctatgagatcaacttttttagattccacatatgagtgagatcatgacatatttgtctttctgtgcctggctttatttacttaacgtaatatccctgtttcattcatggtgttgcaagtggcaggattttcatttttttttatgactcaatattattccgttatgtatatatattgcatttaaaaaaatccatgtatctatcggtggacacttaggttgattccgtatcttggctattgtgaatagtgctgcagtaaatatgggtgtgcagatgtcttcagcatactgatttcatttccttcagatacatacccagtaatagattttgctggaacatatggtggttctatttttaattttttgaggaactttcatattgtttttcatttctacaaaaaataaaaaatagctgggtgtagtggtgcacacctgtaatccagctacttgggaggctgaggtgggatgattacttgagcccaggtgttggaggctacagtggactatgatctgtagcccaccctgggctacagaacaagaccctgtctctcaaagaaataagaggataataacgattttcacctcacagattagtgaggtttaaatgaggtagtgcgtatagagtgcttagtactgtgcatggaatatatgctgggtagtaatattacggaggatacagaagcagcatatgcctgtattgtgaagaagttcggagtcaattagattgatatgtttttactgcaattaaaaaaatggttttggaataggaacagctccggtctacagctcccagcgtgagcgacacagaagatgggtgatttctgcatttccatctgaggtaccgggttcatctcactagggagtgccagacagtgggcgcaggtcagtgggtgcgcgcaccgtgcacgagccgaagcagggcgaggcattgcctcactcgggaagtgcaaggggtcagggagttccctttcctagtcaaagaaaggggtgacagatggcacctggaaaatcgggtcactcccacccgaatactgtgcttttccgacaggcttaaaaaacggcgcaccaggagattatatcccgcacctggctcggagggtcctacgcccacggagtctcgctgattgctagcacagcagtctgagatcaaactgcaaggcagcagcgaggctgggggaggggcgcccgccattgcccaggcttgcttaggtaaacaaagcagccaggaagctggaactgggtggagcccaccacagctcaaggaggcctgcctgcctctgtagg

SEQ ID NO: 571 - DNA, 546 bp, Homo sapiens
ggtttcatatgaactctcccgccacccgggaacagtggctgccaccgtttgtgttttcccgagtttgaattcttgcaggtgaccaagatggagttttctggaagaaagtggaggaagctgaggttggcaggtgaccagaggaatgcttcctaccctcattgccttcagttttacttgcagccaccttctgaaaacatatctttaatagaatttgaaaacttggctattgatagagttaaattgttaaaatcagttgaaaatcttggagtgagctatgtgaaaggaactgaacaataccagagtaagttggagagtgagcttcggaagctcaagttttcctacagagaaaacttagaagatgaatatgaaccacgaagaagagatcatatttctcattttattttgcggcttgcttattgccagtctgaagaacttagacgctggttcattcaacaagaaatggatctccttcgatttagatttagtattttacccaaggataaaattcaggatttcttaaaggatagccaattgcagtttgaggct

SEQ ID NO: 572 - protein, 151 aa, Homo sapiens
MEFSGRKWRKLRLAGDQRNASYPHCLQFYLQPPSENISLIEFENLAIDRVKLLKSVENLGVSYVKGTEQYQSKLESELRKLKFSYRENLEDEYEPRRRDHHFILRLAYCQSEELRRWFIQQEMDLLRFRFSILPKDKIQDFLKDSQLQFEA

SEQ ID NO: 573 - DNA, 90616 bp, Mus musculus
  misc_feature (1)...(90616): n = A,T,C or G
gcagttgacgagcctccaccagaagggtgcaagtcgtttctctcagtgcatggaaagcagacttgtgatctagacactctggagagccttctgctgactgccgctgacaggtcggttgtgttcttcactcaatgtggtacatgctttgtgcctttgctctatcacatgcactctgagttgagttttgttttcttccttgtttgtttgtgtgtttcagataccctcacttggtagtcctggcctagaactagaacagaccaggctggcctcaaactcataaagattggtctgcctttcctccgcggtgctgggataaaaggcatatgtctctattgacgcctggctgatttttgttgtttgttgagaaaaggcatgtgatacatgcctggtcctctgagttttttaccttaccatctgcacgtatttgagaatggctactagctagagactgaccagatgtgaacatcagctccattacttaaagtagtttgtaaaatgatgaaaattagtttgttttctcatgtttcaaaattagaagtacttgatattcctgttttattgggtgattttttttttctgagagatttaatggctttgttgttagcttatcaaagaatactgtctgtacaaaaagctggcgcctgaagtagcagagattaataataacgatctcttaggatattatgaccaacaacagacagtatttaagcgatattacaaacttgatttgaataatgaaagtacagttttttttgtgtgaggaggctgaggtttccaacagtggacacttagcacaagtatgcatctggctggctggagtagcagcctctctgtacctgctctaggccatgtgatgatgactctaccagaaacgttaatgggatttttggttatggaagtcttgtgtaatgacattgtcaaacccgtaacaaattctctgcccaacacatggcactagtctctctctctctctctctctctctctctctctctctctctctttcagagacagagtttctctgggcactagtgtctctaactcagaatgacaatagtaaagtcactgtattttcaggtagctcagcgtcagggtgtgggtggatatttgagaatggcagcatggtagagcaatgctttcctgggtggaatgtaattggaggcctggcagtggtggcacacgcctttaatcccagcacttgggaggcagaggcagtcggatttctgagttaaaggctagcctggtccagtttgtcttagtcagggtttctattcctgcacaaacatcatgaccaagaagcaagttggggaggaaagggtttattcagcttacacttccatactgctgttcatcaccaaaggaagtcaggactggaactcaagcaggagctaatgcagaggccatggagggatgttctttaatggcttgtttcccctggcttgctccctgctctcttatagaaccaagactaccagcccagagatggcaccacccacaaggggacctccccacttgatcactagttgagaaaatgccttacagttggatctcatggaggcatttccccaactgaagctcctttctctgtgataactccagctgtgtcaagttgacacaaaactagccagtgcaattgaccccttgtcaacttgacacacaaacacatcactagtaagcctcaacccttagttcttattcatcctcaagatcttaaataactttaaaagtccccacagtctttacatattaaaaagttcaatcctttttaaaatattccaatatcttttaaaatcccaannnnnnnnnnnnnnnnnnnnnnnnnnnnnnnnnnnnnnnnnnnnnnnnnnnnnnnnnnnnnnnnnnnnnnnnnnnnnnnnnnnnnnnnnnnnnnnnnnnnnnnnnnnnnnnnnnnnnnnnnnnnnnnnnnnnnnnnnnnnnnnnnnnnnnnnnnnnnnnnnnnnnnnnnnnnnnnnnnnnnnnnnnnnnnnnnnnnnnnnnnnnnnnnnnnnnnnnnnnnnnnnnnnnnnnnnnnnnnnnnnnnnnnnnnnnnnnnnnnnnnnntgctgttcttggtggtcatctcatggtactggcatctccaaaacgctgctgtcttccactgtaactaggcttcaccaatagcctctcataggctctcttcatggtgccaagcctcaactcctttgcatgacccctacagtcctgagccctcaattgcaactgaggctgcaccttcaccaatggccttccatggcccctcacagtgccaaacctcagctgctctgcctgaccccttcatgccttcaaaaccagtaccacctgggtaactcttatacattaccaagtccagccacagcacaaggtacaaccttggctatctctggaacacagcctctgtgctctcagaaaacttcccagaagatgccacctcaatgatgctggtctcttcttaatcacagctaatttcttagctccagctaaccagcatcaatagtcccagtaattcacagtttttgctttagtagttctggtatcttgttaatcacagctgatttttcagccccagctaaccagaaccacagaatcttcacaatcaaaacagcaatggccctgaaaagagtcttaatcttctctctgaaatttcacaagccaggcctccattttctgcagtgttctcaacattgtctttcaagctcctacacaacatctcacagagctcttaacgccgaatggatcttctggccgaaagttctaaagtccttccacagtcctccccaaaacatggtcaggttgtcacaggaataccccacgatgctggtaccaatttgtcttagtcaggatttctattcctggacaaaacatcatgaccaagaagcaagttggggaggaaagggtttattcaacttacacttccacattgctgttcatcaccaaggatgtcaggactggaactcaagcaggtcaggaagcaggagctgatgcacaggccatggaggaatgttctttactggcttgcccagtgagttccaggacagccagggctaaacacaaagaaaacctgtcttgaaaaaccaaaaaaaaaaaaaaagaaagaaagaaagaaagaaagaaagaggtaattggagacactgtggttcttttaaaactgtattgagtttgttagagcaactgtgtagacttgtgtggagtggtgtctcctcttctgagggtggaactgcttttaatagtctactgtgtatcatttttatggctttaagtttgcacaagtaggtaggtatatatctgttgagagacatcttcccactttatgcatgtaggtgtacttcagtatttttaacacccgcataaaaatgtcctgctgcaggtttttagagttgttttgaattttggaactttaccattatgaagaatatatttttcatatgtcattgccctctgttgcgtggtttattagaacagggattggtgggtgtgttagttcctttcttttgttgctgttactgaataacatggtgaaaggccacttaacttattttactgtaagatttctatctgtctttgctttttattgtgtgataacacactactattaaaagcaattttgggaaggaagggtttatttggattatagtctatcctcaggggaagacaaggcaggaatctggaagcaggggctggagtagaaaccatggaggcatgttgcgtgctagcttgtccagcctgctctcttgtagaaagaacccagaccatctatcctcgggtggccacgcccacagtggactcggctttctcccatcaatcaatagtcaagaaaatactgtacagactcacctacaggcgagtctcaccatgggggcattttctcagttgaggttccccttttccagatagctctaatttctgtcatgttgacaaaaaacctgagcagctcggtttcaggaggctagatgtccaccatggcagagcaagcaagtaggagggaacagggagctgaggatcatgcctcattctcacacagggagcagaaggaggaagaactggagtgtgccgaggctataaactctaaaagcctgtccccagtgagctcttcctctgtgttccagagtttcataacctccctccaaacagtaccacaactggggaccaagtattcaaatacaggagcctgtaggggacattttccattcagaccaccacagtagatcatattttaagaacttttaatgtcttttttttaaagattcatttatttattatatgtaagtacactgtagctgtcttcagacaatccagaagagggagtcagatcttgttacggatggttgtgagccaccgtgtggttgctgggatttgaactccgaaccttcggaagagcagttgggtgctcttaacccacagagccatctcaccagcccccaacttttaatgtcttgatgctgattttagaaagtatggtggttttttactcttttgagaagtttaaaaaaattaaggggcggtggcagcacactcctttaatcctagtgcttacaaggcagaggcgggctgatctcaggagttccaggccagccagcccatacagacagacagacaaaagcattgtaggaagatcacagtagcaaacatgccagagagggagacttgctgtagctcacaagttacttgcttaaagttttatctgctgctcgaattatttggccttaattttcagataaaattacagtcacactccacacagtacaaaaatatgctgtagatttagtgctgtgggatttggtatgcatcctggcttcccttctgttctttttaaagaattgatgatatttaatttaacttagtattttataattaatattcatgtaatatactttatttatatagccatgaacgagtaaaactcatacttgacagtattctaaatgcaaactgtttaagattgtgctgctcatgaagatacttaaaacctttactaagtttttaaagttgttgtcaaccagtgtcctggtttttctttaaaatttttcttaattgaatatttacttccagaccgaaaccattattgttcaaaggagatcacagatatccctcatcaaatcctgagagtccagtggtcatcctttattctgagattggccatgaagaattttctaatattcaccaccaacttatatcaaaaagcaacgaaggcaaaattaattatgtattccgacattatatatctgtaagtattgacttattttacaatttcttgaatattaatttgtttaaaatgacttttacaaataacttaattggaaattcttttttttttttttttagaaatccaatacttttatcagatctctctctctctctctgtactttctttcacttgtttctttctcccccccaatctcccttcctctctttaatttttttttttttttgaaacagggtcttactgtgttaccctggctagccttgaactcactctgtagagcagactgacctcaaagtcatagagacccccctgcttcccaagagctgggatcaaaggtggttacacagaacattcttaaattaattaatgttcttactttcttgattgctctccactcattcttctccattcactgagcagtctctcagttgaactgaacaagctgcacccagctagcctgcttgctcagggtttccttgtttccaccttccacaggttagaattacaagcaagctgccacagcagtctgggtgctaaggatttgagcgttggcctcttgcttgggtggcaagggcttacctgctacggcacttgcttggtctgcatcagatctcttacttgcacatgggtggtgccttccttgcttgcttttccaaagaaacgtcaaaaaaattacacttaaaaaatgggataatcaaattgttttgattttaaaatgaactgcagtgagctaggtatgatgagtgattcctataatctcagcacttgaaagtttgaagcaggaggattactgtgaattcaaggctatctggagctacgaactgagatcctatgtcctttaaaattaaaccaaaaaacagatactaggaattgtgcaaacttttgtatgttaacatttaagatagtcatccaactgtccatgaaccttaggctattgagtgttgagccctcatgtctcctggtaagtgagctcttagcctcctgagctgtgtcccctaggctctcccctaggggacctgtttggaagcacagtcttgttgagttgtctaggtattgttgagttatctgggtggctttggaatcctccaggaagactttgaacttgcagtccccctgcctcagctgtgaccacaggtccaattcaccaggcctagctagaagtgattattgagatctctgtgtgtatttgagcttatatgtttgtggggtgtgcgtgggcagctgtgttctcttctggggtccacattttccacatttccacattttctttttgagatcttttttttcctttaaagtgtcttgacaagaaaattttgactcttgttcaagagggtgtgctcctcccaagcagaagagcagcactctgggggcaggagatgcaccagattctaatgcactcatgaccgtgtctgttcccaatgcctgggctgccttgccgtctgtcacaggagactttaaatgttttaatagaatcagggcaaaaagacatggaaagggaaagcaggtcggccgcttttagtcacttaagttccaagaaagcagggctgatctgtaagcatgactggggtggaggggaagcaaattcaaacatttgcctcagagtcttacaaagtgggaagatactggtatcttctcccagacacagtgcagtgtctgatagcagagactaatactttatcttacaagtccctcctcttactgtacgtgttctgttgtttacactcattaggaagatgttggctctctctccatcctttcttagagtaagaaactgctataggaaggggtccttctttagtgatagctgacccagtaagtctgagttaggactctaatacaagaaagtaattattccatctctttcattggcatggcctccctgggggtatttggccagaggttgaccttgtcccattggagtgttaagcctccacccaggctgcttcatgaccaggaagaatttttcttagcaggccttcattattactttaatacccacaccccaagaggtaacctaagaatcatttaggaactagatggaaggtcagagccccagacacttggcctttctagtctctagcagggatgggcctgccagggctcccaaggatgtttctgggatttttgctannnnnnnnnnnnnnnnnnnnnnnnnnnnnnnnnnnnnnnnnnnnnnnnnnnnnnnnnnnnnnnnnnnnnnnnnnnnnnnnnnnnnnnnnnnnnnnnnnnnnnnnnnnnnnnnnnnnnnnnnnnnnnnnnnnnnnnnnnnnnnnnnnnnnnnnnnnnnnnnnnnnnnnnnnnnnnnnnnnnnnnnnnnnnttctctatctcctgttctcatcttccttcgctctgaagaggtaactctaatgccatcgtagcgttgggccaatgacccatctcagctgatttcatacagctgaatttggggtgtcagagtcacagttttggggtacccctccagggagcctatctaaaaaacctcaactgttagatgtagggaggaaagaatcattgactgctgtctggaaagatgtgagggagctgtgttaccctaggcagggagaagccagagacattgggctcacaagaacatccgtctgttgggtccttctcatggttctcttggcctccacggctgactggacagcgatgaaaccaagatctgttttcatgcactttgaaagctgttggacagactagaaacagtgcagagtctcccccggatccttccagagggacagagagaagacatttagctagcatttgattttttttttctctcttttttttaaaggttaaaacaatactgagcctttcttacttggatagtcattgaagtgtttaattgagccaaaatctgaggtcttatatctgggtagcttttttttttttttttttttttaattaagaagaaaatcactgggctggagagatggctcagtggttaagagcactgactgctcttctggaggttctgagttcaattgccagcaaccacatggtggctcacaaccatctgtaatgggatctgatgccctcttctggtgtgtctgaagacaagtacagtgtgcttacatataataaataaatctttaaaagaagaagaagaagaaactcaccaatgagacacaatctaggtaacagcccagatagttttaagtctaatgtctgggaactgtgagcctctggatagttacaaaacctaacaaacacacccatcattttagtttggggttgtacttttgtgatgggtgtttcagacaatgtaggtggccagaattatttttttcttctttttttatttttatgttttagtttttttcgtctttatactgtcaggttgagggtctagttcttgggtacccgtgcttgagagagacctctggttccttctctgccagtttctctgtgtgagcgtcagccggaggccggcgtgaccctgcctttgcttggaagcagtgaggaaatcctttacattgactctcctcttcgtagattggacactggttggtgtctcttcgggctccttgaacaagggaacaggaagttctccgtgtacttacaggccattttgaaagctgcccgccccataatcccctgggagctagttgttgactgatcttggagggcaacgggagtacattctccctgttagtctgtctggccacattagtgtagcttctgagtatggttattaaatatgcagaggattagctgcacccttttaactactggatagtagttcagaaactaggcgtgtctacataaatgttgatgagacattctttttaatgtgcttgttgaactttgaccttactcttttggtatctttttatttggtggaagtggagcgtttctaaagaggtagaataaagcagaattaatataaaattaaacgtgtatcatatcattgagtatttaaaatatggaagtctttaaagtttgtgtgtcatattgttcagtaattcagtaatggtaattgttaagtatgtgctaagagaataaaaattccaaaagaaaatttgatggagtagagacagatgtatttatcagtccccccctttttttttgttcttttatatttttgagaccagtttcaatatattctaggctagtctagaagtccaaattcttctgccccggtcccccccaaccccccattagagttaaagctttatgctaccacatctggccaaagtccagtttttgactactcctctcctgctgacatccccaggccttggattatgaccaggttcatagggatcaattgctccccctgtggagcaagacgtttgagtgcatgtctgagaaagcagtcgattagccctttgtaatagtcatgctatctattatagcaccagtagtgttgtcttgcctcgagatcagtgctgagtatatagctaataacattatatatatatatataaatataaagacaattaaaaagtgtttacagtggaattacatcattcccctttctctctccagcccctcctatgtactccgacttgacttcatttaaatttattccatttttcttgtgttgttaaacgcacgcatgcatataagcacacacatatccacacacacaacctgctcagtccatatgatgttacttgcacatacgtatttcagggctgaccattttgtattggacggccaattggtgtgcgcttctcatcagtgtggctgcctgcactgagcaggggcggcctcgagagccatgccagtaaggaggggccgctgtgcctcatgccgggccaggtggggatggtggaactcttgctctatttgcagaatcccagcaaggagccggtttacctttctggctatggagtggaactggcgatcaagagcacggagtacaaggccaaggatgatactcaggtgaaaggtgaatttgtaaaaataagaccatgctttctcttgcctttacgtatgagttcatggggaattggcttgtcacatctgggtaggaaccttcagcacattttctaggcctggatttttgtcctctgtaacatatgggcagtgataggttctttttcaaggaagataatgtatgtcgagaatttggggggtggatattgtggtgtgtgcttaacaatctcagtgctgaagcaggaggattatagctcaaggctgcctgtcctgtcccccaaacagtaaaaacaaggaagggtacaccgaaacaaaatgaagcccacgaggttgcgtgtggtgtttttacccaggtgatgtgatcagcagcagcaactgttgttgatgttgtgtgtgtcacagacaggccttactgtgactccggtacaaaactctaaatatcctaggcctcatgggtcatttttgtttttattatttttgtacttggaacagttttctttgggttcttcctcccatattatgatgtggttttttgtttttgttttgttgagacagattttttttttccatgtagccctggctgtcctggagctcactctgtagaccaggctggccttaactcactgagatcctcctgcctctgcttcccaagtactgagactaaagggatgagctgccatacccagccctgaagtaattttttttaaccacaagttttacttgctgtctttttttttctttaaaaatcactttattatatctttttgtactgtgtggtactgagttcagagccttgtgtgtgatgatgctcgtcctccgttatctcaccattgagctgcatctgcattctttttaatgttttcgtttgtttgtttgcttttcattaagttatccaggcacactaaactatctaggccagtcttgaacgtgagcctcctgtctcagcgggaattatggtgcatgccattacattctctgcactgcttttaaacatgaaatgatggatttgaatagtgaagcaaatggaaaatggtgtgctgctctctcagtgatggttaggattttttaaactgtaaattctttagaatttaactgtgaaaaaatatttcataatatttcaatctattaatttcaaattttttaatgtaaaattttctaaggcttgaaagaaaatttattcttgttcagaaacacaagaaatataaaaccaccatcggtttacaggcccacactgaagtgttacttgaagccttcgatatttcttttaatctccagtctgtggtggaacccttacttctattctgagctactagacatgcctctactatgtctttataggaactgaggtaaatgccacggtcatcggggagagcgaccctattgatgaagtgcagggattcctctttggaaaattaaggtatgttgattcatgttgctgtgcaccgccctttgttcctgtgtctttcccgttgctgtctgagttgcagctctacaggacgttctatacagagtccaccgcggagaaaccttctcacttgcagtcagcgtggccgttttgttctagtgaaacgcactgctcttggatggcactggagttacctgcccatgctgaagcgggtttcttttcctctcagttgatagcatacagttacagatccttgttttgagtagcggaaaagatcacattctattctcttcttcacatggttggaagtagtgaatggggttattttcttatgctgagcagaatctgaaaaaagaagccaaagtgtatagtaagtagacttaaaaacatgcaatagagatagtgttccatcagccaatgggaagttttttctttaatatatatttgtttgtttgtttagttttttttgagacagggtttctctgtgtagccccagttgtcctggaacttgattgtagaccaggttggcctcgaactcacagagatccacctgtctcttgagttctgggattaaaggcatgcaacaccatgcctggcctatgttattggtattgtttgagtgaggtcttcctttgtagtcctggttgttctggaattctctatgtagaccaggctaccctcagtcatgcagagatctgcctgctgctgcttcctagacgcagatcaaagacatgggtgatcatacctggcagaaaatgatttttttaattaacttatttactttttacttattcactttacatcccactcactgtccccctcctgataatcttctcccacaaccctttcccatgcctgctcccctctcctctgagtgggtggggctcccctgtatccctgaccctggcacttcaggtctctgcgaggctaggcgcctcctctcccactgaggccggaaaaggcagcccagctagaagagcatatcccacagataggaaacagcttttgggatagccctggttccagttgcttgggactcatgaagaccaagctgcacatcggctgcatatgtgcagagaggcctaggtccaacccgtgtgtgttctttggttggtaattcagactctgagactcccaagggtccaggttagttgattttgttggtcttcttgtgaatttcctatccccctggggcctgcaatcctacagaagattattttaatgatggaatttgtttcataattacacagatcattttgtgacaacatcataatttatagctgaacattattcttgactgtggtgacttgataaattttttaagagtctcaaattctgctgtgtgggaatttcagttagaaattttgcagtgtgttgcccttttaaaaaataaaataaaatggtttccagttccagctgcggtgtcttcttccctttgggtggattactgttggttgactccctgccgtggacacttgcctgtcatctctttcagctctggctatagtcaggtgccacttttatttgatcaagatttccagagtctcttttagtactctttctatgctttttaattatatttatttatttcgtgtgtgccatgggaacagtgcctgagtccaagatatgcacacggacctagttctctgattcccgcaccccagccctgggatctgagtcaggttgtcaggtttggtggcaagccttcactgctgagcccttttgttgttctctgggtgatgctgtggttttatgcgttcatagcacaaaagcttcatgtagaatatacaacactaatgtacttttagaggacagctgttgtgctttaaaatcttttgcccgtattgaggaaagtttcttaggtttgggagaggaaaattatgaagattaaattggagtccttggctaagtgcactatgagaacacagtgagaagagtcggttctgtttctgtagagaactgtaccccgccttggaaggacagctgaaagagttccggaagcaccttgtggagagcaccaacgagatggcccccctgaaagtctggcagctgcaaggtaatgggcactcagctcacctgagttgtggtgctgcgttctgtggtgttaaaagactgcagacctcgggctggggatgtagctcagttgttagagtgcttgccaagctgcacagagccctagatttgcctctcagcaccacactaaccgggatttgtactggatgcctgtaatcccagcactgtggctaagacaggatgagtgtcatgcgttccagaccaacttgtgctatagaatgaaaccttgtcttggggcaggggcagggggattggggagtgcagagcttgaataaaatctactagattctaaaagtaccatagatcatgacatgcacacccctacacacacacacacacacacacacacacacacacacacacttttaaaattgaaatatatttatcctctccccttataccttctcaaattcatggtctcttttctttttaattattattcatatatataatatatataatacatacattcatacacacatatatatgtgtatatatatatatgtacgtatatatatgtatgtgtgtatatgtgtgtgtgtgtgtgtgtgtgtgtgtgcatgaatagataatgtgctgaattgtgtagcgttgcttgtgtatgtataccttcagggctgactacctagtattggataaccaactaggggctcaccccctggtaagcccaaatctttactttttaacatgcttgttgttggtgtataaaatctattgatttttctaaattgatttcgtatcctgccattttgctgaaattgttgaccaacttttgaagttttctggttgactttgggatttcttttttttttttttatagattttaaatgtttttttttaaagatttatttatttatttatttatttatttattatatgtaagtacattgtagctgtcttcagacactccagaagagggcatcagatcttgttacggatggttgtgagccaccatgtggttgctgggatttgaactctggaccttcagaagagcagtcgggtgctctaacccactgagccatctcaccagcccgggatttcttatgcatcatatcatatcatgtcatctgcaaatagtttggcctcttttcttatcttgtccccttaatttcttacccttaccttattgctccagctaatgttgtgagtcctttattgaaaaggtgtggggataaaggacagccatgctcctttcctaattttaatgtgatttaagtttttcttcatttaggataatgtgggtttgtcatatatagtcttcattgtggtgaggcatggtccctctagggttactgcctctagacttttatcatgaagccatgttggagttttttcctaaatatattgagatgatcatatgatttttttttttatttgttttgagacaaggtcttatcatgtcctggctagcttggaactcactatatagaccaggctgacctcgaactcagaaatctgcctgcctctctttctgagtgctgggattaaaggcgtgtgccaccatgcgtgcctggctagcaatggttatatgattatctgtctatttatgatttattacattacctacttatttatgttgaactatccctgtaacatggggataaagttaactttgtcatggtgggtattttttgctatctgccttcatgggattcaagtattttagtaaggacttatgaatctatttccatcatggatattgccctggagtgttcttttcttgttgtgttttcattttgatattgaagtactggcttagtagaagtttggacatactccttctgtttctattattttaaaataaacttaagaaatattggctctagatcttctttgaaagtctgatagaattcagtgtgattccatctgggtcagaactcttccattggaaggctttaattgctgtttgaaatcttctcacttgttacaggtgttgatgtttttttttttttttttttttttttggtttaactttggtgttttgcatggatctagaaatttgtccatttcttttatatttttcagcttagaggaattcaggtttttaaagaatttccttatgtggctctgaatttcttgttgtaatgtttcactgttcatttctgattctgttcattttggctatctcattctttcttttggttaggtgggccaagggtttgtcagccttgtttagtttctcaaagaaccagctcttaagattcgctggttctttgtattgttttcttcatttctattttattacattctgctctgaattttaacatttttttgccatcttctggacatgggttttgctttgttcttgtttttcttgagttataccattaagccatttatccataccctttctaatgttttttaaagatttatttgtttattttatgtattgagtacactgtagctgtacagatggttgtgagccttcatgtgtgtggttgctgggaattgaatttaggacctctgctcactccggtcaatcctgcttgctcggttcctgcttgctccagcccaaagatttatttattattataaataagtacactattgccatcttcagacacaccagaagacggtgtcagatctcattacgggtggttgggatttgaactcaggaccttcagaggagcagtcagtgctcttacccgctgagccatctcgccagctcgtctttctaattttttgatgtaagcacctagaactctaagtctgattgatgttagtgtgccgcaggggtttgttgtactgtattttcatttttatttagttccaggaacttcttgagttcttcttcgattcattcatctttcggtaatgtgtctttgaatctccatgagtttgtgtactcactagagatttgtcggctgttcattttaactttcattgcgttgtggtcagataggatacgtggtggtgtttctgtttttctgagtttgttaagatttgctttgtgtcctaggatgtggtctgtttttgcaaagctcccatgggctcataatagaacgtgtattatattctctggtgtttatggaatagtttataatctgttaagatcacttgatgcatgacactgtgtaattctcttgctcctctgctaagtcttgtcattttgagagactattattactatcattaggttggtgctactctttgtctaagatttgtttatgaaattgggggtgccagaatgtcgtgtgtgtatgcttagttacaatgtcctctcggctcagtgtccctcgagtaggggaatcccctcctgctttgggttagtgtagtctggagtctcggagagccgtggctgcttgcttctcggcccttctgtctgcagtgcctctcctcatcctctcttgctgagatggtgcctgtgttcaaagctgataaagctgaggtgaccttagacacagcacagacatggattttgctttttcatccagtcagccggtctgcgtcttttgatttcatccattcagcccgtctgcgtcttttgattgggcaattgaggccattaatatttaaggttactattgaaaggtgtgtgttgattgcaatctttttttcctctgaaagttttgttctcagttgtgctttttgtttcattgattatagcatcatttgttctttctacagacttgcagatatatcattattcatcctttcagtctgacattactgcttgtagtagatattatcttgagggttgattttgtaaataggaattcttttaatccttttatgtcacagacagttttgctctctccttcaaccatggcagatacttttgctggacacagtcgtctagcttggcatccagggcctcttagaacttagtgggcgtcattccagggtcttctggctttcaaagcttctactgagaagacagctgttactctttctgtgggtttccctttatttgtcttgcatttttttctcttgtagctttcatactatgggagtgttttctggtcttgtctttggtgttctatgtacttcttatatccgtgtctatttctctccttagtttagggaagttttcttctatgatcttattgaagatcatctggtctatgccattgatctgggattcttctctgtcatctatgcctatgatttgaagattctagtacctcagattttaaagacagaatggctaagggaagaaatgaaatcctctgtaaacatagtactaggtaggctgcagtgatacacacacccctttttgggatcagatacataactttacaatacaagaaatatgtagctgtttttatgttcctctttgcatacgttttaaaaacccaagtgacagtttttaattttaggtttatatatttttttaaaaatagtgctgagggttagatctaggctctcacattgggcatacacactaccactgatctataaccatggtcttgcatgcattttacaatttattatcattgtgtttatgtaggctggtgtgctataatgcccatgtagtggttagaggacagctttgtagagtttggtttgtccatctttgttttggttccaagaaattgaactcagtcaatgaggcttgcattatatgtagcaagcacctgtactcactgagccttctagctggtctcctgtacgcatttgcacacgtcttcattgtgcatctatagaatgttaaaggcacggaagggcagaatatatgtgcacttttcttttctaaaggatattccaaaattttctcaagctatttcccctgaggtcattgggtaaataatcttaatgctctattttataatacattgtaaatctagacaacaacaggatttgggctcaagttcatctgctaggtgttagttaccacacagcctaggactttatggatggagtcatggacaacgtagtaaaagctccagggtccacctgaacgaggtctgagctaagcctgggacaccgtcgggaatagttccattctatggcgtcttcaccctcaatggattgtgggtagtgttggggacattgtctaccatcattaccatggattcctgtgctctaatgtcacatgtgccgttgtgcagatctcagcttccagactgctgcccgaatcttggctgcttctggggcattatctctggtggtgatgaaggacattagtcagaactttcctaccaaggccaggtatgtgctaaggttttggtacatccctctccttcacattgttccctgttgttttcatgtttgcacagaacatgatgtgactaaaatgtaaaaatgcttggatgtgaaacctatttgtaagtactgttgcgatcagtgtcttctttctaacacgtgacagctgttggctgtgtggttgaagagagagggatttagatgctcttggcactgccccacttaggccacatcagctaatccacagtctggtccatactgccatttttgaatccttatgaagaggggctttgcctagggctcagtgacagaacacttgcctcatgtgcacggggctccgggcttaatcctcagttcttctgaaaggaggaggaagagagaagagggattcagggtcctgacttagaaacagactcagggagactgacttgttcatagtaacagaatgaatttcctgacattgctgtctattctgtagtgttaatctctgactatgaatgtgaggcaaaattgtctaaaagccaaattcttagaaacttttccagatgttgtcttaaataactaaggttaaattcttggctaagagtttcctaagtaagcccctttttcaccgtggagtgcctatggaagatttcttaagccattacgcttaaagccattatgcttaaagccattacgcttctggaagacacacagggttcagcctccacgagaggatttaataggactagcagtcagccggagtacgtttctgctggctagttatctgagcagcaaatgtcacatcaggagtagggccacacagtcaagaaatcggaagccaccagacttgtcacgtcctgccaccatgcggcatctgcagggtgaacacgtttgccagttctgcagctgtgaggtttacttagttcttatttttataatttattgagtcatatggttcatgtctaaaaacaggaaaactgaagacctttatatggaatgctaagctaaacactgatcacacttttatccttttttagagcaataacgaaaacggctgtgagcgcgcagcttagagcggaagtggaagagaaccagaaggtattgctgactgttagaaagtactccactgttgtagaagacactcctgggctgtagctttaaaaaatggagagacttgaattaagttcgtagcatttagtagtattcctcttagtaatactattatcatacagtactttttatcagatttgtagcattttgtttaggagaggctcctgactggaggttgggggtgcggtcaacagggagtgtgggcctcctaagtctttaagcctttcgttcctgcctttggtgcattccacgtggaagctgggctcttgtcctcctttcctgtcagccccacatgtagttcctggaggctgccaggatgctcactgctccctcctatccctttgttccagaatccatccattggcctagagctgtgggtgtgttcagcttatccatctatctacctgtctgtctgtccatccatccgtcctccatccatccatccatccatccatccatccatccatccatccatccatccatccattcacttacggtttttcaagacagggcttctgtgttcctgatggtcttagaactctgtagatcaggttggccctgagattgacctccctctgcctcccaagtgctgagattaaaggcgtgcgccaccacacctggcctcaattagccgcttttacccctagatttcattatgggtaggacgttagttaattaagtagatttgagaaagaaagaaaccaaatacttcacacatatttactaaattaaaaacatcaccatgggtggtggtaactacacctgcaacctccaagtgtgagagtagaggtaggagaactggaacttcttggtccatccattcgtggctatgtagtgagtttgaagccagcttggggcacatcagtctctgtttcaaaaaaacaaaaaacaaataaaaacactcaatttagtaattgcatgtacatttattttccagaatagcagtgttaactatacctttgaatttacgatcccctgtttactgcactaagggtggtggggtctgagagaataaagcctgaaaatgaagtggactaaagtctcatgctaagccagccttactcagagtgtcagacagtttgtactctcagggttaagaagagtcacagagtaaagtatccagtcctaagggcaaaccacatgcggcaaagccatgtttttctagagaggtgagtaaacaaataacaatagccagctgtattgagcagcctgacgtgactcacccctatccaccacacctcagaggagcacagaaacaaggacaattctgtattttcgaaggaacggaggtcacaagactcttgttttgttttcttagagttttctcacaagcacttggaatttccctcacatgactccattcattcttggtccatgttctgacagttccacatgccagggaggcagaatattaacttatgtgagctatattggtatttcttggatttttaatgtttttgagtaaagcatgttatttaaaaatgcttaaatacatgcacacaaaattcttaaagatgaaacacaagtgtgcatgaaatcttaaatccagtgtgatgagttttctcactgtgaaatctcctctgtgtttcagatcttgatctacattgggttgtatgtacaagctcagaattagtctttcttaccatctcagaggcccaagcgagcagatttgaaactgtcctgtggagaaaattccaattcttttctattttattttaagtgtgtctgtgtgcgtgcgtgtgtgcgtgcacatataagtatatcatggctcactattgaggtcagaggacactttgaggagacattcttgtcttttcccttgctgaggcaggctctacttgtttctgacgctgtactgtatgctccaggctggttgtgctgtaggctgggttaacagatgtatgtacactgccacgtctggtgtctcacatgcactctgggaaatgacttgagctggcttgaaggctagtgcttctgcctgcctgcccttccctggtttggaattccagtccttagctgcttcagctttccatcatttctgtggttttgttgtttttgtttttaagcaaattttgttgtagttcatatttaaaaccttttatgtttttttttgaggttataatataattacatctttctttctcttccttccccctccccctctttattctttcagatatatagcctcttttgtcattgctgtatatgtagatgtgtgttttctatatttttgtgttctcatattgttttctgattgatgctgccgtgtctgtgaagcatgagacacaacagcttctcactgtttggttttcccatgcagtgctagaattcagaagtataccttttcctagtcctctgagtactggaaagtgaaggtgttctcagagttcatccaaaattctgttgttggaatctggtaactccttttgcacggcactctactgtctagcaatattgtatcactgtactgtctcgtgtactgtacctctgtcctgtctagagaactgtatcactgaactgtctagagaactgaatcactgcactgtctagagtactgcaccactgcactgtctagagtactgcaccgctgcactgtctagagtactgcaccactgcactgtctagagtactgcaccactgcactgtctaaagtactgcaccactgtctagagtacttcttccagtcctcgactttattaaggggcccttgtgttgcttgccagctcagctttgattggcatcacaatcaggaaaagcaacagaaacataaaaaagcaaagcttatgcactgtagtctagcatttgcagacagaggtagggggaattccagagcccatgtgacttgatagaagtgagaatcttcctgagacactgactgtagatagcgtctgccttcagtattaaggagataattgtaaagggctttctaaggcagtgaacaaacatgtacattccattggtgtcccgcataaggcagaactgtaagctttagttctttgtagtccagagaattattggaaaaggaactcaaaagaataaatatcttacttattgtgggccaagaagaaacatgttattttaaaaattaaatagagataatatttgttcagttcgtcctacttatattatgttgtgtgtgagggatgcatgtatgtatgtatgtgtttgagtgtttgtggaacacatttttgtgggtacgtatgtatttgggtggatgtgtacagagcctgggggttgatgttgggtgtctttctgatttgtgccctactttatttactaaggcagggtctctgactgaacctaggactcacacattcagcttatctagctagccagcttgtttttggggtcccatctctcccacagtgctgaggttacagatggatctccatgcctgcctacctggccttcccgtgggtagctctggggatttgaaccccaggcctccctcttgcatgggaagcactttctttatccactgagccacttcctggcccctctggtttctttcctgatacgtgacccttggtgttcctgctccgcgtgcccaatgttatagaaatcatcttgtcattatcagaatggagggaggaggggaggatgaaagatgaagacccagtaaggcagtgtctttgctcattgcagtaggtgctcaggaggggaggatgtgtggagaatatagaagccagtcttttgtttgttttgttttgtttttgtttttgttttttgaggcagggtttctctgtataaccctggttgtcctggaactcactttgtagaccaggctggcctggaactcagaaatccgcctgcctctgcctcccaagtgctgggattaaaggcgtgcaccaccatgcccggctagaagacagtcttaacctagcctaggaatgtcaagatttatgtgggcagtaaagcccaggaagagcaagctttgctaagtgtgctctccctgcctttgtgtgtgctttcagtatttcaagggaactataggattacagcctggagactcagcgctcttcatcaatggacttcatatcgatttagacacccaggatatattcaggtttggaaaatatttctattctctccctgccccctccctccctccttcctcctttttctctcctcccccctccctccctcttctctcccctcccttccttaggttttataactgacgtgctcaggttcatgtttctgctcagcgtggcatgagggaaggctcatagctcatgatgctcgctggagctgggctcatgctctgatggggtgtgcagcatgaatcttcctgtcttgtggatcagggcatgtgcaaggcttgagtgtttttaaggatatatctttggagttgtagttatctgatgtgaacctctattcttcacccacatatgcatgcatttgcaaacatgtaaactacatatgtacacatacatgtactgcatacaatatgaagtataaataaacaaaggcctgtgaaatatttcagcagttgacatcacatgacatctggcatgcaagcctgacagcctgagttcagttcctggaacccacatataggtggaaggggagaactgcatccacgcacatgcagacgcactcttttttttaaagatttatttatttattctatgtatatgagtacactgtaactgaacagatcgttgtgagccttcatgtggttgttgggaattgaatttcaggatctctgctctctctgatcaaccctgcttgctaagtccctgctcatttcatcccaaagattttatttattattatacataagtacactgtagctgttttcagacatgccagaagagcatcagatctcattatgggtgattgtgagccaccatgtgattgctgggatttgaactcaggacctttgtaagagcagtcagtgctcttacccactgagccatctcaccagtcccgcagacatactcttacacatcctacacaaagtacatgcaatatttagtaaataagtatatttactaaaacacaaaacgtggtgtagggctaggagatggcttagtcagagaaatgcttaggcctgcgatcctacttaataaagtctaggctttgtggtatacatctgtaattctgctgctggggcagtgagacggggatccatggggcattctgaccagctagtattgatggatcagtaaactccagggtcagtgagagactctgcctcagaaaataaggtggagagcaatgaagatcctgtcactgaccgctggcctccatgctcacacacaggggtacatgtgaacacgtgcatgggcacacactcctccactcacataccatgcagtataaactgagggctatttcattactcatacagaggtaatctaagtttatactgagagatgctctgcatgtccactgaggatttaaatgagcaggaccaggaaagcacatgaagccactgacctgcagcctctggccagatgaaacgagggaagaagaactccgtgtgtgtgtgtgtgtgtgtgtgtgtgtgtgtgtgtgtgtgtgtgtgtgtgtgttgactgttgtgaattgaatccatggcttcatatgctaggcaaatgctctactcttgacaagaaaccttgcttttcctgcagtctatttgatacattgaggaatgaagcccgtgtaatggagggtctgcacaggctgggaatagaaggcctttctctacataatattttgaagctgaacatccagccctctgagactgactacgcagtagacatcaggagtcctgctatttccgtgagtattcattctgagtggtcatgaggcattctggtcagtcactttacagctttttaatttgtgttttatcaaagatttacaagtgcttattatgtgagactgtatctctgcaataagatgggcatgcgctttcctgactgtctgtctgtatgtctgtctgtctgtctttctctgggtttaaaggcatgcactaccactctgggcagaagataggttttcacatgccctcagaagttgtcttccaaccattgtgaggaagaagcattctttccagggctggagagacgctcagtagttaaaccatacactgctctagcagagaccctgagttcagctcccagcatctgcatctggggttttacagtcacctgtgacttcaggtctgggatgatcagataactaaccccaggctggccctcatgtgcacatacccacacgaaaagtcaaataattaaaaaaccatgaaaataaatcttaaaaaaaaagaagaaaagcattctctgtcttgtgtattcataggatttacatgaatatcttgggaagagtatgtactttcccaattgtgactcagttttctgtgactctgtgacaacatgcatactttaaacctattagtacagcatatatttccagttagtagccttatttaaaaggaccttattatctgctgtgtgatctcgatgtcatcggtaaaaagaacgtggggatagtggtgccttgtctccctccttggcttctgtttgcatttattctggaggcattttattaaaagaaaggtgctatgctgtgcatcagacatgcccatcctacagcctttcagccgcatgtatcccaggacagccaccgctgcagcccagtgtatgcgtagatgttagcacttgggctgcatatgggtaaggtccttgtctgcattctgtcttggtgatagaaccattgcgtagtctgatgcacacataccgtttgatttgtgactaaaaggttttgcttataaaggataaggaaaataacatactatggagatcagtgaccacatgactgatcgccattcttatggaccactctctgtgtaatcattgctgtttctgttgaagctctctctctctgtgctccttcctagttacctcctccccttcaggcagcctcctccagaggctggggtgtgttcctctgtctctaattgtatatctttatttctttttaagggtttttaaagtatttttgacagtctggtgcttctgtgggtgtctcattccataaccccaattttatttttgtaaccacgcgtagggtctgttctccacactctctttatagatgccaagggcccagcatgtagcaagtaatacttaaaagtcttcttaaatcaggcaattaagaacattttaatggtggttttcaattattcatattgctgggtgtggaagcccacacctttaatcacagcactcaagaggcagaggcaagtagatctctgtgagtttgaagccatcctgacctgcatagtgagttccaggcaaagctacatagtgagaccctgtcttaaaaaataaagtaagcaatcaaattcgcatgggtaggtaatgtttttacttgacaagccttctctgtaaggactgagtgaggatggcatcatcagcactggagcattcggtggtctgcgaggtcttcagctgtgttaggttaactagacactgacattgtaggagcattcctgctccttgggtttttaacattttacttattttttaaaaaaaaagcatcattcagggggctgaagagatggcttagtgattaagagcactgactgctcttccagaggtcttgagttcaattcccagcaaccacgtggtggctcacaaccatctgtagtgggatccgatgccctcttctggtgtgtctgaagacagctacagtgtactcacatagataaagtcaataaatctttttcaaaaacaaaaaacatcactcatacttttacagatgaaaattgaagttatacagtggtgttttaggtatgatttctattctgagatgaaacaccatgactaaaagcaagctagggagaaaagggtttatttggcttatgtttccataacattgtcactgaaggaagtcaggacaggaactcaaacaggacaggaacctggaggcaggagctgatgcagaggccatggaggcatgctgcttactggcttgctctccctggcttgctcagcctctcttatagaacccaggaccaccagcccaaggatggccacacctacaatgggatgaacccttccccactggtcactaattaagaaaatgcctacagctggatctagtggaggcattttctcaattgaggttccttcctttcagataactctagcttgtatcaagttgacctaaaactagccagcacaggaggcatatggtaatagtctcctcaccagccatctttcctctcagagtggtgagcaggattgctgtgtgtccttccagagccctctgctcacataagcaggagcatgtcttgattttccctgctctccctcatccacacgacaggtgcttattgtctctgtgccttcttttctgccttcctgctgttggagattcttccatgttgggtctctgtgacctgtcttcctgcacacatgtgagaggtcggttgggatggatgcctggatgtggagtacttagtggttctagttagggcttaatgagtattgcagacaccactgtggctggagggctcctgtgtgctctgtatttttgcccagtcttaggcattgacgaactgttaactttttccatttccaatttaatgaatgtgtagtttccttgtgtatctgtttacatttcacaaatgtagttgtgaaatgtgtagttgtatgtcttgtgtttcctggctgcttatgattcctatatagacttactatgcttattcctgtctaatttcctgtggatttccttatttttttaagttgtatttgttgctaatggtctttagttgcttgtgttgattgcagctaagctcccctagttcttgaccgtgctatagttactcatttttctattccacctttgtgtatttgagaacagtctcgccttgtgtgcgtgtgtgttttctggacacaaggtcttgtatagctagtgttggcatcagtctcagtgtggtcatgacagatggttggatacccgattctcctgtctctgcctcccaagtgtggcattaaaggcctgtgccaccatgcccatgactgtgtgattcttagtctcattagttaccgtttttcatcagtgactaatgtgtatgtattatgttgtgtgttttgtttttgttttttatcattcaagtgggtcaacaacctagaggtcgatagccgatataactcatggccttcaagcttacaggagttactccgccccacgtttcctggcgtcatacggcagatcagaaagaacctgcataacatggtaagtagggcgcttgctgctgtcctgtagcactgaccggtagttggcttccagtagccgccattctgtgactgtcgctccccacagccctctctcttccatcacaagtagcatgttgacatttctccctatctgtgcacagagttcaagcacaaagggctttggaatgtgttcatgtttcagcaccgtgacagcgaagctcccaggcgaggattacagatatgcagcaccaagcctggtttatgtagtgctggagattgaatccagagcgtcttgtgtacttggtgaacatttcaccagatgagtcacagcccagtcctgagcgacttcattatgtgagagaacgtatacaagctgggtagcatatagtgatgatttaatacgtgatcactattgctccgacttaagagatgagttctaaattgactgttaattcagggagccttaggaacaaacacaactaaaaggcaggctccgtgtcccacggtgggagacctgatgacacagacatttgttggttattgtagaacaggcatcagcagttgggaacaccagtgaaatccatgagaggaaacatcacatctcttcccaccaccacggtctttgcatgttgtgggtggcagctgctgtttttatttataacccccttatttgtggttcagtggtattttgagaaagattagcttcatgtgtgacgattcctgtcatttttcttggcccaggaatacttgaatgtcatttcatgggttctttttccttttcctctgacaggttttcattatcgatcctgtacacgagaccacagccgagttgattagcatcgccgagatgttcctcagcaatcacataccgctaaggtaacactgcactcattagccaagcgttgccttgttgcttggattacatgtctggttccattgaattgtataattaatagtcagactcactaatgcagttttatcgtcttcgtggtaagacgcctatgccttttgggactgagaatttaattccaaacacatagaagcttaccgccattgaattattaacagctggctgtgtgaaaatagttcatggtcttcacttgcttcctattggaagggggcatttctagatacgtgcccacatagccaggccagctctaatttcagcaggtagtgctttgctaggggcttttgttaggttttcaagaactaaatgctttagaatgttaagtagccttctgtagatacagacagatacatctacgttagttgtattggcaggtctactcactgggcaccaggtagctaggtttccctgttcatttcatagacaataatatatgataatatatataaatatatataatatataaaacaatagtacatatacagggctctggaaggcctatacaaactaggctggccttgaactcagagatccacttgcctctgcctcccaagagctgggctcaaatgggtgtgcctctataccagctaagacgtgagtttgtaaaaatgaaggggttggagagatggctcagtggttaatagcacctgctactcttccagaggatctgagttcaagtcccagcactcatgtcaggtgtctctcttctgcctgaactccagcaggaggccgggtagaaatccccactccctggtctggcatccaccaccacatatacatgacataggctcataagacacatgcatatgactggataaataaaaaataagggtctgttttaaaaagtgaagaaactaaaggacaaaagagctcctagtaagcaaacattgctcagtgttcactgctcagccctcactgagttgtgctcggcttgtatgaacgctctgtcctctttgttgtctcttggaacagcttttgcaaaactttaatggctgtaagaatgtgtttgaccgagtgctttaggaaactgggagctctgtggggaggacccaggtttcccaggggctttgaagaaaaggattatcaagatcagaaaaagcagagctgattgagtgctgtgaaatcttcatttaaacacagcatgccatctgtatttaaacacatcttttaacacaactttccccatctgctgtgtttaaagggaatctgagaacatgtgagctggttcacagtacacagtggacactaactaaacttttgtgttgtactgagggccaggaagattgcagacgtagggaaagaaggcacctgagctgcgcattgaaggggagcctagaagataggctggcatttcactcttggtgagggcgatctgaccctgccccgtggaaagcaggaaggaagctaaggcagagactgtaggaatgcttcttactcgtgtgctttttgtggcttgctcagcttgcttttttatattagctagcccatttgcctagtgataaaccacccacagtgggatgggcctttctgaatcaatcaacaatcaagaaaagtcatacaagtctgtctacagtccagcctggcaggcagttcctcacttgaggctccctctttcttgtatcacatcaacaaccaagattagccatgtcttacacataggtatactcttatgcccctctacccctgtgtgtgtgtgtgtgtgtgtgtgtgtgtgtgttatataatcacacaatgaaatattacccaatgattaaaagaaattaggagactgggtttggttacacatgttttttctttcagtatttgggaggtagaagcaggtggaactcttgagtttgaagccagctggtctacagagtgagttccaggacagccagggtattcagttagacactggctcaaaatcaacaacaatgaaaaccaaagccccactagctgtgtctgctgacaccggattagattcccagcactcggaaggcacaggaagcagaatcctgagtttgagaccagcctggactttacaatgtggtcagtgtaggttacccatattctgtctcaaagaaacctgataaataaataaaaactaagtcatgttaattagggctggcaagatggctcagcgggtaagagcactgactgctcttctgaagatcctgagttcaaatcccagcaaccacatggtggctcacaaccatctgtagagctacagtgtactcatatacataaaatagataagtaaatctttaaaaaaaggtcatgttgattaaatagctagggctcagtggtagagcatttgatttacatgagtgagactctaggcttaccaaatctatgttgattgatacagtgtcattaagtaagctatcatagattgtggttcattgttgctgtggctcatgttacagtgcagtatcaactatttacattatagtgtccaccaaataaaactctcctctgcctcctgtttgcccttcccgccattaacttgaaccttcggacactactgactgttaactatgattataggtttttatccttttcaggatgtcatataattgcagctgtatactatgtagcactttaggaggacttgtttcagttagcaatgtgatacctaggttattaagttgtgagagttgacacataataagtccatctatccctgcatccatccatgtaatctaggctggtttagaactcctgactctcctgcctcagcttcctagatatagagattatagttgtgtgccactactgcagcctcctaatttcttttcatcaataggtaatatttcactatgtgattatactgcagattgtttacccttcacctatgaaggacattgttttagtctacttcctgttgctgtgattaaacagcatggcagaagcaacttgggcagaaaggagttgatttcatgtcacagttcccagtccatcatgaaactgaagtcagggcaggaactccaggcaggtacctggaggcggggactgagaaaagccatggaggaattttttctggcttgctcctggagtcttgctcagcttgctttcttatacacccaggatgacccaccaaggggtggtgctgcctaggctgggcccttcatatcagtcaaaaatcaaggctgtgctcacaggacagtctgatggagctacttcttcaactgagattctcttcccaggtctaactagatttctggcaaggtgacaaaaacttactggcctacctgatgtttagcttaacacacaaatatgtcactattaagtcaaaaccttcccttttttgtccccaagatctcatgttaatattaatattacagcacagtctaacttttaaaaattccagtctttgaaaattctgttatttaaaaattcagtcttggtattttctatgccgtgtgtgtgtgtgtgtgtgtgtgtgtgtgtgtgtgtgtgtgtgcgtgcgtgcatgcttatcctgaagcttatacatgtccagtacagatgtttgtgtgggcaaagttctgttgacaagatttgtagattgtgtgatgagtatatgcttggtttgtaaggagtagccacagtgactcacagggtgttgaaccattttgcttcttcactgacagtgacttggggacccctgttccttgtcagcagcacttggtttcttctgccatcctgtagatgtgcagccacaggtcatgtgcaactcatgattctaaaatggcatagggtcttagcattttattttgtgagtgtctatccagaaattgtctatatggaccttttgaaacaggaccttgctgtgtagcccaggctacctaaaactcaatatgtagcctggggtagcctcaaacacactgtcctgcctcagtactcccaagtgctgggagtataagtgtgtgctacccttcccagcgtcttcagcccgtttaaaacccttgttgttagatggatactgagttttaagagtcattgttatatctctcagatgggtgtttttcactagcctgccattttccctttccttcattggtagtctcctctcccccctccctcaaagcaggtatttcttgggttttttcaagatagggtatctctatatagctctgcttgtcttggaactatgtgtagatcaggctggccaagaactcacagagatccacctgcctctgctcagtgaacatcttcatactaacctgtctgtgtgatataagacaattgtttttcattttgctttccatttattattgttattattatttgtttatgtatttatttttggtttttcaaagtaggatttgccttagtttggttttattgctatgaagagacaccatgaccaaggcaagtcttataataaaggacaatatttaattggggctggcttacagtttcagaggttcagtttattatcatggtgggaagcatggcagtaggcagacatggggctggaggagtgagagttctacatgttgatttaaaagcagccaggagacttactttcttcattgggcagagcagagtatatatgaaaccctaaagccccgcctccacagtgacacacttccttcaacaaggccacatctccaataaggccatacctcttaatagtgctattccctatgtccaagcattcaaatatataagtctgtgggggccaaatctattcaaactattacagggtttctctgtgtaatagctttggctgtcctggaactcactttgtagatcaggcttactttgaactcacaaaaacccacctgcttctgtctcctgaatgctggggttaaaggtgtgcagcaccattcctggctgccttttgtattgctttagttatagttcacttttcttcagttgctaggttttgttttgttttgtttttcgagacagggtttctctgtatagccctgactgtcctggaactcactttgtagatcaggctggcctcgaactcagaaatccgtctgcctctgcctcccgagtcctgggattaaagaaactcccgtgcctgccaccatgcccggcagtttctaggtttttaaaatgaatttatttattctcagtgtgattgtgcctgcttgtctttatgtgcaccacctatgcacaatatgtacaaaggctggagttggacatcacatgccctaaaactggagttagaggtgctgctgagccatcgttgtggatgctgggaatagatcccaggtgctctgcaagagcaggcagcactcctaataattagttgagatctttctccagccctccaatttaaaagcagagcagaattactacctacaatagtggtattctttgtgttagtaaagaaatctattcaggattctgaaacagacataaactgtggaaaagcctaacctgtcctgtgacctgactcttgtgttctgtaaacaaagcatgtgtactgttgctggtcctgcttagagtgggaagtgagctgtgcttcttggttggggatggacactggggctctgcccacctcaagcgggttgccttataagatgcccctttttctgctcccctctgcaggattggttttatctttgtggtcaatgactctgaagatgttgatgggatgcaagatgctggagtcgctgttctgagagcgtataattatgtggctcaggaagtggatggctatcacgccttccagactctcacacaggtatgtttttaccccaaatggcaaatgcttagtttaactgactctggtttgtggtaggagaagaagtagattctcatatatactctggtgctttatacttcagggttccttatgctttattgtgtcactggtgagaatgtatagattgctatggttttctttttcttttgtatgcttggaatttattattatgtggggcttggcggagtcaggggtgtggaggctgcagtactggtgggaggttgagtacaaccttcagaatgggtcctcgccttctgtcacaggatctagggatcaagcttgctgagccttaatgctggccgttagatgctgttctttaggggccttctgggatattatagaatgccctctgcttatatgaaatcaccacttaatgcctttgggcaatgtgatgttctctccttgtttttaaaactacccagtcttttctcttttgagactatcttatgctttcttttctcccttccccctcttcttcttctcttttttttttaataaagatttatttatttattttatgtatgtgagtatactgtagctgtatttagacacaccagaagagggcattggatctcattacaggtggttgtgagccaccatgtggttgttgggaattgaactcaggacctctggaagagcaattggtgctcttaactactgagccatctctctagcccccaccttccccctcttcttttcttcctctctctcttttgaagacagtcagtcttctatagccagggctaaccttgagctcttgactctcctgtcttctctccagggctggcctgtcaggtgtgcagcaccacacctgcttgcttggttttttgttttttccttttgagataataaggtctttctgtatctgtgccggctgtctcagacatgttctagtacacctggcttctattcttaaacattgttagcccctgcacttagggtccaaagtgtttatgaactgatgggaccatttcaagaaatctttagttcctgcaatcaggtggagtggcatctctgagttcaaggtcagtttcatctatatagcatgttccaggcgagccagggcttcatggtgagacactgtcatgaaaaaggaaggaaggagggaagggagagaggaaggaaggaaggtaggtaggttggtcggtcttcagtttctaattataggcatcttgtgagagatattgaaatggtaatgttgctaagaagtttccatttgacttttaagaaaagtggtcttatttttctaatgtgtttagagatttcatcacattttaaatgtggatttgaaggtgtggttggttccctgcttttctttccttagatctataacaaggtgaggactggagagacagtgaaagtggagcacgtggtcagtgtcttggagaagaagtacccgtacgtggaagtgaatagcattctgggaattgattctgcttacgatcagaatcggaaggtaacatgttctttggaacttcttatagccgtggtattgttaacttgactgcagcctcagactctccttcttgggctatgtggtgtctatactggggtgttgatgcgacagaccactttttaatcttggagacaggatgtcactgtgcagcccttggctggccttgagctggcagagatgagctgcctctaccttgtgtatgctgggattaaaggcaagctgctaccacacctggcctcacttgtcagtctttggaaagtgagtctatttcagaaaatagtacttaacaacttgtatgttaactttaaatcagaaaacaattactttttcataaattataattgtgcttgtataatgtgtgttctggataaaacctattggaagtatagagccaggaggtggtacagggaatcatatgtattgtagtaattttacatcattgctcagcctccagatgggtatgttctaagaaatgtaataactagccggatgtggtgaacgccttcaatcccagcacttggaggccaaggcagaagagaagccttcaactttttgtgaggtgacagaaacccaagtactttgtgaccagttagtacatatttacatacctataatgaaaaagacatttatttttacatcgtgagaggcgttagaaaacactttgctgtattttggctttagaaaacagtaattataactacaaaaggtcttggaggttggcaagcactacaagactcagttccctttagcagcctgcctggtgtgggaagagtctctctgcacaccgctggtcactgatgcctaagaggcccatttcattcagcccttggagtttattttcttttttaactgctactgtgttacagttctctggggacccctttgccttcttgacttgactccgctggctgtcagtaagctctctattgtaaagaggaatgtactttcaacaattgcaaatatattttagaagcctggagggaccttcctcacatatagataaacatgtacacactccatagtctgtaaagtttttgcttcttagaatttagtcatttaattccacacttatcaagtaaggtattaactatgataccactttcttaagaattaacgtacaaagtagaaggcttccctaccacttaaaaaaataagaaatagctttagtcatttctttttgttatgtttctgttttttgttggtggtggctttttaaaataatatttatttgttgtgtgtatattggtgagtacatgtgttccgtgtgtgtgccggggtccctgcgctaacagaggggtctgacgcacaggagctgcagttctaggtagtgagccaccgtgtgagccaccgtgtgagcgtgtgctggggacagaagaggggctctgcaggaccagcgagtgcgcctaatgactgagttgtctctctagcccttcttttgttcttttttaaagttcatttttctttcttagtattgtgcgcatatggacgttagatgacaactttgtagtgtctgttacatgagttctggagatcaaattcaatctgtgggcttacaccaaaagtgtctttacctactaagttatcttaatcaccctgctaattttattttttttaaatctaagatggcatgtaagaatatatgtttttgttctatgtgtgtcatgagggggaaatgtgtgctctctctttttcttgtcctttgttttctaggaagcaagaggctactatgagcagactggagtaggccccctgcctgttgtcctgttcaatggaatgccctttgaaaaggagcagttagacccggatgagctggaaaccatcacaatgcacaagatcttggagacaaccaccttcttccaaagagctgtgtacttggtgagtgatattctcacatgagctttgaaagccagtggcttatgctagcttatgtagcaggcagtaaaattctgtatgatgacaagggtttatttcattcatgtctttacttgccgtgctgggaatggaactcagggcctcatgcacactagtttagttaagtctaccactgataccccccatgctctaggttaacttcttgagatgtgtgagctgatgattctgacaacatacatagtcatcaccatcacctctgattacatatgacatcaccagtgccagaaggagccacagcacattttgtccctctctttgccactggcatttgacttgctacatctgtgggctttctcttccgaccgtttctgtagatggaagtgcaggggtctgactgctcctagattgctacgatgctccttcacattccagtcctccatctcaaacccgagttactgtgttagcgtaaactaagactggctgtgcattcccttatgtttggtgtgatctgagaggccactgagtagcaaggatgcttctgtcactgcctgagagttacatcccaggttctagggactaaaatcacccagattatttgctatctactatcctctttcttagggagggctggacggacacacacacacacacacacacacacacacacacacgattgaatgagagagagaaaaagaccctcataggatgcatttcttagttaaataatcttactagggcatggttatactacttttaattctatcacttaggaggcaagagtcatatgcaggccgatgagtttgggaatagcctggtccacatagtgactttcaggctagttggggtcatatagtagacccaatatctgtccgtccatctgtccatccatccatccatccatccatccatccatgtatctatatacatacatgcaggtggtggtggcccacacctttggtcccagcattcagtaggcagaggcagacagatctctgagtttgaagccaacctggtctacagagagagttgcagtacagccaggactacacagagaaaccctgtatcaaagaaaaaagaggaggggaaaaaccccccacaaaaacaaaagtcaaaatcttacttgaaatatctttgtgttcattgtctatctgtttttatcctgtcagctaacatctgctaatgaacccttcggggactgtgtcaattattatgtgtattttctttccttgcctcctttctttcctccttgactgcccacctatacctccatcaatcattttatgtgtatgtgtgcacatgtttgtgtgcatgcatgtgtgagtgcacactgtatgtgtgtacatgtgtgtgtgttgatagagcttttttgttaggttaggctgggctccacttgccagtcttcagcctcagtcttctgaggaccactagatctgctttttttgtttgtttgtttgagaccaggtctctacatgtactccagactgtgtttgaactggcaatcctcctcttctgctgccagagagtaataggactataggtgtgtgccaccagctatttttaactccaattttttaattggttcttttacttattttatgtttttattgactgtatttatttggcaatcttgagttttacacttcgttcatggccatggctgctgctgctgttggagtatactaatacagattatgtaagttctttgtgttttaggtctactgtttgggtttttccaagcatggtatatattggccacttggattttgttgatattttgattttgtgtgtattttttttctttgattgttgtagtatttttcttgttctaattggacatgtcagctataataactctttgaatctgagtcttcaccctatgagggagacgttcattcttgtgctgttcgttgttgttacagctgttgcttggtttataatgactttcttaaatagattctttgttgtgtgtgaactctgccaatatctacttagcatattaatttgctagtaagtgaacatatttttcacttattaggtgaaaattagatggaaaatatttccccaagtatctcagttggttcacattgggacgtgacttgaatcctcagctgatcttaaccgccttttgtgtctgtgtttggtggtaggggttgaatcctgggccttgtgtatgctaaggaaacactcactctgccacaccccagcggcagccttcagttactgcttgtctagattagttatcagagtcgagggctccctgtgggttttcctggccatttgtggtcccctggatatcgtgcttgagatctggagaacatcagaaaatggaacttccctttttccaactgtttatttgaccagcttcattttagcccatctgatgtgtaataatttctcctaattgtgtttgcaaatatcccagggaaaagctactgagacattactcagctcaaataaagagaaccctgggatttcccagaacctatgtaaaggtggaaaaagagaaatgactccacacagtggctgtgtgcctcccaccatgggaaagctggcctggctgtcttgttccgagcctcctggcaccccagtgtttcaatagagttagaggcactgtgtgtgtccatccatactctgcttgttcctgggctcacatgaacatctgtccttgactgttaacatctagccagctgttacaaagctactaactttctatttctagtgaatttcattgctgatactccttaaacacttctgccccttttcttttttcatacagggtgagctgtcccatgatcaagatgtggtagagtacatcatgaatcagccaaatgttgttccaagaatcaactctaggattctgacagctaagcgagagtatctggacctaacagcaagcagtaaggaacatttcagtagcaactcttggcttttggatttgtgcttcacattcttaaatttattagattataatattaagaagatagctcaaaattatggcctgtccttctaaactcacaagcatttccttctagaaaagataaatctgggggctgaagagatggctcggtggtgagaagtccttgttgcttttgcagagtacttggatatggggtccagctccctctctggtctccagaagcaccagactcaaacatacatacatgcagtcaaaccactcatacacataaaatacacataaaatacacataaaataaaaatcttaaaatggcagtctagctgggtacagtatatgatggtctgtccccagtgggaaggctgcagctgtgcaggtggctgtaggagctagagcctgggtgacactctcaggagtttaaggtggggtgggaggctgccggaggagcagtgtaatggctgtgatggccagcatgggcttgtgacgcttgctgagatggagatctgggtgctggagactacttacagagccatgagaatttaattcctcattgaccttcaattcagttccaaggacttcaacgatagttctgcctttccaacattttagtctgtcaaaattcccataaaacagtccctcactcagcaaagtctcttaactttaacttctccctgtcacatgtgagcttagctcggagggcagctttgatggaagtctccagccctggagccacccagctcaactgcttcacacttaacacaggataaattccctgtacaagaaacaactcccgtagccgggcgtggtggcgcatgcctttaatcccagcacttgggaggcagaggcaggcggatttctgagttccaggccagcctggtctacaaagtgagttccaggacagccagggctacacagagaaaccctgtctcgaaaaaccaaaaaaaaaaaaagaaaaaaaaaaaagaaaaagaaacgactcccatgtgatgacacaagaaagaatggcccgggcacaggagaatcccattgtcagagcacaagcaccaccaaccgtctggactgtatgcagggaaattgctcaagccgtctcagatgccgtgcccaagaggaaatgtcagtcccatgaggcctgcaaatacagttcaaaagatacaaacttgttggcaacagtgcttctcctcgctgtttagggacagggtcactcacctactggagctaaaggcttacaacaaagccgagctgcttgctcagctttggaaaaatggtgtcaatcgcaaacccagctcctttggagcagttctgcaacaggtggctgctctgcgtcctaaggccctcctccccttgccttcaagggtcatgtgtttaaggagattcagtgaaactgaccaggatgcagccagccagccagacagacagacagacagacagtcagtcattgagctgatgccctgtagaaagcttagagctctggcacaagcctttcagaatctcctgtatgctccagcagagatgctgctgcgccttctcctggaaatgcgtccttgcattcagatttcattgatgatttattgaactagaaagcttgactatctcacttgacaaaagagtcccaccaacattaagtggccatttgaatcccaccagtgaaaaatctttgcaggcttccactcttccctgcagctgctgccgtccccacgcacctgacccaggccttcagtccccctgcctgcctcagatccgcctgagactatacagtacagctcctgttccccaagcactccagacggtcagggcacaagaccttccggttgacagttttagtcaaagtggcagcatctttgagggccagcgagacgacctctaggacttgtctggaacctgccgttgttaattatctgtcagtttcagtttttcctgttttcccaccagataatttttatgtggatgactttgccagattttctgccttggactctcggggcaagacggctgctattgccaacagtatgaactatctgacgaaaaaaggtaacccacttgggcttgatttggtccctcatgtttattctttatttagtatttacaaataaactccatctgcaactgtaggaaaaaaaacatttaaaatataattctgtatatgtctctaaaaattcaactattttctttaaattttatgcttatcattaaaattgataggaaaagcccttcatgattcaaaatggagaacattatatcaaaatggttttgtctgacttcagtatcatcctaggtttacttttattgtagaacttagaaactggattctagaaagcctcgtgtgactcgttagagtgattttatgcagttacttagttaagctacccttgtccacagtcactgctttcatctgcagcaggtccttccctagagggtagggggtggttgacaattagtatccgtccagagtggttctagcaaagcttgctgctctccaaagcaccggttgtcattaagagagataattttgtccagctgtggtcttccttcagagcctttggtttcctgaggacttataagcttatgcaattagtccactgtgcttctcaaagattttgtctccgaggggttctagagcagcttgaacatggcgggagccagagcaggaagtagcacagtcctccatctgccttgattgctaagtgtacaaatgaccttctcttctcttctgctttttttttctttttttttttttgcctttgtccaggaatgtcctccaaggaaatctatggtaactcacaactccagaatgttcccttcattttcataattaatttatatggtttcaggaccactgttattcagaatgtattgacattccttgtgttgtttctgaaacctgtgggtaacagtagataaacaatgtgaatgtttgcagacccttcggaaagttgtaaactaacgcgattggagactgcattgcgttgcccacatgtttcattgtatatgctaacagatcgcagggcagttaatcaatgcatgctcctagtttctcactgagccacttggaaggtccctctgcttcatgttagtagagacattttgctattttttgttttctgtctctatcgtttctctttgtgcatgtttttcagaaatcctctggcctgattttaatgtttcgacatagactatctttctttgcttctagtgagtttgttgtccttgtttctctacagatgattcttttattagaccagtgactttttggattgttggagattttgatagcccttctgggcggcagctactatatgatgccattaaacatcaggcaagtgtctcagatttcattctgggggggggggggattgtggagcgcctgagcacccctgtgctagtgtggttattttagtgtttctagtatttctttgtgtgctgaggaaaaggaacataggaaaaggagtcttcagagggtgtcagctcctaagaaaaggcgtctaagcctggagagcccagccccacttgaggggaatagatcctttaagagcaaatataatcaaatcctgaatgtagaattttctgcatgactgcatgttcctgctgcagggatcttgccatgtactgtgacatgaagagaggctcacacgtgagactgagccaccctatagctccagatctctgtttcttctcttatacatgcttgcttgcatacgtacatacttacatacatacatatataaatacatacacatatttatttatttatttatttatttatttatttatttatgggaaaagacatatacatggtacggtgcatatatggagatcagaacacatcttagggaaagtacttcccttccaccctatgggtcatagggattgaactcaggtctcaattggtagcaagcagtgcctttactggctgagccatctcactgtccagcttacattctcaatataagtcctccatcttcttctctgtagagtctgttttgttagatagttggcctttacccaggcattgctgcctgccggcatgtagaaagaccatgtgaatgaaggtggatgcacaggaacccgaagaaaagatggaatacagagtattaaatgtgctgaggaaagactaactcttgttagtctctggtgtctgctgtattttatagaatgaagctggaaaggaaggctggggccagtttatacaggatttagcagagttgaccatatattatcatctgaattttattttgaatacagacaactactgaagatgtttagaagagacattactattatggaacataactaatgtaaattcgctctggttgtatagcccaggctggccttgacctttcagccatctgcctgcctctgcctcctgagtgctaagatgaaggtgtgcaccagcatgcctggtcagtgttacctttaaggttcataccatatagcatataactcttatctcccctgttttaaatagaaaaccagtaacaatgttaggataagtatgatcaacaatcccagccaagagatcagtgactcaagcacccccatcttcagagccatctgggcagctctgcaaacacaggcctccagctctgctaagaacttcatcaccaagatggccaaagaggagacggcagaggccctggccgcaggagtggacattgcggaattctctgtcggggtaaggctcgcaggttccgaggctagcctggtcattcacgtttctcccctgggctggtagatcctcttcatgattgggtttctaatagcttctgcgtctcagggtatttttgttgttgttgaattagagtcttagtaagaaataattttgtcctgttacagtttacttttaaacttgctttggtttcagtatgcccgtttaaaatgtttgttccattttgtctactctttaaagacaatatttaatgtatttgtaaagtaaaaagcaggtttaagatgcaatgggttagaaagtcagctgttcctttttccattattcattggtttaatgttacttgatttttgtgctttttatagtttgaaattatctgataaaatcacaaatatattgagtttccgttagaggaaatgactgtcacttcaagttaacagatttaaaaatgaaaaaaaaaaagttgctgagagtagactggcaggtaaacagatccgcagaaacacaggaaacgggatgagcagtttatgaggagggaggaaaggcgagcaaatgaagaactaaggtgttgcgttaatcgggggacttagctcttactctttgcaaaagcacattgcagtttactcgttgttagcacttggtcatgtggtttgcttaataacagtgactttccttaaaaatgattacttcctagggcatggatgtcagtctttttaaagaggtctttgagtcttccagaatggatttcattttgtctcatgccctgtactgcagggatgttctgaagctgaagaagggacagcgagtggtgatcagcaacggaagggtgagcacttgctgggctgtgagcctgccttcacaggtctctgcctctcgggcgcctttgagcctcccttgggctgcactggagctgcccttctgatggctgatgaggcctctcagtgcagctgcatgggatcctgcctgacgcttatttgtgtttagacactgggagatagtgaatgtggggctctcagatcaggagtcaggatggctgcttacagagtaggtctcactgctgtttgctgagaaccgatgcagacaatactgtatctcatgtcagcctgcttagaaaggaaggtatcgggaaacacacaggctctgggttctgagggattttaagtaaacattagccgcatctccttaggccttatttttcttcttagtcattttactaaggatatgcttcagggcaggagtcataaggtgcttgctggcttaggtcccagcctggcagaggctttccggcagccggcgaccgctgccctgcagctctgccctcccccttcttacctcacagatcattgggcctctggaggacaatgagctcttcaaccaagatgatttccacctcctggaaaatatcatcctgaaaacatcgggacagaaaataaagtctcatatccaacagcttcgagtagaagaagacgtgtaagttttatacctagtaacgagttagataataagtgataaaactggcgttccgattagaagctagttcatgtcacagggtttttattaatttttcttcactggtcaaagtgagggctacatattatcagttatatgtccacgtcggtggggttatttcccgttttacttaatactgctcacgtcacttaggtttctgaattatttctccacttcaaatctggaaccgttgagacagctgcagaagcagaaggctgagtgcttcctgctagatgcagtgtagacacagtctggtgctctgctggttcacagtctccttgtggtgggggaggaaatgcacgccgagagcttcttccctctgtctgtctgtctgtctgtctgtctgtctgacaaagttggttctcttgtgggggatgatgagttgggtgtggctgacttatgattttcagcactttagtattgcttatcaactgctgccttggaatatgtttcacttctgtgtatttgctacataacaaaagccatgcttatgtgctgtcgtttctgcgttagatgtcacacagatgtgtcctttaggatgccttgtttaatgtttaaggacctgctgtgatgttgtccacggtagctgcaacatctccattcttaccaacatggctcctgggttcagtctctctcctcccaccagcccttctggtttgcaggtttgcttgtttctgtctttacacagtagccatccatcctcacgtgagtggagtggaatctccttacagttcagtggtgccccagaggctgttcttatgcacagcattggccactgcatgtctgtgggaaatggctattctagtcttttcatcattttaatcaggttgttggggttttttgtttaattgtgggcactccttatattctggatgtcagtcccttgtcagatacttgacagtgttttccctattaccttagtttccgatttactctgtgcaatagtacagagtatttggacaatataaaaaattcaagttctttttttcctttatttttgtctcgtgttgtcacactgcatctttttgtaatgtgttatctttgatagctgtcacagtagcccttttgccctgtgatatcggaagatttgggggccatggctggtggtgctatgaatggcggaacctatatcctcaccacactaggaaagttgtctaccactgagctgcttctctagactgagagaacgctcttttcatttgactcaatgctgaggacaagataaagtggcctcctcttccttcagcagctcatgagtggtgcccctttgcctgcctgtgaaacatttccagtgtccccagggccactgtatttggagtagtccccctgttccggttgtagctttctaaggcttggctgcatacactttgatcttagtgcttggtgatgtactggaaattgcttgttctgtgtgccacaagtattcactgttgatactgggaagttgaacagatagatggttaacgatgggattatttggttcaaagaggaaatgtgcaaccttggttgtagttaagtctagcacagctgcttttgaatggcttacctggcaggccagtgagatagtcactgagtacaggtacctgctgccaaacctgacaaccttagttgactcctgggacccatatagttggaagggagaatggacttatggagttgttctctgacctctgcacacatgcaagagcccatgaacatgcatacaaataaatgtaattaaattttttaaatagaaggggtaggtaaaacagggagtgttgtttcattttgttttatttatctttcatcccttgtagtttgtggttcctggcccatctgtagtgtgtctggtgtgtgtgtgtgtgtgtgtgtgtgtgtgtgnnnnnnnnnnnnnnnnnnnnnnnnnnnnnnnnnnnnnnnnnnnnnnnnnnnnnnnnnnnnnnnnnnnnnnnnnnnnnnnnnnnnnnnnnnnnnnnnnnnnnnnnnnnnnnnnnnnnnnnnnnnnnnnnnntgctctgtatttattaagcaacacagaaaagtattgcatgggaaagaataagagcttctttacagagttttacaagggaagaagtatgtttcctgacccagggtagaaaactacaaccaggtgttatcaacctatagacacatgttgcttctaacagttatggtgcgtacttgtagtataaggttgcttccaatctgttaggtgtttcagcaaacacacacacacacacacacacacacacacacacacacatctatttatgtacctacctttgggtcaggggcgcagaagggtaaagttatatattagctatataaaagttgcttgcagaggaaatccaaggcaattaagattacactgttctaccagggtgtggcggtgcacacctttaatcccagcactcggaggcagaggcaggtggatttctgagttcgaggccagtctggtctacaaagtgagttccaggacagccagggctacacagagaaaccctgtcttgaaaaacaaacaaacaaaaagattacatcgttctcttaaaggcaggttaaacttaaagggctgagtgcacagttgaatggcagcgtaggcacctcttcttagatgatctcaaggggtattgttaactttgctgtgaggtttgccaaaagtccagtcttggaggtcaagagataaaaacatatcactacagtttttgtttcttcccctgctaggaacaaacccaaaaatactagataggcactcacaaatactagacagctgctgtcaaccccagcttacaggtttgtcttttttttttttaattggacactgtaatggtgcttctgatattgaattcataaccaacatagatgttggatggctggttagattagtggattttgacgcagcagtcctgagagcaatcgcattctttaagctaggccctgagccgggtgccagcatggttggccagtacagtgtgtacaacagccttgcagagtaggccgttcctgtccttcacccacagagaaaagtgccatcccagagatgatcaagctaaccacagaatcatgccctttggaactcagttcatgcctctttgaaaccgccttgttagcatgatgctattctatgtttaggctgatgctattcagcaatggttagaaaatctgcagataaagtaatgctaaaatttcgtaacttcatcttttagggccagtgatttggtaatgaaggtggatgctctcctgtcagcacaacccaaaggagaggcgaggatcgagtaccagttctttgaggataaacacaggtacagttgttgctgcactaacgcacagtcctgaactcttaggctttcattctttgtctcacagcctttaccttcccagataaggtttctattcacgttgttagaaaagtgaaatgaagtttcatatataaaactacattttgtgagagttggtatttctaaataaacctgaagtaattgtatatattcccttttaatgaaagtagcatttaatgaaatagaccagatataattttctgatattcaggagtaattggattgcttgactataccacttaaatacttgtttcttgtttttttattattattatttaaaaaaaactactgtttccaaagggaaaactacatttaagatatgaaaatgtctttgcctctttatccttcagttttttgttttgaagtttgaacacggatgaagttggaaaactcacaaagaataaccatgtgtctgtaactatattcaccattattggagtgcctcctgtctgtaacctacaagtctataggccagatttaccagctattggtgtgtcatgttcagtattttctatctgtgtgtgcaatgtgcatatgcacactgcatctatttatctgtatatttgtacacacacacatggcactcacatctctttttctagcatttgaaaattcattgctaacatgttataaactctctaaagtgttagcatgtggagatttggtccccactactgtgatcatatgtgatcttcatccagtaatggtaatacaaacctctgctcgaattctctgatgtcccagaccacacattccagttattcatatgtcttgaatctcctttaatctaaaagagtcttctgtgccccacccctttcttttatggtactgactgtttaaagagcccaggcagattgtctttggatctccacagggtaggttattcccttaatagtggactagtttgtttttctggagttctggctccttatttaaaatatttacttgtattatttttaattatgtagatatgtgcacttgtgtgcactgcctgttggaggcccagatagttagttctccctggtactggaataataggtggttgtgagatagctgatataggggctgggaactgaactcaggtcctctgcaaaagcagtatgcactcttaactgtggagccatcgctccaagcctgtatctcctcgtttgttaatatcttgctgtctctttctttaccctctcacccctctcccgctttttagcctagggcctgtgtatcataagcagccactctcactgtgctgtcaccagtaggcagagcctcagtggcccaggatatcccttctggtagcttgccgtgggcactgtgctgcgcacatgcccgtcttctctttcagcatcacgctggtaagaagtaactcgttatctcggtcgggagcagcacaggagacagtgactaacctgctctcctttctgcctccgcagccagcacagtaggtcctccatgaagacggagtcctccagagcattctttctccatgagcttgtggattctgcagagtcaaaattgccctagttacaaactctgttactatacaatagaaattcttactggagtgctgttagccaaggatttgatacaaggatttctcatttctgtttttaaaaaaagttttatccatttagtttaacatggatcttttttgtttccagtttttcaatatgcctgaaacttgctttaatcaaataggtcccatttaattattacataaaagtagttattatttctgcttcaaataaaaataaccacaccatcagttctatgattccttggtgtgagacttaggcagccagcagcaggttgtcgcctgggagcctgcttctttgtctttggcctagagcagacctatagcatcagtgtctgccttttagcaagattcctcagtcactcccctgaacgtaatttgggagagcagtgttcttggacttttgctgtattcatctaaagggaatatatgatcttctgtcctgtttgggacattctagaattttctctcaccggtacttcaggtgcctttctctgtgacttacttccttgagtcttttgcccctcactatagaatgtaggtgtgattatttttttgaaaaatcttaatttaaatttttgagttgtttcgccatgtgtatgcctgagcacccatgttcagtgtccctggagagcaggtaacctcttgttcttgctctgtaaaattttcatcagatcaaaaaagcaatatatgattttggacaaggaggtggtgttttaagcctttgagagtcactacttttcttcgctttgcctttttgtttgtaagagtgttcactgggcgcgctgctgcaacactagtggtggtgagcaggagaggtctattccagactcacctcagaaggtggcagagtgtgcttataagttcagatgggagctctggcttgcttgtgctcgtggcttccagttccaccagccacaaacctcacaagtctgattatttccttttccccagtgtacagttacccttgtaaaaagccgtaggtccctctggggaagaactggagaaagggtaacagcaaaacctttgggtgtcttatcaggatccttcctcagcggaacctggccaccccttcattcaaggggttccggatctgcaaactggctcaagtctggaaattgattcactggccgagattgctgtttaccacaatctaatgtagcctttctttcatttatttgagaatttttctgcttatacagatcaaacaaatatgcagtaggcttcctatgtatttcattcatgggtatagctccttctgcccatcagtaacttttttgccgattccttattcttagtgccgtagaagatcctgagtcactgagattcagagagaggcactgtaccaggaagccttatgggagtaaacagatgctggtcctctcttgtgaagagcaggagcaacaactgccattcagaagtactggacaagcaagcctgtctcaataagtaaaatgaaaaggaaaccagttagcaggttgacttggcagattaaagtggttggcatgtaaacttggtgactgaaatttgatcctagaacccatgggaagatggagagaattgactccaccaagtcatccaaaagaactgcacacatatgccatggtgcatacacactgtggcttctaagtgacccgtaatactaataggatagaattaaaatgaataaaaatttgaaatatatataactgaatcctctcagtgataaggcagaattctgtatgcctttctcatctgtaagttgttttaggttctgaggaaattgaattgacattgtgtaccagccccaacaattctctactctcatgcctaactcttctgagattttaaagagactgtatatggagaaggctggatgcacaaactgtttaaaggtcaaaagccatctaaatgtctagcagtaaaagataatttcagtaatagatttatagatagattataacagatttacttggtaaacataagacatttcttattcagggtgctgggtgtataggaacatgtatacatgtttatattgaaatagtgagagaagcggcacttgatttatttttttcatgcagatggtagtgatagggccatgtataggtgatgcacatgtgaaggtcagaggacaacttgtaggaattggtcctctccaaacatgggggagccagggatcaaactcagtttaccatgttctgtaacaaagttcttttatcctctgagacatcttgtggcccaagaaattgtttttaagaataactaacttttatacagcatctaaaaagaatcatatatgtatacagtgaagtgactgtaatagtgagattgtgagattgttttagatgctttcttttttctgttttacaggttttctaggttgttatgtttggttaattgatggttggttgattacactcttaaagattgaacccagagcattctaccactgagctacatcctagacacattatcattaatttgattaatgattgttttttgttttgtgcttttcttgcctggaaataaaattagcatcatgctcagtaaacatgagaagtaaacatccagtatatttagtagttggctttgtggtgcaagaatgtactaggtacttgggaggctgaggcaagagaattgcaggttcaaggccagcctgggcaacatagtaagagcatctcaaataaaaagtcaaatagaactggtgatgtagcttggtagtagtgctcttgcctaggaaaggaacaaaaagaaagcaaaaacaaaaagcagaactctgcagtgtttaagtgcaatgtgatctagctttcctgtcttcacacatggttccgatccctcgtgttcaaggatttgcagcgtaggctgtagctttagtctcatggttgaatcgcattttagtttgttggttctcatcgacagatttggaatgctaagatgtctgaattgttgataacctatgctggtatgctccaccccaacctcactgttttcctgtttcctcagtgctaatgtttggttcttttgattttttttttctctcagtgcaattaagctgaagcccaaagaaggagagacatactatgatgtggtagccgttgttgaccctgtcacacgagaagcacagaggctcgcccccttgctcttggtaggcctgctgtggaggtgttcacacctttaaccaaagtagtcatgggtcctacgattttctgggcatttcctttgtccatttaacatcttctagaggagatcgacaacagtgttttcatagggattgattaaggctcatttttctttatgaattgtgtcatggctttaaatatgtataagattctacacttttatatatgcttaaaaaaacccaactaaccaatacagtaccctaacatttcatttaagtgtgtgtgtggggtgtgtgtgtgtgtacatgtgtgcacatgcttatatgtccatgtactaggggctagacttagagccttacacgtgctatgtgggcactctgccaatggggtgtatctctagccctagctgggattttttttaggatagtaagatcatctaatcttctctgtaaatgttaatctacatgcttcttactgtgaactgaagcagcaagctcttgttttcctttgtagctaaattctcatggtttaccttctgtttcctcacaagagagtgttaaactttgtgtgaggagcagtgatctgcaatagcctttttaaaaagatacatatattcattcattcattcactcattcattcattctgtctgtctgtctgtgagtacacatgtcacagtatgtgggtagagatcagagggcatcttgcaagagtcagttcttgccgtttgagtcctgggaatcacacttgggttgtaaggcttggcagcaagcaccttgacttcctgagccgtttcattgcctctcctgcccctctttggaaccaggccttctatctgtggttgactctacgttggagctctgatgcccaaaacttctttaatgcagatgctgcaacagctgttttgtttgtgtatgttcctgagatgttaaaagtgctttgtctcctaagtaattgtgaaacaattctgaagagaaaacctaaatattttgtcatctggtttgctgttttaggttttgactcagctgataaacatgaatctaagagtatttatgaattgccaatccaagctttccgacatgcctttaaaaaggtaaaatgccatttaaggaacactgttccatagcggtactaaacctaaaagttagccctgcgtgggaagactcgggtgcatggacaggctcagtgtgtgtgtgaaaggatgtgtactgacagtccccgctctgctttggttagctgttctgagaacacagcagggtttagacttagacgacatcagtacaagttgctggcacatttacagctcactttaaaagaacggtagctattaggtctcatgtaggaagcttactctacttattctcgtgcatcttgggggagggacagacttggctgtgggatggctgtttgtggaagtcacagtgactatagtagcttagcacatgctctggccatgggtgatgtcttccttggccatgggtgatgtcttccttggtgaggggcagagttctatacttagattcttaatggattccaactgtcttgctgaggactgagcgagctgcagctcccactgtttttttttttttaaagatttatttatttatttattatatgtaagtacactgtagctatcttcagacactccataagagggcgtcagatctcattacagatggttgtgagccaccatgtggttgcttggaattgaactcaggactttcagaagagcagtcagtgctcttaactgctgagccatctctccagccccagctcccactgttaactgcatgtttatcacacaccgtgttctcagtgctggcatgagggcacaagcatcacttagggctcatattataagacaaaggtttctcctcagaggccagtgctcaggataaagtgcttgtgaccccgatggccatagtgtgaaggggtggtctcctacatgcctccctctcccttcccttgactttacagcagccctgggaggcagcattagaccagcagaaggcttggcttattgtcctgatttggaaggctactgtccaagcctagggttttgttcactgtgtggacgctgagactgcatcaagaaatacctaactaacacttgcgtttcttttcagcttttaccgttacgtcttagagccggagatttctttcactgcagacagcagctttgctaagggaccgatagcaaagtttctggatatgccacagtctccgctgtttactttgaatctgaacacacctgagagttggatggtagaatctgtcagaacaccatatgatctggataatatttatctagaagaggtagggatgtaattgttctcgactatcgcatcatgtataagttaaatctatccatcattcagtcagtggcgattcctgaactgagtggtggagatggcgctcacatcacacatcagtgctcccttacgttgatgctcccttacggcagctgctttattcagatgccttcccgctcagaagttgcggtgtgtgcatggactgctgctcccacccttgctctctcagcttagtcagctttggttgtcctcagagttggtcggttccacatcagtgtcagtcactcctctcatcctctcctgattgacaggaagcagtgctagggaggggcattcattagggctcctaagaatgcagcctgtggtgctagggaggaagtggcctgatctgggtgccaaccaggaagcaaagagaggagagtcccaagggcttccgcctttttcttgtctaactcatttcaggatccccagcccatggagcagtgctgcacatttagtgtgggtctttcctcctgaattgatcctctctgaaaggccctcacacatgcccagaggtgtgcttccaagcctagtcagatctggtcatcacagtcctcaaatacccactcccagttgtccccggcagttaggaactgtttctgatctgacactgtgtctaaatcattacccaacgggtggtctttgtggttgtagtgggtggtttgtgacacattccttctgtcatagaatccaggatggagctctagcctcggtggcagccagtgctttccccctcgtgattgttgccctgacctggcagattacatgtgtaacagtaattacatgtgtcatgtgctttaactctggtctttcaggtggacagtatagtggctgctgagtatgagctggaatatctgttactagaaggtcattgttacgacatcaccacaggccagccccctcgaggactacagttcactttaggaacttcagccaacccaacaattgtggacacaattgtgatggccaatctggtaagtaatcagtttatcgatagtacaacttccgtgatggttatttagacactgtaatttatgacagaacagttagcattctgaaccttggtgtgaaatagaactaacaatggactgctgtgtaaagtccctgcttgctctccgtggagcactgcaggcgccactgcactgccctgctgaggctctttgcctcttagcttattggttggtagttttttggtttggtttgttttacttacctctggtttgttaattatcttttaaactttctttaattatcatggtaataagaccctgagttcagtacctagttcatgagaggggatggggtagataggctgtcatatacacatacatgatctgcatgtaaatgaaaatgtaagcattcattagaaacatttaaatgtaaagagacctgagcctgtactctgtttgtgtcctagggatattttcagctcaaagccaatccgggagcctggattctgagactgaggaaggggcgctcagatgacatttataggatctacaggtaggacaaggagacggcttcattgtagagactgagctttaattgcgcattatctgggcttaccccaggcatcgtgcgttatagtcgagttcatgataaagccaagcttctcagaagagtaagtgtgggagaagttgtaggggatgggttggttagcaaggggtctaagtgctgatcagagcgaggtctgttctccattgctttccctgtcagctcttatcagaaggatgcagatagcaggcaggagctctgaccacttgatgagagctgactggaaacagcagggtcggtcctgttcagtacgctgatgggaggtgtttatcatgaccccggctgttttgtacatgcacagaacacatgagctttgactgtgtagtctgactgtcggtcctggtccctgggctgcagttgtgtaggcgtactcctacaccagcctgtcagtgacaggaattgtcttaaagttcaaacgaaccccagaacaccattttaaaaatgtggtctctatcctgtttaacacagtttaaactcgtccttagttctgtgccagtttgtgtagggaatggttttcattatggtttctgtgaacagcctaatgtgtgtatttgctttggcttcatggccttttacttgacatggagaagcagtgtggtttagtgggtttggttttggtttttctctcacccacgcttgaactggactcaagtgagtcttctgccttagtctcctgtagctgagacctcaggcgtgtgcctccatacctagcttgtgcagatttcttattcaataacttagaattttgtgctatagtaatgtccttattgtaaatagtaggcttttccctgattcagttattttcccaagaaggcttcacagaatgtttcttctatgggccctgtccatcttcttccttgcctggggctgtggtgccgtcctctctgctgtctagggttcctgtcttccgaggcttcccaaatggacagcctgtgattctggaatcttctgtgcgccagctttctcctctccttttgctgcctgctgagtgacagcacatgcagtggcttcctcacattgctgcctggagagtgagatgaggaggaagcgagtactcacagtcgtcctgctctgccttgtgggcctcggaccagagcggctgcactgtgggcttcctaccagacacagaattgagtctgtgctctaaacttggctggttgtgccgcctctcacactgtagcctaggctggctttgatcgcagttgatctccctgctgcttcctgttggggttacaggtgtgagtcaccacactctgccaagagttaaacagcagaagcggctccagggatgggcctgagtgtgcagactgtgagcggacaagctttgtcatgatctgaccagtgcttgtcctgcctgagagcccattgatgtttgcctgctgtaggaaggaagtcagctcacgtccctagcctagagatggagatttccaggaacacttctttgtcctgtaaaggtgtttctttcagactgtgaggaaactgttggttttaaaaagtgtttctacaatgaagatgggcaagcacagcccatcttgttgtctgagtatttaccgcattttgggattgtgatttctttctctgtcttacttgtctctaagccatgatggtacagattcccctcctgatgcaaacgacgttgttgtcatcctcaataacttcaagagcaagatcatcaaagtgaaggtgagtctgctcggctttgtcagggaacagacagcagtcccccccctgtggccgtggccagccactgtcagggaacagacagcagtccccccctgtggccgtggccagccactgtcagggaacagacagcagtccccccctgtggccgtggccagccactgtcagggaacagacagcagtcccccgtggcagccgctgtcggaggtactaacacttgtgaccgtgctaggagagccctctcgcggtagttcattaagacactgttttaatgttctgttttgtgttaattactgttgtgatttttaccttgcctaacttaccaattaagcattagtacaaatagagtgaacaaagctgtaatatgtatacagggttctctactcttagagttcatgcatccagtaggggcttggaatgtctccattagatgaagtaggactgctgcatttggaagtcattttggtattccatttggaagtggcttttggttggttggttggcttttggattttgttgttgtttgttttaatagttctagggatgctgcttaagaaaaatgtcttagtgaagataagattctagctttcttcagccaacagattgtcacttttggtaatctcagagtcccattttgtgcaaaatgtccccacagagactttgtgtactcccctctccattctgattgagacagggtctcactatttagccctgaagccctgattgacctgggacttgctatgtagaccaggttggcctcgaactcacagatatgtttgactgcctcccaagtatcaggattaaaggcattgcacctggctcagctttgccatgtttttttttttaagttttatttatttatacacatgtaaatgtgtttatgtgaatatatgacactcgtatacctgtgaagggcacaagagagcattggtatctcttagaaatggagttacaggttgttgtgaactattcagtatagttgctgggaactgaactcaggtcctctgggggagctgtatgagtgtgctctgaaccactgagctatctctccagctctggcttgggcgctttcatacccacaattcatagagttagtattttagtctcagaagactgtgggaaattccactggcaattcaacagtaagattatagtttttataggcaggatggtgcacacctgtagtctcagaactggggagttagaggcaggaggatcaggaatttaaggtcagcctagactgcatagtgagtttgaggccatcttgaatgatatgagacactgcctacaaaaccaaacacagaatacaaacaggtgattttatttagtcttttcttactctctttctcttcagcattttgaaatcctaaagtaaaatgattgtaggataagtaactgttacacatggtaaaacctaaagtcagccattgcgaggctgaacaggagggtgattgctgcagggaatcttttgtggtagaagtcctgagcatggaccacctgatgcgcctctctcaatggttcctgtgggccgcattcttcccttgaagttgtcagctagagaagttgtcttctgggttactccctctgtttctatgagcttggtctttggctctttgtacaattcaaagagatggctggcttgcccctgaaggctttaacgtgagtgttctgatgaacgcactgccacagtcctgagagtctgggtggggtcccctttaggagaattggttgattgtttcctgttgccagtgcacttcaggtttgcgcctgtcagacctgtcacatacaattgcaggttcagaagaaggcagacatggctaatgaagacttgctgagtgatgggacaaatgagaacgagtctggattctgggactcattcaagtggtaagtcggcatcatggtgaacagcttacatgtacagggagggccagaggtgtgaaccatgcatcctttgcaatatggtaattttttctgggcttccaaaccacttcatgcagctagattaagccctttcagttggagaagaggaatgcttccctttcggttaagagaaggaaagtgttcttccacggagggagcttctggtgtgctctcttcccttgtggttggtggggcccactgctggcagaggtgacggtcattggacggctgtgttctttggagtagcttgtgttctgtgtattcctcaatgacctggtgcctttggggagcatcctccttattacctccttttccttgtgccccacctagcatcccctggtgctcccacccagcatcccctggtgctctcacccagcatcccctggtgctctcacccagcatctcctggtgctcccacccagcatcccctggtgctcccacccagcatcccctggtgctcccacccagtatcccctggtgctcccaccaagtcttacctctggagcaggaaggctcaggcactgtccctttcctctcctgaaaggttgtgtcagccccacatgtaagtgctgtttttaattatgtcatcacaggggcttctcaggacagaaggctgaagaagtgaagcaagataaagatgacataatcaatattttctctgttgcatctggtcatctctacgaaagatttcttcggttagttttcactatttgttatgtaaatggatttgttatagtattctttgagtgaaaggatttgcttgctatggtgtgtgtgtgtatgtgtgtgtgtgtgtgtgtgtgtacacacaaagtactctgagggctgtgggtagcctaccacatacagttctatttgttgtatgcacaccttatagactgttgttgatttttttggccatcaaatattgcataaaccagaagctagagaattggcatagaaagtacagaaactgtgtaacacttggccatcttctgtagagccacaggcctttaaagccagaccttaggtttatgtgagaacagctttgcttgcaaactgagattaaaatggaaggagtttgtctaggtcatgcaactggaagcaggacggatcattgcttgacattgttgatgtggttaagaggggagggctttcgggatccctttgtggaatcctgaggtctcagggtgtctgggagctcagcgttgaagacatattacttgaaagccattgtcccaatttcacagctgtttgtccttttagttttcattataaatctgatatagaaaataataaaaacaatgtcatttggttaatttctagtcctttttccaataaatatctgctctaaactaatgacagtggcaatgactttcctgagcccataccctccccttactgactccagtctctccaggctctcgacagaggctgtgcatgtgtgcaccgtttgctcagtaccagatgttgctgtgcctgagcactggtttggagagtgctgtagtcctgactatgatctccagtgctagctaactcaccgtcagttgatgagatgggtcatttaaatgtacagcataattagagtttgcctctatctgttggggtatacttacagggaattccttgtccctctctcttccagggacatctttatgtacgtatatgtatactttcccattagtgaaggtctctgcctaactgaacaatgggttggctctgctgtcaatcttgtgagttccttctgcttaatgttgctgaggttaaaaagcattgagaaataattatttgttttgtttggcagcatcatgatgctctcagtcctgaagaataccaagactcctgtgaagttctggttcttgaagaactacttgtcccccacatttaaggtttgttcatagggaaaaggaaaaccttgttaagggaatatttacactgtaacatattcttttctacctttgttttatctatactcttaatttttatccctttcattaggatattttaattttgttgtctgtttctatattgtttttttttccaggtttctctatttggggtaatagtgtttatgaatctaaacccaaaattatggcctgtttgaagctgggtaacataggaggaaagtctttgtcttttctgagacagtgttgtagcaaactaacagtccttgccctgggaggtttgctgtctccccttagcttaggaagcacagtgagtggggtttgggaatggtttgcgaatgaatactcttctcatgaggaaggggaggggctacttcccctgtgtgcctcgtagtgggttggcccgactttcctgcggtcacttttcctgtagtatttacaagacaactttgtattcagtgtggctcatctcagatgagggctttccttacttctgatctcctgagagctggtgtctgaacacagaagactacctgtcaacgccaagagcctgctcagagttctggctctgccgtgtgatagcccgggttagactcagccttgagaagaccttaatatcaagctcaagagtgttttactaaagtcaaatgtagataagtaaacctggagcttgtgtgccttacacacacacatgcacaagttgtataaagttgtaaatctaaaagccttcacctgcagatttccttcatttcttgtggtgagtagatgtcatcaaaaagtagggattggaccagagtttagatgtgacttccgtgagtcaggtgaattaaaccagattgtgccagaccttgtttcagtgcgagtgttttagttgtactgtaatactggctaacttaaagtaaggatcagtctttttaatcagagtgaatgattgttgttccctgtgtctaaactaggagtttataccttacatggccaaaaaatacaatttccagtatgagcttgttcagtacaaatggccaaggtggcttcaccagcagacggagaagcagcgaatcatctggggctacaagatcctcttcctggacgtgcttttcccgctggttgttgacaagttcctctttgtggatgctgatcaggtgagctcgctcgggtgggggtaacgtgagtctcagatggcagagcacctgtgtttgcatcagtagttcaggaacatgggaagagatcactcagatgtcatcaccttttgtatttaagttccattaacacatctccttttctgtaaaagctttatgtttgtatacaatacaatgaataacccactgcgtccagttggagcagcccgtgggtgcatgggcacagagccatccactggagcatgggatcctattggtgttgatgaatctccttccctcgagtccccactgccagggatgcctcagtaacgggggtccagtcatctgcacagcgcctggttggtcttggatggtcttgtgtaggtacccacagctgctctgagtttaggagtgagatgagcagtcatgtccagaggacagcatccacagcattcctccccatccttcccagctcactgtcctcagtggtccccgagccttgggatgcagatccccattcagctctgagcatcagtctcctcctctttttattttgactagtttgtgtctctgcttcccactgcacaaagaagcttctctgaccaaggccaagggcagcgtgggtcataagtaatcagaaggttttaacataattatttagaaggtaccttgagagtatcactatttcagaaaataaaatagcaggttctgctctgtggccatgacctctgcagtcctgggcttttgccatgatttcaatactaggcatgaagtttccctcctgtggagcaagcctcagatccagtcagaaagccactagtcatcccataatagtcaccctactgcactagtgccagcgcttttctcctactctgtgggctgtttacacacacacctttttctctagatttggacattttcttctataattttattaaaaatactgtctgttctgtgcctttggagtaggcttcttatctgctaggattagacgattcagtagtttggtctttccatggtgtcccacctctcttccatgtgcccatgccctctcctccagctgcttcttgttgcccttctctgtatgattcgaatcccttctcttcctgccctgatactctgttttccacatgcttcgttctgtgtgcgagctttccaactgagctttaatttggctacctgaatttttctttccagcatcatctctggtttttcttcagtttttttttctctctctcttttgaatttaatttttatatcatgggttgatttccgtattcatccagctcttgttttgttttgttctcaggatatactcatgcctttaagttgttgaacatagttataattattcttttaagttctctggctgcaagttcttccaagccattttcattaggagccagagtaatggggttagtcgtctctgaaggagacatgctaccttcttttggttttgtttctgctctgaacttgcacatctggagttagtttattggttgagtttttctttcttttgtacttttcattttttaaaatccaaatcatctcttcttgtcttttagtggtggtggttgcagcattcaggagaggactaaattgtaacagagttgaggtgctatttgttctgtgggactggtttgtagggacaaggtgtctccctcatgccttcctttgagggaaccatctcgtgcaagtgtggttatcccacttgggtctgcagctttctctgagttgtggaacttcccatacctgtgggtcttaaccagagtcaaatcgagttcctgttgtgggtccacggctgtcatggaagccactccaggatgtggaactgcgtaatccccagacagtccatccctaccctgggtctgcagcttcttcagaagctgggggtgttgttgatcaaatctccatgcctctgacttactctttgcatcgctatacaataaagctatctcataagaagtatgcactgacccctcacagtctgaccagatagtgctcagattctactttgaggaggtagcttgttgacagggaaagcgcttgtttattgcagccatgagaaaagccttaggcatttagatttttttcccttatgatagggaagcctcaaccatcattgggacattatagagtcccaaggatatcaacatgaagcatcagctatcagactctttaccagactccagagtttttgcttatgtctttaaaaaaaaaaattttcattttctcatttcaagtcagttaaatattctgggggaaacaaatcactcattgcctctgaccttttagaaaaaaatgctgtgttgaaatactgtatgcaggcttggtctgagtttgcgtggactatgcttcagtatatttataaatgacgagcttggattctgaaattaaactttttatttgcaattttcaaaaaacaaacaaacaaacaacaaaaaaaagaagctggaagcatgagcctccctatacaccaataggtagggctcacgaaattcagggtcgaccctgggtctgcagcagctctacagtgtgtgcagtcctatatcttagtattaattcacttaccgtaaatacctgagttacaaaagaaatgcttaatattacttggtcactgtgtccactatctgcccaaatgttagctacttcattgttcatttatttacagttcattcattgatttttgaaacagagcctttctctgtcatccaaattgttcttttgtctctgtctctagaatactaggactccaggcccagccaggacaggtgttgctggcatggggggtaattgatgttcaggggcacgcgtggttctgatgacaaggaacgctgcagaccactctgtcagtcggtgcagagttcataccttctccacagtgatggtcttctcttatagtacagctgctgtcttcacactgctaaactgtgtgctttttgattgatatctttctcctctcctgttgatcctgttcactgtacatacatctgacatacaggctgcagcatggatagtaagcacggagcttattaaacatgataataatacactcttgaaatttccctgttaaaatcagttcaatacttttgaattaaacagtcttcagaatagcaccactcagtgaaaaacatgagtgtgtgggatcatttcaggttacgtgcaacactgggggaactcggcttgtgttctaagcctgtgctgtcacccagtgtgctgcccttcctgctgcctggtgaaggatcatgccacagggaaactacctgtgcgctggttaacaaaccgtttgttttctttactgcagattgtacggacagatctgaaggagttaagagatttcaatttggatggtgcgccttacggttacactcccttctgcgacagcaggagagagatggatggctaccgcttctggaagtcagggtactgggccagtcatttggctggacgaaagtatcacatcaggtactgagagggtgccctgcttatgcctcttatactacatataaagagagacttagtttatttgtttagctgcatatactgcagtatgttcttcatagttttcctgtgagtgtgtcctgatgtataatctactaagtacattgttttgcctatttcaagcatattcgtaacctttgggtggcacatgcctttaatcccagcacttgggagacagaggccggggatctctgtgagtttaaagctagcatggtctacaaagtgagaccctgtctaaaaaacaaaaaacaccaaacaaacaaaacccacaaccagtataccagtatatgcatttattacttcaaatggacactccatgtcttctggaagaaggtgatttggagcctaggacatatacaagaaatattatcgagctggagagatgttctctgagatgaggaccactggctacttttccatagcaccaacacccacacccacatgggtgctcacacctgcctataagcccaggtccagggcaccttttggcctgtgtaggcactgtttgcatgtgatatacagacatagatgcaggtaaaacacccatacacatttacaaaaaaaaaaaacaaaaaatacatctttttttaaaaaagaaaagattgacttattttatgtgtatgagtattttgcctgcatgaaggccagaagatgtcagagtccctgaaactggagttacagaagatggtgagccactgtgtgcatgaagggaaccaaactctgatcctctagaagggtagccagggctcctaacctctgcgacaatcctcagggccctaagtaactccttgttaaaatgagcacacacagagatgaatgatggctgcggtgacttcagttttattccgtgtttcttggctgcagagaattggaaccctgcctgctcctctcctgttatcttaagatgtcgtcaggatagtggtggcaaattgttatcatttatcagtttcagtgatctttatcactggatcttttgagttagccagatttctttttgtctttcttatatttattttatgtgtgtgaatatactgttgctctcttcagacacaccagaagagggcatcagaccccattacagatggttgtgagccaccatgtggctgctgggaattgaactcaggttctctggaagagcagtcagtgctcttaaccaccaagccatctctccagcccctagatagaaatcttgcctcagaaattagtttccttgtaagacaacaaaataaaaagctggccaaagtgagccgtcagagcaggccatagcctgcaggtgtgtgatcctcttggccatgtgcatgcgccctctgcggcatcttccactctctctctgggacactggcctgttccatccatgacctctcccaccattcagttgggttcattgttgacatcaattgatggtttgtctgtaacaagtgtctcctctccactcagtgcgctgtatgtcgtggatctgaagaagtttaggaaaatagctgctggagacagactcaggggacagtaccaaggtctgagccaggatcccaacagtctttcaaatcttgatcaagtaagtgaccgttgacattacacatacaagtatgccatttgtgtctgaaaatgaagtagtgtttgtgtgctttctcagaactgaactatttcttcatggaaagtatgtgagtgtgagtgtgagtgagtgtgtgtgtgtgtgtgtgtgtgtggtgtggtagagagagagagagagtgtgtgtgtggaaagagagagagacttgtctgatcccaaaggctctgagactgtcaaaaagctcagaatttacactaaaaagtagtaaaattttctagccctgactgccctccatgtcagaactttcaggaaggcttgctgaataacttttccaataacaagcattttcagaagtaaaattacaggtttgtttcgtttgggtttgtgttctgtttatttgtctttatgtgcatgggtgttttgcctgcatgtaggtctatgcactgtatgtgcagtgctcccagagaccaggagagggagtctcaatcaccctgagctggagtgacagacaggtgttagagcagccagggctcctaccctcacccttctcctcagccccagttgtagctttaagtgttttagatatctactgtcaatctgctgctgcagctgctgttttgagaccaggtagcacttagtagccttggctggcctggaactctctttgtagacagggctggtctagagatccaccagcctctgcctccgtagtgctgagattaaaggcatgagccacaatacccagcttgtttaaagtctttcttaaaatatgttgttgtttattgtgatatgtagcatccattaaaagaatccatcttcaggtgtatcaaggagtcactacaaagccaaggctataaccagagccccgtgcgtcaggagcatgtcactcctgatagcagactgctgccctgctccctgactgtggcaggcaggaggcagcccacttgccgctctgtagactctactgagcctgctgtctagcctggacaccatgcttctatttagcctcttggcctctgctgacctggggatgtgttccctctactcactttcctttgtagttttgtgcccttcaccagccgttccccattctatctcttccttcctgtagagcttcctgcagctaaccaccttcactcagctcgcccccccaccctgctcaatcttagtagtttattattttagtcttttgtcctttgttctttgtgtttcctgtctagttagtttagtcttctgtttgtccttcattttaattaacatatttgcttccattttagtattttttgttttcagtctgtgctggaatcctctgtcctttatctttagcagctgtctcatgcagagtgacagtttgcactgccaggtctttgacccacctgctggctctcatctcatgacctctgagcatatgactgcttttgttcatgttttctctcagctgtttcttttctttatttttttccttttattgaaaataattttccccctcacataatatatcccgattccagtttcccgttccttcccctcctcacattggattcacctgctttctgtctctcagtagaaaatagcatctaagggataataatagaatacagaataaaaagataaaacaaaagctaacacattcagaattgaacaaaacaaacaggaggaaaagaaaaggcacaagaatcagaaacccactcatttatttgcacactcaggaatcacataaagaccctaaactgggagccatgatatgtatggctgtaggaatgtgttatattataaagtatattatgtataattattatcttcctgcagagtagaaagtgcaggttcagcagtatctaaagtttattttgttgacggtttgatgaaggaaattgtctcagttacttttcattcctatttctgtgagaaaacactatgcccaaggccattgataaagcctttaactgcgcctatggtttcagagagttagaggccttgatggcagggcaaaaaaaccacggcagcagaaacagctgagcgctcacatctttactataagtgggagatggagagagataccaggaatggtgtaggtcttttgaaatgtcgcagtctgcccccagtgacacccttcctccaactaggccatacctcctaacctgtccccatacagaaagacggttgtgagctgctgtgtggttgatgggaatagtttcaccaactggggatcaagtgttcaaacctatgacctgttctcattcagaccaccattgtgcacaagactggagtgattgttgcttgcataactgacctggtcatggttctcagacaggatctcacatcgccacgctggcctggaactcagtgactgtgaacactcctgcctttgctcccagagtgctgggattgcagcgcatagcactatactcggctgactacactacatcatttttacaagcgtcacagtcagtcagttctgtttatttattccagtggtatattgggtttttttctccccagagtgttaggacaatggaacattttattgtgagagaaatttgggctccatcatttgggagcgggagagtcggtgcttctcctctggaaaactataaagtgttaaggcccacctcttctccctgcagaagtgagcagagactgcatggtgactcctctgtagtctcagcacgtgcgtgcgaggccaggcaggaggacaagtcccaggccagcgtgggcaacagtctcaacagagcaaaagacaacaacgggaagttttagaatttactttcatgcagtgaaatgtagttgaatcttgtttgtgttggttttgtctctttttatatgtatatgtgtttgcctgtgtgtgtgtgtgtgtgtgtgtgtgtgtgtgtgtgtgtgtgtgtgtgtgtgagcccagtgctggaggagcccataaaagggcaccagaccccctggcactggagataaagatggttgtgagctgccgtatggtggggacctactgggttccctgtaagaggtgctaatgcccttaatttcatagtcacccccttgggtccccagttgagggagtattgttgtttgtttttctaagttttaaatatgtgtacacatgtctatgtgtgggtatgtgcacatgtgtgtaggtgtctgcagaggccagaaaggggcatcagatccctggagttgcaggtgtttgtgatctgcccatgtgggttacatgggttctggggactgaactcaggtcctctgggagaacaatatatactcttaaatgctgagctgtctctccagcactctagttgaattttaagcctacactggttgcttatttaaatttctttctgagttttaaatccttgtgtttcattttctttaccaaacaggatttgcccaataacatgatccatcaggtgccaatcaaatcgctccctcaggaatggctttggtgtgaaacgtggtgtgatgacgcctctaagaagcgggcaaagaccatcgacctggtgagctgccctccctaccctgggacctgacagagcctggtggtcctccctgccctgggacagagaacctggtggctgctggtgctgttcaaattggctttcgctgaattatggttggagctgcagagcatgtcctggtcacttcagcagggctcttcctcacttgcccaggacgccagatcacatgcagcggtctaagagttgatttctgctgtgtcacccgtgtcttccacttcaaccctgtgcctggacaggtgtctgcttagcctgtaactttgtttcctttggttttgagaggtttactgtgtaacccaggctagccctgaaatcccgatctcccatacttagtctcacacatgcctgctggaggcctgtggcaatctgtacatagggtgtacctttcttatagctccactgaggtgtgcttgtgtgcttgcagtgtaataatcccatgactaaggagcccaaactggaggctgccgtgcggatcgtccctgagtggcaagactacgaccaggagatcaagcagctgcagaccctcttccaagaggagaaggagctgggaaccctgcatacagaggagacgcaggaaggtcagtgtgaagctgactgaggatgagtcagtcctggctactaatttgttgctgaaacaatgtaggggtccatttccctagatcttgatctcatccagggtctatttcccattgtgcccttcagccagtcttctaaatagcacattcaatgtagttttgtagtcctccccccaacacttgtttgtttagtcagaagaagaagagatgtgtgtgtgtgtgtgtgtgtgtgtgtggtggggtgcacacaagtgttcatatgtaccaccgcatgcctgtagacgtcaggacagcttgctttcagcagccagtgctctcctcctaccatgggcgtctgtatacttacaataaccttatagactactggtcaaattaggtgatttgtggtcttttattttcaaagccactaaagcttacaaataaacgtctagtatctttgtctgtccatgaaagtctggacggtttatgccaggctgggaatcaagaggaccaggtgttaaactcacttccacctacagagtgcatttgagaccagcctacaagaacagtgaataaattggagtctcgattaaatatttctcctcctttaaactcatcctaagaagcaagtgcagggacctggagagacttgaaagtctgttctggagactgcaggctagaaagtgtcatagctagtaggttatagtcacacactcactaaagatttggagcaggagagccggcttagctttaaaagcactgtctataactccagttccaggggatctgatgccctcttctggcctctgtgtgcttagcatgcatgtgatattcagagacataagggcaaaatacccatacacataaaaaaatgaaaataaatactgttttaagaagttaaattcattatgtaattacttatagataaatggacaaagaatatgaacagactattcaaaagaagagccatatatgaggaataaggatacagtgatgaaattagagtcaccattaatatctgatatgtcaaaaaaatacaggtggagaggtagtgccatgcattaggggtcaggggtgagactggtgagtgagccttgccgaaactgtccatgtgtctggaaagccttgctttaaaagcagcaggtctcttacaaggagccttgaaaatgctgcaccaatgggccagagaggtggctcagcaggagaagtgcttacttcatgacacgagtcctcattcccacgtctcttgtcagagcaaaggagagaactcactccacagagctgctgtgagcacgcatgcgcaccatagcatgtgcacacagtcatggtaaagtgcaagtgcattgtgcaagaatgcctctactgaggctgcatcttagataactccaggaaaagcaatacacacggagagatgtactttactgttacgtaccgatcagcaaccttaaaacagtttaaggatcaaagaacagctgccctggctcacagaaagaatgtgtaagtgcagaagatttctgcacacagcagtgtgtggcccagagccagctctgccctgctggagaccccgagagccagcgctgccctggtggaggccgtgtatagcccaagggcgtgtcagttcttagagctaaaaatgtcttcttctcttaggttcgctttcaacccttaatacagaaatagccaacaccaagcttctacagaccatctgaagctacagtgctgtgctgggggcagtgtcacacgctgttttatgacgtaagtctcacggtctgtgttcttcccccaggctctcagaagcatgaggaattatgatctctggaggaagatgggaaacccaccttgacagtttggactaactgctgttttctctgatctttcgatacgactgctgatgaacggattgggcaggtgtaccacacctattgatctgagcattgatttagactactgcaccctagtgggtgctagatccttggggctaaggctctgttggatttgtacctcagaggaagacaagtggctggtcttctgggactcttcttctcaccagagggagaaatgccggcagcaactgcaagaagcccagtccttcggtgcccacagcccagagcacacactgctgtgctggcccagaagctgggcagaaaggtcaccatgttcttccttacctcagtttacctgcagcccttgctgcagtgcagatgcccaccctgtaccaggtcaggccggcagatgcttcatccatgcctcaaggtctacgccaacatgcttctcacgtctcttcccctccccaccccccttcccaagcactaggcttgttgtttaatggagcccaaccaataatcatgtgtcttcagggttggctcagtgcagttgctaagcaaatcagtcttcaggagaaacggggtggtgtggataaggctggaagaaatggcaggtagtggagagtgttggggtgttcgatggaagacaaaaacatgggccgttctcttcagtctagtacccagtgaactgtccaggtaattgttttgtaaacaatttttctatttatgaaaatgtgtgctttttcttcttactttctaaaaagctgttggttatcagtttcctggctgggcacaggcgtcctgagtccctcggtgaccgctctcagcgtgctcagcctccgtctggatgcaccatactgtctgccctttcccttgtagagttttctctcagacccaggggataactttgggtgtttcttcccccaaatgctctcagacctgtgaccaggaatgactctgtctctggaactcggtttcctacactctgtctttcccttgtgctttggctctgagggtcccctttggctttcgagacttgccgaggtctggtccagttctaaggtactgctgctgtctgaagcagcacccttcactgctttgtgttcacagccacagcccagcatcacctcgggagcagcctgggctgaggagccttccacgtgttgttaacctggctggacaggtgtgggtgtgtggtgtcatctctgcccaggactcagggatctacagcagagtgttagtgttgctgggcacagggtgtggctcagtggcagacagagtgcttgtctagcaagcccaaggccttctgtctggtactgtatctccccagcccccccccccccaaaaaaaaagactgaatatgaggaatgagtactgtgggtaactaagttcttgcctgtccaagctaggtaatatgtgtgttaccatggaagaatggcctacaggagccgtggttagggatttgagtgggcaattgttaagtaataagtagagacagaaaactggattgggaattcagagaaccagcattaacccccttacctcgtcagctggagctcccactgagagtcctgggcagagcacaagtgtcccctcaggtcaggaatccacataagagaacaaagagcagcactaaaaacaacatcatttagttcggtgctcacgacaccccagaaacgagctggggggctgctaccatcggtcggtcagcagggttttctccctctccctctgcaggcgcttgggtagcaaggacaggctgtagcgagccctctgaccttggaaaggtgtctgggaataaattacttcccagctgtttcaagcgatgtattttgactcttggattatcaaagtgttttgtcatttgtcataaagtcagggaaggggcacacatccccagacaaagggccatggaggatacgtttgagacaaacatgttccatagcttcttagcttaactagcccttgacatttattgatacagtgtatattacaacatgaatttcaaaaaataaaaaaattaccacacatatatcaagtaatatctcccccccccccattttcaaatctaaaagttagcttaagagccagcctttgttcaggcttcatgtccaccctggattaagctctcagggctgctgcgcccgactgtgagcggaagctgtcttcccagtgccctgggagcctggagtgttgagcaggaatagtcagtgctctgagatgctggcccggtggccagggtccttctcttaccaaattatgtgtgcctcctctgaggaagaggaaggcatgggtctcctatggccctttagtccctcgtgggtcactacactgacataagtcatattcagagctgatgctggctaggccagaccctaaactaaacccttctaaagctgtccaggccccccctttcctggtccttccttgcatcctgtggattaaatcatctctacaaactaagccactgccacaaatgggctgctgccggcaagtggccctggaagggtgtccctgtcagatttcacctgacattctcaccacgaaaaagcatgttgtgactgaaaagagagatgagctattctccaagaagcaggaagtgactgagcagacaggttattgaggctcctggagagctcaccgccattcttggcctgcgaataaatggttctttgacctcctgtcatatagcagtagagtgtttcctttctgaatcactagggtagtgtgacctgtgacaagtcagactgtgccgatgtgaatccatgaaaagcggcccttgactggacctggggctgtggggcacagctctccagagtcctgggttagaagtatcctggatgcacccatgtcgagagtggtaatgtgctggtttcataagatagttggcgttgttacccgggcagaggttacatttctggttgagcatggtcgtctcggggcgtgcatgtgtgcaccgtgcagggcctgtctggtcaggagcagacttcatggcaggtatgttacctggctctcgtctgagttgctgaaagatgagctgagagcccagtgctaaagaaggaagaaaagaacaagcaaacaaacaaacaaaaaacaggaaacaaacttgactggcatagtttaggactggtcagatttggtcaccagtatgaagtcaactcctcttgtccgcgtgtcctccattaaattacccttctaaaattacccttcctagttagacccgcatgcttcaaggaaatgatgcacctgaggcgttgggaaggcgctcactcccatgcacttttctggggagagttcatggaaggctgcctagagggacacgtgctggcagtacggagcacgacttcttaagagagttgttgagtccgtggctttatgggatattgtatgatgatcagagtcaatcaaacggctcctcacgttcttgtttactaagtaggggagcagttttctgttgaaatttcatgaactcccattttctctgccttaaggtaatgaggacttctcaaatgctggatcaagctcaagcacattaaacattgtcactcaggaagtcactaaaatttccaagtgtctggaagggtctcacccctccctcattgctggtgttttgtgtctccgtgtaataacagaaagctcttctgtgttacatagccatggtgggttggcggatccttctcgtggagtcattgcatgctgactgccaagagcagctgagcgtcggtgccaggcatcagcgtggcacagggaagtccatcaggtcggggacagaaagcgggaggcctcttcctagtctcccgggtccttagcagtgtggagggtccgtgaccgaccgtatgagcagggcgtggagccgtggactttcccagcctgtgctttctgcttgccttacttgaccccggtgggctcaacaaagaagtgggcaccattcccttagccagatgcaaactctactcacccaaggtcggcagtgcaacagagactaccaagcactctgttttcctacccaaaaaaaggggaaatggagagagagcttaggggttttaaagaaactgtgtcctactctgtccattcaaaccaacacctcacttggcgatgaggttaaactctgtggatgtcttagtccacgcgggtttcaccgtgagagtaagatctgtccaacacaataaaattcctcctctcttcttacagctgtctgcttgttcattctctctctctctctctctctctctctctctctctctctgtgtgtgtgtgtgtgtgtgtgtgagtgaagggcagactgatagaagatagtcttacccttcacctctcagaagtcacgaagcctgagaggttgggaggtcccagggtctggccacagtgagtcctacagatcttgggccaacagccaggcccccaactctgggacccgcccccaactgagcctgggtgaccaatgtggtgatgaccttgagaggcagcagagcaaagcctccaagtgtgctgcagacccctcacggggttcctccagaggcctgcaggttctgccctccccttgtctgagctgcacgagtggagctgaacagtttggccgctccaggatcagtgcacacttgagactgatgtgcccttgctgaggtggcagtcaaggcctggtgcctgtggggtggaggagcttagtgggcagcagaagcttctacagggaaatgaagcttaaatacaacctggcaaagaagcgggagctctgtgtcgctgtgtgtttggttttgcttaggggggggactggttgtgtgtgtgtgtgtgtgtgtgtgtgtgtgtgtgtgtgtgtgtgtgtgcatgcacctactcttcaggtgtcctctcctctgtttgagacaagtcttctctgatagaacccagcaaataaactaacgagcaatcccagagatctcccgtctctgactcttaaatttcgcttgttaattccttattgctcttaatgtgtcccacatttatatctttattctcaagttttaattataaatgtatgagtactcaaggctcacagcatgaaagcttgaaatataaatctctcagtgatgatcacaatgagtataccatacctgtcaccttagacatccgagatggttttctagctggaaggtcatctgggcggtgtccaccattaccccaattcagctccagctcagagcttctcaaacctttctcatcctaggctccttctgcctgaagaattgtttttttaaagatttatttatttcatgtatgtttgtgcactatcaccgtcttcgggcacacctgaagagggcatccggtccccattacagagggttgtgagccaccatgtggttgctgggaattgaactcaggacctctggaagaacagtcagtactcttaaccactgagccatctctccagcccctgaagaatttttatgtgtccctgagtatagaaaataggtacacacactagacatttattgatagtaaatcattgtattttaaaacattgtctggtataaacataattttatcatttgtattagttacctttatattgctgggataaatcatgatgaccaggccagcctggtctacagggtgagttccaggacatccagggccacacagagaaaccctgtctcaaaacaaaactaaactaaacaacccacaatgaccgaggcagctttcttttatttgcgcttatggttccagaggagtcagagcctgtcatgagagggaagcatggcagcagcctggagcagaagctgagggctcacattttgagctgcagacaggaaacagaaaactagcaatggggcaagtgaaacccagaaagcctccctcagtgacaggcaggtgctccgacatgaccacacaccctacgactccccacacagcatcgccaactgcagagaaagcaatcaaatgtgtcaggttgtcggtggtgtctcattccaacacccgcattccattccctggcctcccccatagtcttgtgacctcataaaaatgcaaagttcgtgaagttgaacatcaaatgtctcttctgagactcagggcgatgtgtaaaaccgaaaagcaaataacagacttcccccatacagtggtacaggacatatatcactgttctgaaaggaaggagtccgcacagagaacatactgaaccagaaaggaagaccgaagcccagcaggatgaactcagttctctagccccatgtcctgtgtcaaagggcttaggtgcctctgcccctccaggcttgccgtctgcagcatacgtgcatctggtgggctggctccacttcgtgtgtgcagctctcttggacagccatttcacagccccaacatcttccaacatctcatcaagccaccacagcactcatttaagacaaaaagcaaagttgtgtactaataaggcccatgtgctagtttatctagttaaatgttagctaaatatttgatgctatgggctgaaggtagctgtcggtattcacttcacataatgcataatacaaatggtagatgtgttagagccattttcagaaacccctggaaattctattctaattttgtgtgtctctgtctctctctctctctctctctctctctctgtgtgtgtgtgtgtgtgtgtgtgtgtgtgtgtgtgtgtgtgtgtgtgtctgactctcagtacacaatgtggaagtcagtgggctgacggtcctcaccttccactttgagattgggtctcattctccactgtatttgccaggctccattgggagctgctggaaagtctcctgttccccatttccctgtcaatgctggggtaacagatagataccctttgacatctcccttttctgtaatgtggcttatagagatctcaactaggttgtccgtcttgtgcaagaagtactttaaccattgagccagttcccaagccccatcttttctttctgaattttaaaagatgcaacttgagcagcagttttaaaatatttttaagcttgtgtgtatatgtgtgcgttgtgagcctgtgtgagtttatgtgtactgtgtgtataggtacaaccagaggagggtagatcccctgtactgcagttacaagcaattgcaagccccctgatatgagtgctgggtcctttgccagaggaggcactgttaagccaacaaagaaccaacacatccaaccaatacaatacaaagatgggttgatgcatgctgggaaataggggtagacatgtgttaaaggtgcattttctgtacgtaaatcattaagtttcatatgcagtgttcattggctctgttcggtgtcgccagtgcacggttcgattgttgtgtagaactaaggctgcagtgagcagaggccatgtcaccagagacatcctgaattcatcacactggtttgagaatgccttataggagttagctttcctctcagaaattgaactcaagtcattaggcctaacggcagctctgtgatagcttttctttttaacacccatttgattcaaacaggaggctctgactagaggtctgccctctagggttgcctgttaaggtcaaattaatccctcagccacttctctcttgggctcacactccagaccaccgaccatatcacccttgagcctcgtctggacacagaatggcaactaatgtcctgtgtttgctgaaaccattcaaatgatgtcaggttaaacctgcccaccctgcctcacctcctccttcccgtgagcctcagtggagaggtcaccccgtttcctgccgcttagtcagctgttcctcccagaacagtaatacaaaactagattctctgtctctgtgtctccccatcccaccccagactaacctcagagtctctgtcgcccggatggccttaaactcctaatcttgtccccttactcctcaagtgctggaacccagggctccacacatgctaagcaagctctccaccaaccttagttctccccaggacccacacccatcactaatcctggttttgctttttctggggtttccccccacagtgctgggacttgaactcagaacctctgccatgccgagaacatgccctgccatgacctatgcccccagcacactgtctttttagaaacatataaagaaggtcatagccacacactaacacttttctcatcgctgcaacaaatgacaagagccacctaaggttttactttggctcccagttgtgcatccacggtaggcagtgaggttgtgcagacaggagcttgccgcagctagttacattgtagtttggtagagtacgtcatactgagtgcctcttcacatagtgcatcttactctaatcatatttacgcgcaactatatacaggcagaagatggtaaaggtctacctccaaggtctctcaacagacacaatgtgcctccgcgtgtataccccagaaaccggcgcttctcttcttcctactggatacattgggaggaaagttaagtagaaacggtctaatgtgattgtcattaggagtgagaaatctgtactactcttcagagagtacacacagtgcttggaaggcaggggtttgaggaggttctgaggaagccagatccactgtttggagagggatgagtgtgcgcgtagtcagtgcagaaggcagtaggctactgtgcattgtcagaaggggagtgggtctcactcagtccaagtgaagctgggttacttagtctctgtgtgtcctcgtggtaggtctcttccctcagtttcctcagcaactggatcttcaggatactgaagtgcctggatggcaacatcaaattcttctccaatgaatcaaagaaaaaaaatcaaaagggaaatttggaaatactgtggtatatttaaagtgaaaatacaccacgtgaaactcctgaaatgtaactgggaaatgtctagctgttaatggccatgttataaaccaagagggctgtgagcatctgcgtggtagagcataagtctctgaagtcagtcctcagcatggaggagaaagcctcaagttcactgccagctgaatgtcttaatgaaatgcaagagtgtgctaattattaaatgccaaaagggaaggataagtatcaatgaaactgaaattacttcctagaaaatgtcaacaaaattgagaagccctcagtagactgattggagggggggtgacgagggagggagggagggagagggagagagagggagnnnnnnnnnnnnnnnnnnnnnnnnnnnnnnnnnnnnnnnnnnnnnngagagagagagagagagagagaatgaaaatattcaaataatcaaaagtagaaaaagttattactacctattcctcaaagagctatggtagtggatacattgcagtaccggtgaaagccacaagagggcatcagcgcccctgaagccagcgctataaggagtagctctgctactgtgcagtgtagatgctgggaccagaactctagtcctgtggaagttgcagcaagtgctcttcactgagccactctccagcccctgccacctacttttgaaagaactatatacactgacaattgcagggcctgtaaatgtgaaaactatcaaaactgacacaaagagacaaaaataaaatcatgcaggaccaagaacaaaggagattgaaccggtgcttataataatgcaaaaacccacaacaaagtgaatgcctttgcagaagttaattttgtcaacttgattaagaagtatgcaggagggtccatgagttggctcagtgagggacacactgttaggcgagcctgactcctgagtttgatccctggaacccatggaaagatgaaagaccctttcctttatgaaccgcttcataaagctgttctctgatgcccctttccctgcaacacccttgagtctctatatgtgcacatgtgcaaacacacacacacacatgcacacatttttaaaaagcacctagtatgtggtgagttttaatagtctacttgacacaaccaggaatacctgggaggggcttctcaagggattctgggggattacgtagcttacattagccggtgggcatgcttgtgagggagtttcttaattcagtgaactgaggtgggaaggccaccctgaatgtgggggacaactacaaaaatattaatttcagggctgaggtggaggtcctccactgaatgagacagagtgagctcagaacaagcatgggtgaatactctctacccctgccacctcgatgggctgtgacctggggttttgagccaaatcaacattttcttccttaagttgcttttgacagggtgtctttatcacagcaacaggaaaagaaaccaagactcctgggagattagagaagcacagatttccgttcactggtgaatgcagaagttggggcctgttggaggaaggtcactagaggtacatccttggctatatcttcccatgaccccttttgattctcctctgttttttcttggtaagaaacagagaatcagaaagtaaactctgaaattcataattagttgacatgtgttttgtgtgtgggtacgcgtatgtgtgggagtgcattgtctcatggtctgtgtgtcaccaggacaacttgtgggaatcaattctcccctgatatgggctctgggctttaaagtccagttgtcaggctgctgtgtgacagacttttcctggggaggcacaacatatgcacatccacccatcccagaaagggagccaacaacaacaacaacaacaacaacaacggcaaaacccaaagacataaagtacacaccaaagggcatcaactcagagtgacaactggatcagaagaaacacttatggtcctgtaggtgatacagctgtccaggctgatgtcccttctttgccgttactgttgtgtgcacatgtggtgagtgtgtgaacacaggcacgcggtgccacccacgggaggggaagtgtgtggagagcagctgtctgaagcggttctttccttccacggcgacatcagggagcagtcagcttttcattcttgtccaggaagcccttcacctgctgaggatccagctgctcctccttgtaggcgtccaccattgccccctactagaacttagtgtaatgcagacaactaccaaaataataaattagaggtctggagagccagctcagtggtttagagtgctggctaccctcccagaggactagggttcaaatcccagcacccacgtggtggctcaccaccgcctgcaacttcagttccaggggatcaaacaccctctctggcattcgtggacactgcacacaagtagtacacaggcatacctgcaaacagaagattcataacgtaagataagaacttaagaaatcaatttaaaattgaagtgacatttctgtgaggggtagcgtgtgtgtccctgccattcatcccggcatgcatgtgaaggtcagagaacagcttgccaaagctggctctttagcttctttatgtggctctcaggaattgaactcagggttgtcagacctggtagcaagtactggctgagccctgtcacaaactcacatagacagacagacagacagacaaacaaacaaacaaacaagctcctatttgtcttgagttctgtgtgaggctatctttccctgatatctccttatccccactcccactcagctcactgagccctaaagtgtgtccccaaggcccctcctaaggtccatgtctcctactggtacttagagatgtctccatcgtttccatggtcccagcccactgcctcagtgcagctggcagcttccagcatcctactgaccacggaccacaaggcaagggcggaccacatctgcggccaggcatggtctcacccagcattgttttttgccaggttaccttggagtctgtctggcctgctcctcatttcacagtgggttctaccctctgggttttattgctgattgcagatcaccctggcagccactgaggcccagagggcacttctttcctccccagccccaggtcttttgcagtctccatttggctgactgctacctctatgggtcgatttggctccgctctgtctggaagtattcttgttcagagatccttcatgcgtcaggtatcttagttctctttcagctatgcccaagctttctcccgcacctaatgcaacaatgttattagcttatcagtgttcactaagtacagtggaccaaactacttaacatatgagcctggtcgctttctgggtcctaaagcctgacattttctgagatactagatagtgacagtgagagtggggtacccggctcccatccctagtgggactcgccctttccccagcacatataaaaagcaatatttgtgttcaggactgggtgcatacctgtggctaggccatccctgttggagaagcgggaatcacacaggcagacagctatggtgcaactccctgcctcaccatgctagaactagcaaaggaaattcactcgagattctttttagacttaagcagtgctgatgggtcctgaagtttagctgagccagtggaagagacaggggcaagtgactgtattgtgggcattgcactgagctgtgctgagtgcccagagcacacagggtcctggcaactagaaacggccttagcctaagtcttaccttggctggatgtggatgctctggcaagggtcctgttaaaatttgacacctgttaaatttgaaggtgctatgcttacacttaacagccccagcagggcagctgcttatagatataaagatgaaggaggcacggcaggagggacttccggcaggaaggaagctgtgtcaaagacagttggctgtctctctctacctttaactatcagattggtaagagaatgggttccaagaaactgacatttctttggctgagccctgctgggagaaggaaaaggctgaggcccggggccagccaaagagttacaattttgcaagactttgcaacagagactgttccccagacagtgataaagggttgggtggacagggacaattgtggctccccatacctcttgctctctatttaaccctaagctttgtgtctggaccacacacacggacatggaagtactgtcacagagcctctttgctcctcttccaatgcatatattgaataaatctcaattttccgggttttttccccctttttcttcagtactcttagtcatttaattgcctccctgagaacacatggccagacctgacatactggggaggctgtcagggtttgagttcagggaaaaagcaggtttgtcaatgtaagttacca

SEQ ID NO: 574 - DNA, 7000 bp, Mus musculus
aatcccagcaaggagccggtttacctttctggctatggagtggaactggcgatcaagagcacggagtacaaggccaaggatgatactcaggtgaaaggaactgaggtaaatgccacggtcatcggggagagcgaccctattgatgaagtgcagggattcctctttggaaaattaagagaactgtaccccgccttggaaggacagctgaaagagttccggaagcaccttgtggagagcaccaacgagatggcccccctgaaagtctggcagctgcaagatctcagcttccagactgctgcccgaatcttggctgcttctggggcattatctctggtggtgatgaaggacattagtcagaactttcctaccaaggccagagcaataacgaaaacggctgtgagcgcgcagcttagagcggaagtggaagagaaccagaagtgggtcaacaacctagaggtcgatagccgatataactcatggccttcaagcttacaggagttactccgccccacgtttcctggcgtcatacggcagatcagaaagaacctgcataacatggttttcattatcgatcctgtacacgagaccacagccgagttgattagcatcgccgagatgttcctcagcaatcacataccgctaaggattggttttatctttgtggtcaatgactctgaagatgttgatgggatgcaagatgctggagtcgctgttctgagagcgtataattatgtggctcaggaagtggatggctatcacgccttccagactctcacacagatctataacaaggtgaggactggagagacagtgaaagtggagcacgtggtcagtgtcttggagaagaagtacccgtacgtggaagtgaatagcattctgggaattgattctgcttacgatcagaatcggaaggaagcaagaggctactatgagcagactggagtaggccccctgcctgttgtcctgttcaatggaatgccctttgaaaaggagcagttagacccggatgagctggaaaccatcacaatgcacaagatcttggagacaaccaccttcttccaaagagctgtgtacttgggtgagctgtcccatgatcaagatgtggtagagtacatcatgaatcagccaaatgttgttccaagaatcaactctaggattctgacagctaagcgagagtatctggacctaacagcaagcaataatttttatgtggatgactttgccagattttctgccttggactctcggggcaagacggctgctattgccaacagtatgaactatctgacgaaaaaagatgattcttttattagaccagtgactttttggattgttggagattttgatagcccttctgggcggcagctactatatgatgccattaaacatcaggcaagtgtctcagatttcattctgggggggggggggattgtggagcgcctgagcacccctgtgctaaaaaccagtaacaatgttaggataagtatgatcaacaatcccagccaagagatcagtgactcaagcacccccatcttcagagccatctgggcagctctgcaaacacaggcctccagctctgctaagaacttcatcaccaagatggccaaagaggagacggcagaggccctggccgcaggagtggacattgcggaattctctgtcgggggcatggatgtcagtctttttaaagaggtctttgagtcttccagaatggatttcattttgtctcatgccctgtactgcagggatgttctgaagctgaagaagggacagcgagtggtgatcagcaacggaaggatcattgggcctctggaggacaatgagctcttcaaccaagatgatttccacctcctggaaaatatcatcctgaaaacatcgggacagaaaataaagtctcatatccaacagcttcgagtagaagaagacgtggccagtgatttggtaatgaaggtggatgctctcctgtcagcacaacccaaaggagaggcgaggatcgagtaccagttctttgaggataaacacagtgcaattaagctgaagcccaaagaaggagagacatactatgatgtggtagccgttgttgaccctgtcacacgagaagcacagaggctcgcccccttgctcttggttttgactcagctgataaacatgaatctaagagtatttatgaattgccaatccaagctttccgacatgcctttaaaaagcttttaccgttacgtcttagagccggagatttctttcactgcagacagcagctttgctaagggaccgatagcaaagtttctggatatgccacagtctccgctgtttactttgaatctgaacacacctgagagttggatggtagaatctgtcagaacaccatatgatctggataatatttatctagaagaggtggacagtatagtggctgctgagtatgagctggaatatctgttactagaaggtcattgttacgacatcaccacaggccagccccctcgaggactacagttcactttaggaacttcagccaacccaacaattgtggacacaattgtgatggccaatctgggatattttcagctcaaagccaatccgggagcctggattctgagactgaggaaggggcgctcagatgacatttataggatctacagccatgatggtacagattcccctcctgatgcaaacgacgttgttgtcatcctcaataacttcaagagcaagatcatcaaagtgaaggttcagaagaaggcagacatggctaatgaagacttgctgagtgatgggacaaatgagaacgagtctggattctgggactcattcaagtggggcttctcaggacagaaggctgaagaagtgaagcaagataaagatgacataatcaatattttctctgttgcatctggtcatctctacgaaagatttcttcgcatcatgatgctctcagtcctgaagaataccaagactcctgtgaagttctggttcttgaagaactacttgtcccccacatttaaggagtttataccttacatggccaaaaaatacaatttccagtatgagcttgttcagtacaaatggccaaggtggcttcaccagcagacggagaagcagcgaatcatctggggctacaagatcctcttcctggacgtgcttttcccgctggttgttgacaagttcctctttgtggatgctgatcagattgtacggacagatctgaaggagttaagagatttcaatttggatggtgcgccttacggttacactcccttctgcgacagcaggagagagatggatggctaccgcttctggaagtcagggtactgggccagtcatttggctggacgaaagtatcacatcagtgcgctgtatgtcgtggatctgaagaagtttaggaaaatagctgctggagacagactcaggggacagtaccaaggtctgagccaggatcccaacagtctttcaaatcttgatcaagatttgcccaataacatgatccatcaggtgccaatcaaatcgctccctcaggaatggctttggtgtgaaacgtggtgtgatgacgcctctaagaagcgggcaaagaccatcgacctgtgtaataatcccatgactaaggagcccaaactggaggctgccgtgcggatcgtccctgagtggcaagactacgaccaggagatcaagcagctgcagaccctcttccaagaggagaaggagctgggaaccctgcatacagaggagacgcaggaaggctctcagaagcatgaggaattatgatctctggaggaagatgggaaacccaccttgacagtttggactaactgctgttttctctgatctttcgatacgactgctgatgaacggattgggcaggtgtaccacacctattgatctgagcattgatttagactactgcaccctagtgggtgctagatccttggggctaaggctctgttggatttgtacctcagaggaagacaagtggctggtcttctgggactcttcttctcaccagagggagaaatgccggcagcaactgcaagaagcccagtccttcggtgcccacagcccagagcacacactgctgtgctggcccagaagctgggcagaaaggtcaccatgttcttccttacctcagtttacctgcagcccttgctgcagtgcagatgcccaccctgtaccaggtcaggccggcagatgcttcatccatgcctcaaggtctacgccaacatgcttctcacgtctcttcccctccccaccccccttcccaagcactaggcttgttgtttaatggagcccaaccaataatcatgtgtcttcagggttggctcagtgcagttgctaagcaaatcagtcttcaggagaaacggggtggtgtggataaggctggaagaaatggcaggtagtggagagtgttggggtgttcgatggaagacaaaaacatgggccgttctcttcagtctagtacccagtgaactgtccaggtaattgttttgtaaacaatttttctatttatgaaaatgtgtgctttttcttcttactttctaaaaagctgttggttatcagtttcctggctgggcacaggcgtcctgagtccctcggtgaccgctctcagcgtgctcagcctccgtctggatgcaccatactgtctgccctttcccttgtagagttttctctcagacccaggggataactttgggtgtttcttcccccaaatgctctcagacctgtgaccaggaatgactctgtctctggaactcggtttcctacactctgtctttcccttgtgctttggctctgagggtcccctttggctttcgagacttgccgaggtctggtccagttctaaggtactgctgctgtctgaagcagcacccttcactgctttgtgttcacagccacagcccagcatcacctcgggagcagcctgggctgaggagccttccacgtgttgttaacctggctggacaggtgtgggtgtgtggtgtcatctctgcccaggactcagggatctacagcagagtgttagtgttgctgggcacagggtgtggctcagtggcagacagagtgcttgtctagcaagcccaaggccttctgtctggtactgtatctccccagcccccccccccccaaaaaaaaagactgaatatgaggaatgagtactgtgggtaactaagttcttgcctgtccaagctaggtaatatgtgtgttaccatggaagaatggcctacaggagccgtggttagggatttgagtgggcaattgttaagtaataagtagagacagaaaactggattgggaattcagagaaccagcattaacccccttacctcgtcagctggagctcccactgagagtcctgggcagagcacaagtgtcccctcaggtcaggaatccacataagagaacaaagagcagcactaaaaacaacatcatttagttcggtgctcacgacaccccagaaacgagctggggggctgctaccatcggtcggtcagcagggttttctccctctccctctgcaggcgcttgggtagcaaggacaggctgtagcgagccctctgaccttggaaaggtgtctgggaataaattacttcccagctgtttcaagcgatgtattttgactcttggattatcaaagtgttttgtcatttgtcataaagtcagggaaggggcacacatccccagacaaagggccatggaggatacgtttgagacaaacatgttccatagcttcttagcttaactagcccttgacatttattgatacagtgtatattacaacatgaatttcaaaaaataaaaaaattaccacacatatatcaagtaatatctcccccccccccattttcaaatctaaaagttagcttaagagccagcctttgttcaggcttcatgtccaccctggattaagctctcagggctgctgcgcccgactgtgagcggaagctgtcttcccagtgccctgggagcctggagtgttgagcaggaatagtcagtgctctgagatgctggcccggtggccagggtccttctcttaccaaattatgtgtgcctcctctgaggaagaggaaggcatgggtctcctatggccctttagtccctcgtgggtcactacactgacataagtcatattcagagctgatgctggctaggccagaccctaaactaaacccttctaaagctgtccaggccccccctttcctggtccttccttgcatcctgtggattaaatcatctctacaaactaagccactgccacaaatgggctgctgccggcaagtggccctggaagggtgtccctgtcagatttcacctgacattctcaccacgaaaaagcatgttgtgactgaaaagagagatgagctattctccaagaagcaggaagtgactgagcagacaggttattgaggctcctggagagctcaccgccattcttggcctgcgaataaatggttctttgacctcctgtcatatagcagtagagtgtttcctttctgaatcactagggtagtgtgacctgtgacaagtcagactgtgccgatgtgaatccatgaaaagcggcccttgactggacctggggctgtggggcacagctctccagagtcctgggttagaagtatcctggatgcacccatgtcgagagtggtaatgtgctggtttcataagatagttggcgttgttacccgggcagaggttacatttctggttgagcatggtcgtctcggggcgtgcatgtgtgcaccgtgcagggcctgtctggtcaggagcagacttcatggcaggtatgttacctggctctcgtctgagttgctgaaagatgagctgagagcccagtgctaaagaaggaagaaaagaacaagcaaacaaacaaacaaaaaacaggaaacaaacttgactggcatagtttaggactggtcagatttggtcaccagtatgaagtcaactcctcttgtccgcgtgtcctccattaaattacccttctaaaattacccttcctagttagacccgcatgctt

SEQ ID NO: 575 - protein, 1242 aa, Mus musculus
NPSKEPVYLSGYGVELAIKSTEYKAKDDTQVKGTEVNATVIGESDPIDEVQGFLFGKLRELYPALEGQLKEFRKHLVESTNEMAPLKVWQLQDLSFQTAARILAASGALSLVVMKDISQNFPTKARAITKTAVSAQLRAEVEENQKWVNNLEVDSRYNSWPSSLQELLRPTFPGVIRQIRKNLHNMVFIIDPVHETTAELISIAEMFLSNHIPLRIGFIFVVNDSEDVDGMQDAGVAVLRAYNYVAQEVDGYHAFQTLTQIYNKVRTGETVKVEHVVSVLEKKYPYVEVNSILGIDSAYDQNRKERYYEQTGVGPLPVVLFNGMPFEKEQLDPDELETITMHKITTTFFQRAVYLGELSHDQDVVEYIMNQPNVVPRINSRILTAKREYLDLTNNFYVDDFARFSALDSRGKTAAIANSMNYLTKKDDSFIRPVTFWIVGDFDSPSGRQLLYDAIKHQASVSDFILGGGGIVERLSTPVLKTSNNVRISMINNPSQEISDSSTPIFRAIWAALQTQASSSAKNFITKMAKEETAEAAGVDIAEFSVGGMDVSLFKEVFESSRMDFILSHALYCRDVLKLKKGQRVVISNGRIIGPLEDNELFNQDDFHLLENIILKTSGQKIKSHIQQLRVEEDVASDLVMKVDALLSAQPKGEARIEYQFFEDKHSAIKLKPKEGETYYDVVAVVDPVTREAQRLAPLLLVLTQLINMNLRVFMNCQSKLSDMPLKSFYRYVLEPEISFTADSSFAKGPIAKFLDMPQSPLFTLNLNTPESWMVESVRTPYDLDNIYLEEVDSIVAAEYELEYLLLEGHCYDITTGQPPRGLQFTLGTSANPTIVDTIVMANLGYFQLKANPGAWILRLRKGRSDDIYRIYSHDGTDSPPDANDVVVILNNFKSKIIKVKVQKKADMANEDLLSDGTNENESGFWDSFKWGFSGQKAEEVKQDKDDIINIFSVASGHLYERFLRIMMLSVLKNTKTPVKFWFLKNYLSPTFKEFIPYMAKKYNFQYELVQYKWPRWLHQQTEKQRIIWGYKILFLDVLFPLVVDKFLFVDADQIVRTDLKELRDFNLDGAPYGYTPFCDSRREMDGYRFWKSGYWASHLAGRKYHALYVVDLKKFRKIAAGDRLRGQYQGLSQDPNSLSNLDQDLPNNMIHQVPIKSLPQEWLWCETWCDDASKKRAKTIDLCNNPMTKEPKLEAAVRIVPEWQDYDQEIKQLQTLFQEEKELGTLHTEETQEGSQKHEEL

SEQ ID NO: 576 - DNA, 106130 bp, Homo sapiens
  misc_feature (1)...(106130): n = A,T,C or G
nnnnnnnnnnnnnnnnnnnnnnnnnnnnnnnnnnnnnnnnnnnnnnnnnnnnnnnnnnnnnnnnnnnnnnnnnnnnnnnnnnnnnnnnnnnnnnnnnnnnnnnnnnnnnnnnnnnnnnnnnnnnnnnnnnnnnnnnnnnnnnnnnnnnnnnnnnnnnnnnnnnnnnnnnnnnnnnnnnnnnnnnnnnnnnnnnnnnnnnnnnnnnnnnnnnnnnnnnnnnnnnnnnnnnnnnnnnnnnnnnnnnnnnnnnnnnnnnnnnnnnnnnnnnnnnnnnnnnnnnnnnnnnnnnnnnnnnnnnnnnnnnnnnnnnnnnnnnnnnnnnnnnnnnnnnnnnnnnnnnnnnnnnnnnnnnnnnnnnnnnnnnnnnnnnnnnnnnnnnnnnnnnnnnnnnnnnnnnnnnnnnnnnnnnnnnnnnnnnnnnnnnnnnnnnnnnnnnnnnnnnnnnnnnnnnnnnnnnnnnnnnnnnnnnnnnnnnnnnnnnnnnnnnnnnnnnnnnnnnnnnnnnnnnnnnnnnnnnnnnnnnnnnnnnnnnnnnnnnnnnnnnnnnnnnnnnnnnnnnnnnnnnnnnnnnnnnnnnnnnnnnnnnnnnnnnnnnnnnnnnnnnnnnnnnnnnnnnnnnnnnnnnnnnnnnnnnnnnnnnnnnnnnnnnnnnnnnnnnnnnnnnnnnnnnnnnnnnnnnnnnnnnnnnnnnnnnnnnnnnnnnnnnnnnnnnnnnnnnnnnnnnnnnnnnnnnnnnnnnnnnnnnnnnnnnnnnnnnnnnnnnnnnnnnnnnnnnnnnnnnnnnnnnnnnnnnnnnnnnnnnnnnnnnnnnnnnnnnnnnnnnnnnnnnnnnnnnnnnnnnnnnnnnnnnnnnnnnnnnnnnnnnnnnnnnnnnnnnnnnnnnnnnnnnnnnnnnnnnnnnnnnnnnnnnnnnnnnnnnnnnnnnnnnnnnnnnnnnnnnnnnnnnnnnnnnnnnnnnnnnnnnnnnnnnnnnnnnnnnnnnnnnnnnnnnnnnnnnnnnnnnnnnnnnnnnnnnnnnnnnnnnnnnnnnnnnnnnnnnnnnnnnnnnnnnnnnnnnnnnnnnnnnnnnnnnnnnnnnnnnnnnnnnnnnnnnnnnnnnnnnnnnnnnnnnnnnnnnnnnnnnnnnnnnnnnnnnnnnnnnnnnnnnnnnnnnnnnnnnnnnnnnnnnnnnnnnnnnnnnnnnnnnnnnnnnnnnnnnnnnnnnnnnnnnnnnnnnnnnnnnnnnnnnnnnnnnnnnnnnnnnnnnnnnnnnnnnnnnnnnnnnnnnnnnnnnnnnnnnnnnnnnnnnnnnnnnnnnnnnnnnnnnnnnnnnnnnnnnnnnnnnnnnnnnnnnnnnnnnnnnnnnnnnnnnnnnnnnnnnnnnnnnnnnnnnnnnnnnnnnnnnnnnnnnnnnnnnnnnnnnnnnnnnnnnnnnnnnnnnnnnnnnnnnnnnnnnnnnnnnnnnnnnnnnnnnnnnnnnnnnnnnnnnnnnnnnnnnnnnnnnnnnnnnnnnnnnnnnnnnnnnnnnnnnnnnnnnnnnnnnnnnnnnnnnnnnnnnnnnnnnnnnnnnnnnnnnnnnnnnnnnnnnnnnnnnnnnnnnnnnnnnnnnnnnnnnnnnnnnnnnnnnnnnnnnnnnnnnnnnnnnnnnnnnnnnnnnnnnnnnnnnnnnnnnnnnnnnnnnnnnnnnnnnnnnnnnnnnnnnnnnnnnnnnnnnnnnnnnnnnnnnnnnnnnnnnnnnnnnnnnnnnnnnnnnnnnnnnnnnnnnnnnnnnnnnnnnnnnnnnnnnnnnnnnnnnnnnnnnnnnnnnnnnnnnnnnnnnnnnnnnnnnnnnnnnnnnnnnnnnnnnnnnnnnnnnnnnnnnnnnnnnnnnnnnnnnnnnnnnnnnnnnnnnnnnnnnnnnnnnnnnnnnnnnnnnnnnnnnnnnnnnnnnnnnnnnnnnnnnnnnnnnnnnnnnnnnnnnnnnnnnnnnnnnnnnnnnnnnnnnnnnnnnnnnnnnnnnnnnnnnnnnnnnnnnnnnnnnnnnnnnnnnnnnnnnnnnnnnnnnnnnnnnnnnnnnnnnnnnnnnnnnnnnnnnnnnnnnnnnnnnnnnnnnnnnnnnnnnnnnnnnnnnnnnnnnnnnnnnnnnnnnnnnnnnnnnnnnnnnnnnnnnnnnnnnnnnnnnnnnnnnnnnnnnnnnnnnnnnnnnnnnnnnnnnnnnnnnnnnnnnnnnnnnnnnnnnnnnnnnnnnnnnnnnnnnnnnnnnnnnnnnnnnnnnnnnnnnnnnnnnnnnnnnnnnnnnnnnnnnnnnnnnnnnnnnnnnnnnnnnnnnnnnnnnnnnnnnnnnnnnnnnnnnnnnnnnnnnnnnnnnnnnnnnnnnnnnnnnnnnnnnnnnnnnnnnnnnnnnnnnnnnnnnnnnnnnnnnnnnnnnnnnnnnnnnnnnnnnnnnnnnnnnnnnnnnnnnnnnnnnnnnnnnnnnnnnnnnnnnnnnnnnnnnnnnnnnnnnnnnnnnnnnnnnnnnnnnnnnnnnnnnnnnnnnnnnnnnnnnnnnnnnnnnnnnnnnnnnnnnnnnnnnnnnnnnnnnnnnnnnnnnnnnnnnnnnnnnnnnnnnnnnnnnnnnnnnnnnnnnnnnnnnnnnnnnnnnnnnnnnnnnnnnnnnnnnnnnnnnnnnnnnnnnnnnnnnnnnnnnnnnnnnnnnnnnnnnnnnnnnnnnnnnnnnnnnnnnnnnnnnnnnnnnnnnnnnnnnnnnnnnnnnnnnnnnnnnnnnnnnnnnnnnnnnnnnnnnnnnnnnnnnnnnnnnnnnnnnnnnnnnnnnnnnnnnnnnnnnnnnnnnnnnnnnnnnnnnnnnnnnnnnnnnnnnnnnnnnnnnnnnnnnnnnnnnnnnnnnnnnnnnnnnnnnnnnnnnnnnnnnnnnnnnnnnnnnnnnnnnnnnnnnnnnnnnnnnnnnnnnnnnnnnnnnnnnnnnnnnnnnnnnnnnnnnnnnnnnnnnnnnnnnnnnnnnnnnnnnnnnnnnnnnnnnnnnnnnnnnnnnnnnnnnnnnnnnnnnnnnnnnnnnnnnnnnnnnnnnnnnnnnnnnnnnnnnnnnnnnnnnnnnnnnnnnnnnnnnnnnnnnnnnnnnnnnnnnnnnnnnnnnnnnnnnnnnnnnnnnnnnnnnnnnnnnnnnnnnnnnnnnnnnnnnnnnnnnnnnnnnnnnnnnnnnnnnnnnnnnnnnnnnnnnnnnnnnnnnnnnnnnnnnnnnnnnnnnnnnnnnnnnnnnnnnnnnnnnnnnnnnnnnnnnnnnnnnnnnnnnnnnnnnnnnnnnnnnnnnnnnnnnnnnnnnnnnnnnnnnnnnnnnnnnnnnnnnnnnnnnnnnnnnnnnnnnnnnnnnnnnnnnnnnnnnnnnnnnnnnnnnnnnnnnnnnnnnnnnnnnnnnnnnnnnnnnnnnnnnnnnnnnnnnnnnnnnnnnnnnnnnnnnnnnnnnnnnnnnnnnnnnnnnnnnnnnnnnnnnnnnnnnnnnnnnnnnnnnnnnnnnnnnnnnnnnnnnnnnnnnnnnnnnnnnnnnnnnnnnnnnnnnnnnnnnnnnnnnnnnnnnnnnnnnnnnnnnnnnnnnnnnnnnnnnnnnnnnnnnnnnnnnnnnnnnnnnnnnnnnnnnnnnnnnnnnnnnnnnnnnnnnnnnnnnnnnnnnnnnnnnnnnnnnnnnnnnnnnnnnnnnnnnnnnnnnnnnnnnnnnnnnnnnnnnnnnnnnnnnnnnnnnnnnnnnnnnnnnnnnnnnnnnnnnnnnnnnnnnnnnnnnnnnnnnnnnnnnnnnnnnnnnnnnnnnnnnnnnnnnnnnnnnnnnnnnnnnnnnnnnnnnnnnnnnnnnnnnnnnnnnnnnnnnnnnnnnnnnnnnnnnnnnnnnnnnnnnnnnnnnnnnnnnnnnnnnnnnnnnnnnnnnnnnnnnnnnnnnnnnnnnnnnnnnnnnnnnnnnnnnnnnnnnnnnnnnnnnnnnnnnnnnnnnnnnnnnnnnnnnnnnnnnnnnnnnnnnnnnnnnnnnnnnnnnnnnnnnnnnnnnnnnnnnnnnnnnnnnnnnnnnnnnnnnnnnnnnnnnnnnnnnnnnnnnnnnnnnnnnnnnnnnnnnnnnnnnnnnnnnnnnnnnnnnnnnnnnnnnnnnnnnnnnnnnnnnnnnnnnnnnnnnnnnnnnnnnnnnnnnnnnnnnnnnnnnnnnnnnnnnnnnnnnnnnnnnnnnnnnnnnnnnnnnnnnnnnnnnnnnnnnnnnnnnnnnnnnnnnnnnnnnnnnnnnnnnnnnnnnnnnnnnnnnnnnnnnnnnnnnnnnnnnnnnnnnnnnnnnnnnnnnnnnnnnnnnnnnnnnnnnnnnnnnnnnnnnnnnnnnnnnnnnnnnnnnnnnnnnnnnnnnnnnnnnnnnnnnnnnnnnnnnnnnnnnnnnnnnnnnnnnnnnnnnnnnnnnnnnnnnnnnnnnnnnnnnnnnnnnnnnnnnnnnnnnnnnnnnnnnnnnnnnnnnnnnnnnnnnnnnnnnnnnnnnnnnnnnnnnnnnnnnnnnnnnnnnnnnnnnnnnnnnnnnnnnnnnnnnnnnnnnnnnnnnnnnnnnnnnnnnnnnnnnnnnnnnnnnnnnnnnnnnnnnnnnnnnnnnnnnnnnnnnnnnnnnnnnnnnnnnnnnnnnnnnnnnnnnnnnnnnnnnnnnnnnnnnnnnnnnnnnnnnnnnnnnnnnnnnnnnnnnnnnnnnnnnnnnnnnnnnnnnnnnnnnnnnnnnnnnnnnnnnnnnnnnnnnnnnnnnnnnnnnnnnnnnnnnnnnnnnnnnnnnnnnnnnnnnnnnnnnnnnnnnnnnnnnnnnnnnnnnnnnnnnnnnnnnnnnnnnnnnnnnnnnnnnnnnnnnnnnnnnnnnnnnnnnnnnnnnnnnnnnnnnnnnnnnnnnnnnnnnnnnnnnnnnnnnnnnnnnnnnnnnnnnnnnnnnnnnnnnnnnnnnnnnnnnnnnnnnnnnnnnnnnnnnnnnnnnnnnnnnnnnnnnnnnnnnnnnnnnnnnnnnnnnnnnnnnnnnnnnnnnnnnnnnnnnnnnnnnnnnnnnnnnnnnnnnnnnnnnnnnnnnnnnnnnnnnnnnnnnnnnnnnnnnnnnnnnnnnnnnnnnnnnnnnnnnnnnnnnnnnnnnnnnnnnnnnnnnnnnnnnnnnnnnnnnnnnnnnnnnnnnnnnnnnnnnnnnnnnnnnnnnnnnnnnnnnnnnnnnnnnnnnnnnnnnnnnnnnnnnnnnnnnnnnnnnnnnnnnnnnnnnnnnnnnnnnnnnnnnnnnnnnnnnnnnnnnnnnnnnnnnnnnnnnnnnnnnnnnnnnnnnnnnnnnnnnnnnnnnnnnnnnnnnnnnnnnnnnnnnnnnnnnnnnnnnnnnnnnnnnnnnnnnnnnnnnnnnnnnnnnnnnnnnnnnnnnnnnnnnnnnnnnnnnnnnnnnnnnnnnnnnnnnnnnnnnnnnnnnnnnnnnnnnnnnnnnnnnnnnnnnnnnnnnnnnnnnnnnnnnnnnnnnnnnnnnnnnnnnnnnnnnnnnnnnnnnnnnnnnnnnnnnnnnnnnnnnnnnnnnnnnnnnnnnnnnnnnnnnnnnnnnnnnnnnnnnnnnnnnnnnnnnnnnnnnnnnnnnnnnnnnnnnnnnnnnnnnnnnnnnnnnnnnnnnnnnnnnnnnnnnnnnnnnnnnnnnnnnnnnnnnnnnnnnnnnnnnnnnnnnnnnnnnnnnnnnnnnnnnnnnnnnnnnnnnnnnnnnnnnnnnnnnnnnnnnnnnnnnnnnnnnnnnnnnnnnnnnnnnnnnnnnnnnnnnnnnnnnnnnnnnnnnnnnnnnnnnnnnnnnnnnnnnnnnnnnnnnnnnnnnnnnnnnnnnnnnnnnnnnnnnnnnnnnnnnnnnnnnnnnnnnnnnnnnnnnnnnnnnnnnnnnnnnnnnnnnnnnnnnnnnnnnnnnnnnnnnnnnnnnnnnnnnnnnnnnnnnnnnnnnnnnnnnnnnnnnnnnnnnnnnnnnnnnnnnnnnnnnnnnnnnnnnnnnnnnnnnnnnnnnnnnnnnnnnnnnnnnnnnnnnnnnnnnnnnnnnnnnnnnnnnnnnnnnnnnnnnnnnnnnnnnnnnnnnnnnnnnnnnnnnnnnnnnnnnnnnnnnnnnnnnnnnnnnnnnnnnnnnnnnnnnnnnnnnnnnnnnnnnnnnnnnnnnnnnnnnnnnnnnnnnnnnnnnnnnnnnnnnnnnnnnnnnnnnnnnnnnnnnnnnnnnnnnnnnnatcttggctcactgcaacctctgcctcccaggttcaagacccattctcattctcctgccttagcctcccaagtagctgggattaccggcgtgtgccagcatgcctggctaatttttatattttcagtagagatggggttttaccatgttggccgccaggctggtctgaactcctgacctcaggtgatctgctctccttggcctcccaaagtgctgggattacaggcgtgagccaccgggcctggccaagatttactatcactttctgaatcattttgtacaattaactgtaacaggtgtttttgtgatattctgtttaacattctttttttgagatggagtttcgctcttgttgcccaggctggagtgcaatggcgtgatctcggctcaccgcaacctctgcctcccaggttcaagcgattctcttgcctcagcctcctgagtagctgggattacaggcatgcaccaccaagtccggctaattttgtatttttttttttttttttttttagtagcgatggagtttctctatgttggtcaggctggtctggaactccccacctcaggtgatccacccatctcggcctcccaaagtgctgggattgcaggtgtgagccaccgcgccaggcctctgtttaacattcttaccctgaattacattttgttactttcacttttatttacactaatttcttgatagttgtacattcttgatcattgtcctagaagattcttacagcataaaactatggacttttgagaaagaatgctaaaattgccagccctaattgctcaatattttcagtttctttgatcactgtgaagtggacagggtatactgttttcttcaccaacttccttatcacagacatctccccctttcatgatatccctggtcatttgccattttgttttatttttattaatttttttccttggcatgtgaagtaagagctacatttgcccttttggtttactatttttaggccccttctcctgtggctatttgtatacagtttcccaaggtaatacgacatgtaggcaactcatagaaatgagctatgcttattagaatccacttagtattcacctccagagctagcagagcccaccattcttccttcttatgtctgtgggagaccctgatgttggatcaaggtactgtgtccatctggttaaggatgaagggtcaaaatattttactacactttatggcatgccaccaccacagatcttttgccttccttgcatctatcccttagggactaaaaatattcctgttgtgtatttttagattggacctgatgtttgtgaaggagttgtagctttgtgattgtctatgaagtgatatttatctttaattgaagtaaaacactaaatatgttttctgcagctgtagctacagaaatattatataaggaggtattattaaaatcaaaaccaataatcatttactgagtgctaaattttgtaatgacccaagaatgtagcatgttagaggtataaattaaataggcatgaatttatattccagcttttccattgactaactctatgtccctaagaaagtcagtagcatctctgaatggcagcttctttatttgaaaaacggttatatctgagggtggctgtgtgggtttgcggacacgagtaaatatgccaagcttagtgactgtaacatcgtagagcctccttaaatattagtttcttccctcctagttccacatagaaggaagaccaatgctgatctcccgcaatagctttggaaatctaagaaaacaagttgtcacctgatttgtactatcttgtgggcattcattctggttgtttgtagttttttttgtgttgtagattaaaaacttgtcctggattatggcatttcaaaacatttatatatggagagaatggtataatgtactctctctgtacccatcatcctgttttaacaattatcaatttaagtacaataaccaccatcaccacccccttctctcctcccgcactagaatattttaaagcaaatcccagacatcatatagtttgtaaaatcataattttttttttttttgggatggagtttcactcttgttgcccaggctggagtgcaatggcacgatcttggctcactgcaacctccacctcctgggttcaagcgattctcctgcctcagcctcctgagtagctgagactacaggcgcccgccaccaccctcgactaattttttgtatttttagtagagatggggtttcaccatgttggccaggctggtctggaactactgacctcaggtggtccacccacctcagcctcccaaagtgctgggattacaggcgtgagccacggcgcctggcctgtaaaatcataatttatgctcagtggaataagtattatataagaagctaaaaaaacaaaaagcaacaaaaatatgctgtaaaaaaaggcagcatttctttaataatatcttgtattgttattctctcctctgggttgtttcagtggatctagtaagtaatattaggacttttccaagtttagaccttgtaagaccttatgtatgcagtggggtgaaaagaatgtatgtttcaagaagtttccctgtaattgtatgaaaagcatgtatttattcgtgtgtggcctttactgggagagtcttagtctgattgaatcttagttctcaccacactggtgagtgtgtcaccttgcccctctctgcttatcttgtgaatgtgcctttaattaattaatttagtgtttatttgcacatcctgatgtatctgtcttaggacttgttttcttagactataagctatgccaagcttggtgtggtgtctatgtcagttactagaaagcctagaaaaatactactttcaaggaggcattgagaaatttaatatattatgataatgggtattttcagaaacctatttttagagaagctgtgcattaccaggaaatgtttcttatttttcccatatttctgtgtctagctgtggagtagagtgagattgtacaccccagtgttcacaagtaatgggaaagtcttcctttggctaggtaagctgagatccagatctgtagtttgctttaagacagtgaaagatcaccactgcattagtattatggctcagaggagaagataagcaattgacatgaatcattcaattactacgtgcatttcctcgtaggggttttagactcttgaatgaagggaaatttagactggccattattttagtaggataaagtcgaaaaaaattaagatggcattaagttcttggatctgattttgttagatcagtgctaattttaaactaagtttggtgatcttgaaaatttggatttaagagtgttaaaagattacaacatgctgcctttattctcagaaatttttctacggttcatattttactgtgggagaactttaggcaaaacatattttttgttctttgtaaggcctttcagaaaataagtaagcagaactagtactagaatcatcagttcctaattcttcttccactactcatagtatttttgtcaatggggtttcataagctttctttatattgagacttcccttttatgtttttattattccaggtttcttaagaaatagctattaagtgaaaaagttcataggctaagttattaataactaataagataggacttgattatcattaaaaatatatatattatacataaaagagtattatatattatagattaaaagtcaaactatggacatttggaaacttcaaaacttatttttactctctttagtaatatagtttatattagaaaattttattaagttgttttatttctgatcttttctcccagtgagtttttagcagaagacagtcaagagaaattttggaattttgtagaagccagtcaaaatattggatcatcagatcatgacggtaaaattgaagcaaatgcttctttgactttggtgtctgggaaaatattaggaaaaaattgtctctttatagtatgtgtggcatggcagttaatggaaaacattgttgtctttaatgactggagttatgatggtggtcaggaagagccaacacaacacaaattattatttttgaagcaatgtatacctttggctataagtggtacctttgtttttttccccttttgtttttgttctatcgtgatcctttattaaagtgctatgtgaatattttgtggaagtacatttcattttaaatcattcagtattaataaccatctaatctgattcactatttttgttatgaactacacaactgagctattatctgttaagttcattatcattaagttagtatcatccagagtgttttccattatgcctgccagccacccacaacttgagtgttaaggtatcaaatgaatgattatcctgtaaaacctcatttgcagtttttatgatgtgctttcacattttttaaacttcgtataagctatatagggtgtaaacattaatagttggagatgctgatatgtgagtagttaaaaccttgaatattaatttacattgacagatataggttattattatttttttttaatttttattttttgagatgaagtcttgctttgtttccaggctggagtgcagtggtacgatctgggctcactgcaacctccatctcccaggttcaatcatttctcctgactcagccttgcaagtagctgggattacaggcattcgccactacgcctggctaatttttgtatttttagtagagatggggtttccccatgttggccaggctggtctcgaacttttgacctcaagtgatccacccgcctcagcctcccaaagtgctgggattacaggcatgagccactgtgcctggccagatataagttcttacagaagaggaaatgtttcaaaattgtgtgactgctgctgatgttaatgggttgttttttttttcttcttttaaaattatttaattattatttttttaatacaatggagatgaggtctcactgtgttgcccaggctggtctcaaacttctgggctcaagtgatnnnnnnnnnnnnnnnnnnnnnnnnnnnnnnnnnnnnnnnnnnnnnnnnnnnnnnnnnnnnnnnnnnnnnnnnnnnnnnnnnnnnnnnnnnnnnnnnnnnnnnnnnnnnnnnnnnnnnnnnnnnnnnnnnnnnnnnnnnnnnnnnnnnnnnnnnnnnnnnnnnnnnnnnnnnnnnnnnnnnnnnnnnnnnnnnnnnnnnnnnnnnnnnnnnnnnnnnnnnnnnnnnnnnnnnnnnnnnnnnnnnnnnnnnnnnnnnnnnnnnnnnnnnnnnnnnnnnnnnnnnnnnnnnnnnnnnnnnnnnnnnnnnnnnnnnnnnnnnnnnnnnnnnnnnnnnnnnnnnnnnnnnnnnnnnnnnnnnnnnnnnnnnnnnnnnnnnnnnnnnnnnnnnnnnnnnnnnnnnnnnnnnnnnnnnnnnnnnnnnnnnnnnnnnnnnnnnnnnnnnnnnnnnnnnnnnnnnnnnnnnnnnnnnnnnnnnnnnnnnnnnnnnnnnnnnnnnnnnnnnnnnnnnnnnnnnnnnnnnnnnnnnnnnnnnnnnnnnnnnnnnnnnnnnnnnnnnnnnnnnnnnnnnnnnnnnnnnnnnnnnnnnnnnnnnnnnnnnnnnnnnnnnnnnnnnnnnnnnnnnnnnnnnnnnnnnnnnnnnnnnnnnnnnnnnnnnnnnnnnnnnnnnnnnnnnnnnnnnnnnnnnnnnnnnnnnnnnnnnnnnnnnnnnnnnnnnnnnnnnnnnnnnnnnnnnnnnnnnnncgatcctccctgccttggcattccaaagtgctgggattacaggcgtgagtgactgcacccaggctagattttactttattttattttattttattttattttattttattttatttattttttcgagacagagtcttactctgttgcccaggctggagtgcagtggcgcgatctcgactcactgcaatctctgccacttgagctcaagctgttctcctgcctcagcctccggagtagctgggattacaggtgcccaccatcgcgcccagctaatttttgtagttttagcagagacggggtttcgccatgctggccacgctggtctcaaactcctgacctcaggcaatccacccacctcagcctcccaaagtgctaggattatgggtgtgagtcaccaagcccggcctagttttgattttagaaacagagtctggctctggaggctggagtgcagtggtgtagttcactataatcttgaactcctgagctcaagcagtgttcctgcttcatcttcctcagtagctggtattacaggtgtgtacaaccaggcctggctaatttttaaattttgtaaagatgggtctagctgtgttgcacatgctggtctcaaactcctggcctcaagacatccctgccctgcctctcgccttggcctcctaaagtgatgggattacaggcgtgggccaccatgcccagcctgaatctttttttttttttttttttggagatatagatatgtaaatattttaaacaagcatctgtaggttttactaatttagaggcaactagaattaagttatcaaaaaatactttatttttaagattttatagaacaaatttatcaaagtgggtttataatcaaatttgaactttgacatttaaaataacattttttcagtaaaaatgataatattaattaaagctataggagtatgaattctatgaacaacataaaagcatgttaaacattttatttgtttgaaatattatttatattcctgccacccaaagattgacaccattaacattctggcatcattttgagatatttcttatctagttttacgtagaggatgctgttgcagtataaaaccttttatattctggctcataaaatgttaatatttatattttgttttttacatggaacattttgttttcattatttacttatttattttttgagacagtctcctcttgctcaggctggagtgcagtggcgtaatctcgctgcaacctctgcctcccggattcaagtgattttcctgcctcagctgggattacaggtgcatgccacctcccgtggctaatttttatatttttaatagagatggggtttcaccatgttggccaggctggtcttgaactcctgacctcgggtgatccacccacctgccccttccaaagtgctgggtttacaggcatgagccaccgtgccctgcctatttctgttttttttaaaaagagatgcactatgttaccaaggctgatctcttgagctcctgggctcaagcaatcctcctgcctcggcctcctaaagttttgggattacaagcaagagccactgtgcttgtcctttaaaatggaaaatttaagttttttgcatggatatatgtgattccgaagtcaaagctgtataaaaggttatacacagagaaatcttgtttcttccttgaccctgttccttctgtttctttcctgctttttataacattttaaattaatttgtttagccttaagtgttttttacagcaaatatatacatatgtattcttatttctcattctttctcctggtttaaaaaaaagttactatgtacattgttttgtgcctttgcttttcatttatcctggggattttttcacattcgtatttggatttttttttctttaaaataatttggtccaactttttgtttaaatgcttcttttcaaactttacaatttcattagtattctttaatactgtgtaacttcctcatgacactgctcagttttgtttagtttttggagtagttaccatatgctaggcatcatggatataaggataaataggtcatagcctcttcctctggggaccagaagtctaagtggggtatagatagacagtgaataaataatttagtaaatgatatgataagtgaaagaggtaaacaaagacgtgttctgggattgaggaagaggtttaactggtccattgaagcatggggtagggattgtggagactttctggagtaggtaatttcacagctgaattatttctgaggaagtatgtagctgtaagtcatccaggtaagtgggaaaatagcggtccaggggagggaatagttcgaaaggtgagaagagaggaagagcccaactgcattttgtactccagggagttttaagcatttgttgagagttcaagacaatatactggtaaaacttgccttcacatacctttgtaaacacagctttgtgcttcatgaactatcttctttagatatctctagtcatacgcaattactttggttaatgttcttccttgacaggtaccgattattcctactatcatgcaatattggaggctgcatttcagtttctgtcacccctccagcagaatttgtttaaattttgtctgtcccttcgttcttactcagctacaatccaagccttccagcaggtgggtccagtgctcttaaagaacagcattttagagtgtatatcatgatgaatggatggaccccagttgtcctggaattgaattacagagctattatcacttttttgcctgaaattttctaggatttatgatttttaaaaaaaataataagcaaaattgatgttaagtcttcaacccacagatttaaaaaaataagaaaaagaatatatagaaaagagacagcaatattttatttatgcattgcagcctgggagatgtaatcttgttaaaccagtgagccagcatctaattacagcctgtagttctaaaagcagttcacaggaaatacaggaggcaagaaatgtttagcatcaccacagggatgcagtcaggaaaatctagaattcaggaatcgttgtagtaaagtaatctagtttcttcagtacataaattatggaaatttctattgtaattgaaaagaaaaagagggacagaggaacctcaagttaagagagacttaagaagagacaaagatgtcttcaccaacttgatatttgatataaaagcaatgctaattttaaaattattttttattataaaataaaacatggaaaaactcctcacaaaaaaatatagtaatggactattataatgtgaacatccttgtaattttcacccaagtcaagaagcaggacttagtctggcaccatggaaagccctccatgtactgtgtcctgattgtggccacctttcacccctgaaaccaaccaccctgttaatttctgttggaatcacttgcttgttactgtattgtattgcccaaaggtacatcttcacacaataaagtgattttttttttcatttttctttattttgtgacacagtctcgccctgtcacccaggctggagtgcagtggcgcaatcacagctcactgcagcctccacctcctgggtttaagtgattctcctacctgagctggggtagcctgctaccacacccagctaatttttgtatttttagtagagacaggatttcgccgtgttggctaggctggtctcgatctcctgaccacaggagatctgcctgcctctgccccgcaaattgctgggattacaggcatgagccactgtggctggcctgtttttgcatttattgattttgtttttttgagacagggtcttgttctgttgcccaggctggagtgtagttctgtgattacggatcactgcagcctcaacttttcaggctcaagcaatcctcctacctcagcctccttagtagctgggactacaggcgtatgccactgtgcctaattttttattttttttattttttgtagagatggggtctcactatgctgcccaggcttaagtggcaggcttaactgcccaggcttgggcttaagtgatgctcccactctggtctcccaaagtgctgggattacaggcacgagctaccacactcagccagtttcaacaatgttgttttgtcataatttaatcacctattttgattatacatgtctttatctcgtctttggttagaaatttaaaaagtatgtgttgtgtcttatgtgacagatagcagctgatgaacctccaccagaaggatgtaattcgtttttttcagtgcatggaaagaagacttgtgaatctgatacccttgaggctcttctactgacagcctctgaaaggtagattatgtgtttctttattttcatgtcatgcatttccagtgctgcttctgcatttggtctaccttctgattttctcatctgttttgtatcattaggtgtaatggtttagagtatggcttctggaaccagactgactatatttgaatctcagctccgtcacttaaaatagttttgtgaaatgtggcaaattactttctttcctaatctcatttcaaaatggagatgatacaagtatttagtattaactgttactgtttagtaatgactgcatctgagcaatgacatagattttgtcattggcttagtaaggaatactgtgtgtattaaagccaatgcctgaaataatgatattaatgataatatctctcaggatattattagtttcagacaaaggaggatatttgaaagataattgcaggcttgatttgaatattaatttggtaactaatgtaccagctttttgcccaaaggtgggtttcctgtggtagacaactctgctatgtatcattttgctgaccggctagggcagcaagccctctgtacctcctctaatgctgttcataaacagaaccgtgatctctccgtggggttggccggccctctcagtactgctaatggcagttaggtggtgtaggtcttctttagtgagattggctgcccagcacccatcctctgcccaccaaatggcattagtgcttcttactcagagtgccgaccaaaaaacagcgtgcgttccagccatctccgggtcaaggcatggacattcagaaatggctgcatggtgatacagtagtgctgtctcttgggggaaacaaaattgatggctttgtaattcttttaaaaaactttaatttgctacaacaataatgcatacctttatgaagaaaagaacaacggtgtctcctctctctgagaggcggtaactgcttttaatggtttggcatatataccttcagacttttttctatggttttaaatttatatatgtaggtagttttatttttataaaaggtatctttcaatttagtacaagtgggtatacctcgttatttttaacacatgcataacctaggtaagactgtcccgtaattggtaatttacctcttaccgatggatttttaagtcatttcctcctgttacaataaggctatatggagcatctgtattcatgtctttactttctgctgagttgtatagtttattataatagagactggtaggtcataaagtctgtgcattaagatctgttaatatcttgatgccatccttagataagtttttttgggagaagttttaaaatttatgaggaaaactgaaatgttaagtccattgggggcacaagcctgtagtcccagcactttggcaggctgaggcaggaggatcacttgatcccaggaattccagaccaaccggtgcaacaaagtgagacgcagtttctccaaaaagtagctgggtgtggtggcagtaaccacgcacacgcctttggtcccagctactcgggaggctgtggtgggaggatcactttagcccaggaggtagagactgcagtgagccctgttcatgccactgcactctagcttgggcaacagagtgagaccctgactccaaaacaaaaacagaaacaaaaacgtccattaggaagatcatagtagtaaaaatagtagaggagatagacttagtagaattggcaagtaatatgctgaatgtcatcctgtgctttttgcattatttatacttacatttttatttatttatttattatttatttatttttgagacggagtctcgctctgtcgcccaggctggagtgcagtggtgccatcttggctcactgcaagctccgcctcccaggttcatgccattctcctgcctcagcctcccaagtacaggcacccaccaccatgcccggctagttttttgtatttttagtagagacggggtttcactgtgttagccaggatagtcttgatctcctgacctcgtgatccgcccgcctcggcctcccaaagtgctgggattacaggcgtgagccaccacgactggcctatacttatagtttcaaataaaaagctaatcatattctatttatatggtagaaaaatatacttggccagccatggtggctcacgcctgtaatcccagaactttgggaggctgaggtgggtggatcgcttgagtcaggagtttgagaccagcctgggcaacatgacaaaacccatgtctacaaaatatacaaaatttagttgggcatgatgtcgtgcacctgtagtccctccttgagctctggaggtcgaggctgcagtgagctgagcgatcacgcgactgtgctctagcctaagtgacagactgaggacttctcaaaatataacataatataacatattatattggccaggcctggtggcttttgcctgtaatgccagcactttggggaagctgaggtgggtggatcacctgaggtcaggagtttgagaccagcctggccaacatgatgaaacactgtctctactaaaaatacaaaaattagccgggtgtggtggtggatgcctgtaatcccagctactgaggaggctgaggcaggagaatcacttgaacccaggagggagagttgcagtgagctgagaccatgtcattgcactgccagcctgagcaacaggaatgaannnnnnnnnnnnnnnnnnnnnnnnnnnnnnnnnnnnnnnnnnnnnnnnnnnnnnnnnnnnnnnnnnnnnnnnnnnnnnnnnnnnnnnnnnnnnnnnnnnnnnnnnnnnnnnnnnnnnnnnnnnnnnnnnnnnnnnnnnnnnnnnnnnnnnnnnnnnnnnnnnnnnnnnnnnnnnnnnnnnnnnnnnnnnnnnnnnnnnnnnnnnnnnnnnnnnnnnnnnnnnnnnnnnnnnnnnnnnnnnnnnnnnnnnnnnnnnnntaatcttaatttgaattttcataactgtactttatattttgtgacatttttagtgtttcacaattatttttaaagttttgagcttttattatttattttcagacccaaacctttattgttcaaaggagatcacagatatccctcgtctaatcctgaaagccctgtggtgattttctactctgagattggctctgaggaattttccaattttcaccgccagcttatatcaaaaagcaatgcaggcaaaatcaactatgtattcagacattatatatttgtaagtattgacttattttacacctgttttgaatgtaatttgcctagcatgactttagaacataagctaataatctccctctttataaaaaaatctagttatttgaatcccttttttgataaatccagtagtttcattgagtctattatttgcacatatgatgtgctttgcttggctttctgaagaaatataaaacatgctaaaaaagtagctcgataaagtttacattttatttcaaaatgaaccatgtaaataatcttttctgattttaatatggtcatcatactatggaactgattgttgaattcagtttcctttccaaccttttttcttctgttttctctttgccacctttttatttggtggaagggggaggattttctaaacaggcgattcataggtagacttgatgtaatattaagcttttaagactctgtgtaatatttagtcatttaaaatatttatatgtaaaggttgttagccctttaaagtttctatgtcataataagctcagtactaagttcatgcaaaaaaaataaaattttatttattgatttatttatttttgagacagagtctcgctctgtcgcccaggctggagcacagtggcgcgatttcagctcactgcaacctccgcctcctgagttcaagtgactctcctgcctcagcctcccgagtagctgggattacaggcactcaccatcatgccggctaattttttgtatttttagtagagagggggtttcaccatgttggccaggctggtctcaaattcctgacctcaggtgatctgaccgcctcagcctcccaaagtgctgggattacaggcgtgagtcactgtgcctggccataaaattttaaatgaaaatttgtacaagcagaaagttttattgaagtccagtttttgattctccctctgcccccttcattgctgttaggatggatgttaatgtctgaagggccatcttcagtcaggatgctggtgagcctgtgacatctggtcactccaagctccgctcgaaggcatttaaatttaataaaaagcatactcccatgggcctcaaaaaacacctctgggactgagacctcaccagctttcaaccctgctttgtaggttctggaacttctttttctctttctccatttcttatggttgggaccatagcactttcagctgtccattcatctggttttgcttctaccttggaattccattcccacagttgtggcagcctacaacatgtaaaggagcctaggattttataaggagagaatatagactctgaattgatttttaaaacatataatcaatattttaatggtagatacgtgcttttattactcttgagtttttggtaggttttggactaaaaaaatttgtttagtgaactttcttagccatatagttaatatcgttaaaaaacaatttaaagatattttgagggcataatccgaggtaatggctagtagatgcaacattaacatggtcatgccatgtacactgtgacatagaaagagctaggtggtaatgatggaattcttgctttacttgcagaatcccaggaaggagcctgtttacctctctggctatggcgtggaattggccattaagagcactgagtacaaggccaaggatgatactcaggtgaaaggtgaatttgtaaaaatgggaccagtgtgctttcttcaaatatgagttaaaggggagtttgtttccatatgaaaaataatagatttaggtgtatgctgaacctgtgtttgcatcctggttctgttacacctgagtgggtgacccttaagcagattctctagatcccagttttctcttgtgtaaagtacaggtaatgatacatgtctcttccagtattggggaggaataaataagatgtgtaaggaaagaattttttcatgtactaaaaaaaaaaaaaaaaaacaaaaaccctcaaaaaaagaacctggcacagtggtttgcccaaaaacgttcagcaagtagtagctattgttgttgatgttataggggatttacaaatagccatttatttgtgactccaacgtgaaatcttaaagtatcctatatttaacaaacaattttatgttgtttattatttctgtacatggaacagtttactgtggatactttctgttgtaatactctagggttttgaatttattattttacctacaagttttaaatgatattttttcatttcttttatgcttattttaaagataaaaaatcaatttgagtagtaaagcagatggaaaataaactactacctcattctattttcttcaataattgtattaggattaagttgactaattataaattcttcagaattttaatattgaaaaattctttgttcatagtgtttgactattaatttcataattgtccataatgtttaaatgtattaattttgaagtttttagcatgtaaaattttcaaagtttaaggaaaaatgcattctttatccaggaacacaggagatattaaaatgcatttatcctgtttgtttaaagaaccattgccaaagggtaattgtgatagtcagcattttaaatggtataatttcaggggtttctgatttttttcacattattcaattttatgaagtttatgagactagtaacgtttttgtttcaaatctgagcaattattaataatatgtattttctattctttcataggaactgaggtaaacaccacagtgattggtgaaaatgatcctattgatgaggttcaggggttcctctttggaaaattaaggtatgtatgttctgtgtattttgggaaacgccctcattttctttaagcctccaggctttcttgcattttaagcatcatcttactcattactgtctgagtttctcatctcctaacagtactttatgtatgcaatcctacgtggaaagtcaaccacttagtttatagtacagtttatgatttcacattattcttttttttttggagacagggtctcgctgtgtcgcccaggttggtgcagtggcgtgatctcaactcactgcaacctccactttccacgttcaagtgattattctgtctcagcctcccaagtagctgggattacaggcatgcgccaccacacccggctaatttttgtatctttagcagagatggtgtttcgccacgttggctaggctggtctcaaactcctggcctcaagtgatccactcgcctcagcctcccaaagtgctgggattacaggcatgagccactgcgtccagcctgaagcacattattcttaattgatagtatggctacctgcccacagtttaagtgcgtttttcttgcctctcagttgatggcattaagttacataccattttttgattgccataagaggagaaattgaattgtttcacttaatattttcccaggaaaaaatgtatttaaaagtttttttcaaacatagtctgagcaaaaatgcgaaatagatatagtaaattttatacatgctcaatgggaaaaacattttattattattttttatttatttatttattttttttgagacagagtcttgctcttttgcccaggctggagtgcagtggtgcaatctcagttcactgcaacctccgtctcctgggttcaagtgattctcctgcctcagccccctgagtagctaggattacaggcacccaccaccatgcctggctaacttttgtatttttagtagagacggggtttcaccatgttggccaggctggtcttgaactcctggcctcaagtggtctgcctgcttcgctctcccagagtgctgggaatacaggcgtgagccatggcccccagctcagaaaaaacattttattagaatttgctttatgtgaaaggaaatggtattttaaaaaattccataattatgtaatcatttaatgaaagcatcatcataacctgttaatgtaagcatcatagtattttatagctggaaagtcttcttaactgttattctttttttttttttttttgagacggagtcttgctctgttgcctaggctggagtgcagtgccacgatcttggctcactgcaagctccgcctcctgggttcacgctattctcctgccttagcctcccaagtagttggaactacaggcatccgccaccacacccggctaattttttgtatttttttttttagtagagatggggtttcactgtgttagccaggatgatcttgatctcctgacctcctggtccgcccgccttggcctcccaaagtgctgggattacaggtgtgagccaccgtgcctggcctggaacgtcttcttagctgttattctaaaagttgaagttatttccctcatggcttgataattgtttagagccctgaattctgctttatctggcagtttttattaggacattttgtgtgtgtgtgtgtgtgtgtgtgtgagagagaaagagagagagagagagcgaaagagagagaaagtgatcaaatagaaatagtatatgctagactcagttttatatacttcagctttgagatttggccaagtgaaataaccagattaacaatttagaagagatatcttagtttacattgaattacatgttgagttcatcctacatatatgtacatttcttctcgtttaacatcagttttgaccttgttagaatgtaatcatattctatttttatttgactcaggctttcagaatccttttctaaaaaaattttttcgagacagggctttgctctgtcactcagactggagagcagtggcacaatcacggctcactgcagccttgacttcctgggctcaagggatcctcctacctcaccctgtcgaatagctgggactacagttgtgtgccaccatgcctggctaattttcaaatgttttgtagagatagagtcttgctatattgcctaggctggtcttgaactttgggttcaagtgattgtcctgccttggcttcccaaagtgttagaattacaggtgtgagctaccactcccagcttcagaatcttttttcacatttgtggtgtttatgtttattttttgggtagcatgatgattttatgcattcacagcacaaaggtattatcaagaatattgaggctgttttaccttttggacattcagaatagttatttagctatccaaagtaattagaccttttttttttgtttgagacaggctcagtctgtcaccaaggctggagtgcagtggcgccatcatggcctgctgcagcctccacctcccgaggctcaggtgatcctctcacttcagtttttgtatttgtggtagagatggggttttgccatgttgcccaggctggtcttgaactcctgggctcaagggatctgcgcaccttggcctcccaaagtgctaggattacaggtgtgagccaccgcgcctggcctcatttttggtatttaagagtttgtataggttgagtgtcttttttctgaaatgcttaaactagaactagagtgtcagatttcaattttggaatatttgcatgatacttaccagttgggcaccccaagtctgaaaatctgaaacctgaaatgcttcaatgaacatttactttgatgtcatgttgacatttaatgagttttggattttggagcattttggatttcagaatttcggatttgggatgctcaggctgtagtaactgacaggaagtgggttggttggacagtgaacagtctgagggaattttaatttctgtatgttgtattaagaaattttgagttagccgggcgcggtagctcacgcctgtaatcccagcactttaggaggctgaggcgggcggatcacgaggtcaggagttcacgccattgcactccagcctgggcaacaagagtgaaactctgtctcaaagaaaaaaaaaaagaaattttgagtttatggcatttaaaagaaaaaagtaatgtactagccgtctgtctgatgtaaatgttatatctctgccccagatcacctctgctttactatagtggaatatgctatatttaaagataaaacccagtaactatggttagcctaaattgtattcatgttactaagagatttatgagcatgtaggctaaaggaaactcattttgggactggcagcagtttttttcccttcagttttactttgagaaattacagtgattcacaaaagcatagagaaaaatttattcccacatacttacaacccagaatagattgctgttgtcatacttgcttttctcttctatagaactatttattaagctttttttttttcccagtataagcctttttttactttaagaacaaaggaaaacaaacaaaaaataaaacaggtcagtaaacactgcaggtatagccgaagtctcctttgttcctttctttctttcattttttctttttttttttaagagacaaggtcttgctgtgttgcacaggctgacctggaactcctgggctcaagtgatcctcctgccttggcctcctcagtggctgggattacaggcgtgagccaccacacctggcctgaaaagtctcctttgttaaccactctcagtctccttatctacctcatagggaatcactattctagcaatttttctataaattttatgagttttaaactagcttctaattttctattttttttaaagaggaataattatacttcattttttccccctatgtcgtagaaaatttcctagggttgggacaggaaaaccatgaagataaagttggtttacttcttcttatgctccgggaaagaaaaaataatgaaaaggactgatttttatgtttcttttagagatctgcaccccgacctggagggacagttgaaagaactcagaaagcatcttgtagagagcaccaatgaaatggcacctttaaaagtttggcagttgcaaggtaatgaaaacagggagaggtcattggcctactttttggctaagttttatggctttaaaaaatgcaaaatttgaatttaattgtatgtagtacgtgattctgaaggtgcctcagattttaaagataagagtgattaattacgattaatcagggaagaaaggaagtccttttgtaaacagataacactaggtagaagtaatatatataaacaaatggcaagtctttctgtgtgaccatacataaacttgtaatacgagaagcaggtcatagtcctaagttcctatatatatacatttcttcaactgtttatctatagagtgtttaagacatgtcattgtggcaggatgtatgtgtttttctctgttccaaagaactatttttcaagtttttttccccaacgtcatttactaaaagtcttcatgctgtattttgtgatgtattgtaaatttagaaaagggaaaaggacttgggcctgatttagcctctgctacatgcgttagtgtgtgccctagtgttttctgcagatatatcagaaacggctcaactgaatactccagagatctttgaagtgaataaaacctgaaattaaatcatgggcactctctggaatggttgcattcgaagacattcttaattaccatgaaaagagtgggaagtaaatttggattttgttttctgcttctcattgcattagattaatccacttttaattatatttgacattgttgcagatctcagtttccagactgctgctcgaatcttggcttctcctgttgagttggctttggttgtcatgaaggatcttagtcagaattttcctaccaaagccaggtaatgtagaataatgctcttctccttaacatcatacccagtcatcgtcatgttcacttgccaaatgaggtaataacaatatgaaaattcctagaaaattaagattcttttttttttttttttttgagatggagtctcactcttgttgcccaggctagagtgcagtggtgcaatctcggcttaccacaacctccgcctcccaggttcaagcgattctcctgcctcagcctcccaagtagctggtactacagacgtgcgtcaccatgcccagctaagtttttgtatttttagtagagacagggtttcactgtgttggccaggctagtcttgaatgcctgacctcaagtgatctgcccgccttggcctcccaaagtgctgagattacaggcgtgagccaccacgcctggcgaaaattaagattctttatgaccaccaccactactattgcagatggtgctctgtgtcttgaagatggcaagaccatgcattgtgtggttgaagtgacagatttaggttatgttcttagcacttccacttattagttgtgtgacctttgcaaataaacaacctcagtttcctcagcagtggaacgagaattaaaatacctgcctttcaggattggatgagtcttgctcatataactaactaatctagagtctgtcccagaccatagtggttttcttcatgaaaggttttacatatgtcatcttattgaatcttgaagaaactgagtcatagaggctaagtgactagttcatagtgacagaataagattttgtttggaccgggcttggtggctcatgcctgtaatcccagcactttgggaggccaaggcctggctaatttttgtatttttagtagagacagggttttgccatgttgatcagactggtnnnnnnnnnnnnnnnnnnnnnnnnnnnnnnnnnnnnnnnnnnnnnnnnnnnnnnnnnnnnnnnnnnnnnnnnncaggagttccagaccagcctggccaacatggtgaaaccgcttttctactgaaaatacaaaaaattagctgggcgtggtggcaggggtctgtaatcccagttactcgggagtctgatgcaggagaatcgcttgaacccgggaggtgaaggttacagtgagccaagatcatgctattgcactccagcctgagcaacaagaacgaaactccgtctaaaaaaaaaaaaaaagattttgtttgtacgttttctgacattgccttcaattctgtaatattgctgcacatctcataaatgcaaggcaaaattgttttaaaagccacatttttagaaactattgacttgaatggttcccagtcattttcttgagtcactgaatgaagtgttttgacttctgatgtgagatattttataactaagtttgtttatttgggacttagacatcatgtagtgaattctcatttagtccagctgctacttgaaggtatacatgaatgattccacctccaccataagtgcttaagtgggaagagcaatctgctgccttggtgtattcaacattatccttttagcctgagagtagtagagatcatatatagaaatggggtgcatatgttttaagaacttggaaacaactgcacctgttttataatgctatagctgctacatttctttgattttgtatcttacaaaaaatatacacatctgagaaaggagaaatatatttatcaattataaaaatttaaggtttttcccattcagttttttctaatttattgaataatgtgtttcatattttaaaatatggaaattgaagactttatatcaaatattaagccaagcactcataatgtttttatttccttagagcaataacaaaaacagctgtgagctcagaacttagaaccgaagtggaagagaatcagaaggtattcaccgatagaaaatactgacctgttttgtattctatctttaaagataaggaaatctgagtttaatcagcagcaattaacagtgtcactcttcttttatctaagatggtgattttttcatttctgtgatctttgcatttttagtttttaatgaaagttcagtatgcacgtaactgaaagcatgaagtggtgctaccgtgttgtttaggaaagcagcacccctaacatgtctcaccccgttcctgaagacattcactttcgacatttagctgattcttctgatatttctctccagaattctagcttacattggtactttatttttcacgttcagacattatatattggcctcctatttaaacagtgtggtttaactttctttcactgcctccccctcagtgtcccaccactattctatattggcactgttcctgtctatccatcttctcaatattggatgttgtggttttacctggttttgatgtggtctgagatggactggttgctctttatgcccagggcatgccggtcatcctgagaccttcctttaacctcctttgttggatcctctgttgcttgattccatgtcttttgtgtttttggtttatttccttgttttggtacagctcatcattctttgtgagaaaagttgcctgggaggcaaatttgaaattctgagaaatcaactttctacttgtttttgtttttgttttggagatggagttttgctctgtcacccaggctggagtgcagtggcgtgatctcagctcactgcaagctccgccttccaggttcacgccattcttcttcctcagcctcccaagtagctgggaccacaggcgcctgctaccactcccggctaatttttttgtatttttagtagagacggggtttcaccgtgttagccaggatagtctcgatctcctgacctcatgatccacccgcctcggcctcccaaagtgctgggattacaggcatgagccaccgcgcccagccaactttctacttgtttttattgatagctcgttatacaatattggcaggttatacaattctaggttggaagtcatttcaaaatttgaaacaaggcatcgcctcttggaattttagtttccattgtggctgttgagaaatctgaagcctttgtatgagatctcttaaggatcttttctttgactctagttatctgaaatttcataattatatgtgtttttaaaaaaatctctgtactgttaggtggttcgtgggcccttaaaatcttgaaaatcatttcctttagctttgggaaattttcttaaattctttgtttgtgtttcttctctctggtttctctttcctcttttcctagaaatatgtatttatttattttttaaatgttgcacctctgactagtttggccttttaaaagtctcttctttcctattcttttctctttttcaaaaaaaaaaacactttctggtaagagtttttaacctgtgtgtatctttcttcctttagttgtcaaatatttaattttcaggggttttttttgttctttttatggtgttcccgtgtatctctgaagataatggtgcttgtgttttctgtctgcaaagtctgtttcctcttaagctgcgtttttgggttttggtcttttcagtggtggaggccttccttaggtgtctggtgatcacactcagagtgaggcactaaggacctggttggaagtcctaatgatgtggctttgtgactgtaaggtgttctgttgtgaccatttcctagggaaccccagttacagtatctttgttccttttcttttgggttggtcagtccttgtcagtctccagaaaaggatccgtcagtcttcttgctggtgggtgaaatctgtttgctagagctgtagaagcacagtagggaagagcgtttggtgacttgccttcgattccccattatgtgtgtggggtccctgtcctccttgtgcttgatttgccattgtccacagatgttctgttttgttcttttccagggaatgagccttcattttgctggagtagggggtagcaccgacctcaggcacctggctgtgggaaatcagttggggggctggggggttttgtcttaaagggctttatatcagaacttagctaataatcaccccttgtacatgtcctgtgtgctgccagttcctgagcctttggtgagttccacagggtgacacaggtttcttgttgacctttcctgttgttggtctaacattcagctttctcagggctgttgggacagtgactcctcacccacctctcttccagcttccaaaatttggtggcctttttctttcctgttctctttgtctttgtggatttataactgaaaaagtagctctagtgacatttcagtagaattcaggagggaaaaaagttcttatgttcaattcactatctttaccccaaatttccttaatctttatatctgagatattagtgaattaagtacatctgagggataaataaatgtttctcaaatgtttactaaattgaaaaaccttattgggagtttttatttactttttagtttccaaagtaaaaatatcaaatattatcttaaatttagggcctttttccccactaaggaagacaaaattatactatattgctgtttcatggagtcttaattttttttgagtaaaacattttattaaagcataaatatatactttttttttttttttttgagatagagtcttgctgtgtcgcccaggctggagtgcagtggcatgatctcagctcactgtaaccttcgcctcccggttcaagtgattctcctgcctcagcctcccgagtagctgggactacaggcgcgtgccaccacgcccagctaatttttttatatttttagtagagacggggtttcaccatgttggccaggatgatctcgatctcctgacctcatgatctgcctgccttggcctcccaaagtggtgggattacaggcatgaaccatcatgcttgaccaaaatgtattttttttttgagacagagtcttgctctgttgcccaggctgaatgcagtggcacgatctaggctcatggcaacctctgcctcccaggtacaagcagttatcctgcctcagcctcctaagtagctagaattataggtacctgccaccacgcccagctaattttttgtaattttagtagagatggggtttcaccatgttggtcaggctggtctcaaactcctgacctcaggtaatccacccgcctcggcctctcaaagtgctgggattacaggcatgagccactgtgccctgcccaaaatgtatatatgaaacacaaagagggaagcacacaaattctcagtcattcgtttgatgaactttcccaaaatgaacccatctatattaccagtgtccagacctagaaatagatctgctattcaccagctcagggtcagtcttttttttttttttttttttgagacagtcttgctctgtcgttcaagctggagtgcagtggtgctatctcggctcactgcatgcagcctctacctcctgggttcgagcggttcttgtgcctcagcctcccaggcagctgggactataggagtacaccaccatagctggttaatttttgtatttttaatagagacggggttttgccacgttgtccaggctggtctccaactcctggcctcaagtgatccacctgccttggcctccccaagtgctgagattacaggtgtgagcctctgtgcctggcctggatcagcctttttttatcgtctgatggtgctgtgcactcagccagcgagtgagtagatgtgaattcctctctctcggaagaaattccagttcacaattgatacacctttccatgatctccttatttttttctcttctttttaaaatcgagaagtaaaaattgcatatttttgtggtgtacaacatgtttcgaaatgtgtatacactgtggtattatcccctgtcttacttgccattgaatcccaacagcatcttgaagcaaatcttagccctgccttaggatgccaagatttgtacaggtagtgaagcccagaaacaataaaattttttttaaaacattctctcacagctccctaataattattaaaatttttcagtatttcaagggaactttaggattacaacctggagattcagccctcttcatcaatggacttcacatggatttagatacacaggatatattcaggtatggataatatttttcattctctgaaaagtttttgtaatgcgtagcaccttgtaacatgttcatattgccgttccttcttgatatggcatgatgcaaagtctgatggcttaccagcccccactgggtggacgtaggtagtaggcacatgccatgatgggtaggcaggatgacatatctccatcttgtgttacagtgtgtgttcaaggcctgagtgttttctgaggctgtccttttagaagctatacttttccacttaaccatgggaacatagaaaagaacaggttctttggcttttggaacagtgtgaagtagatttattaaaaataactgcctctgggcctggcacggtggctcatgcctgaaatcccagcactttgggaggctgaggccggcggatcacttgaggtcaggagttcaagaccagcctggccaacatggtgaaaccccatctctgctaaaaatacaaaaattagccatgcctagtagtgtgtatctgtagtaccaactacttggaaggctgaggcaggaggaccacttgaacctgggaggcggaggttgcagtgagctgagattgcacccctgcactccagcctgggcaacagagtgagaatccatctcaaaaaacaaaaaacaaaaaaaaannnnnnnnnnnnnnnnnnnnnnnnnnnnnnnnnnnnnnnnnnnnnnnnnnnnnnnnnnnnnnnnnnnnnnnnnnnnnnnnnnnnnnnnnnnnnnnnnnnnnnnnnnnnnnnnnnnnnnnnnnnnnnnnnnnnnnnnnnnnnnnnnnnnnnnnnnnnnnnnnnnnnnnnnnnnnnnnnnnnnnnnnnnnnnnnnnnnnnnnnnnnnnnnnnnnnnnnnnnnnnnnnnnnnnnnnnnnnnnnnnnnnnnnnnnnnnnnnnnnnnnnnnnnnnnnnnnnnnnnnnnnnnnnnnnnnnnnnnnnnnnnnnnnnnnnnnnnnnnnnnnnnnnnnnnnnnnnnnnnnnnnnnnnnnnnnnnnnnnnnnnnnnnnnnnnnnnnnnnnnnnnnnnnnnnnnnnnnnnnnnnnnnnnnnnnnnnnnnnnnnnnnnnnnnnnnnnnnnnnnnnnnnnnnnnnnnnnnnnnnnnnnnnnnnnnnnnnnnnnnnnnnnnnnnnnnnnnnnnnnnnnnnnnnnnnnnnnnnnnnnnnnnnnnnnnnnnnnnnnnnnnnnnnnnnnnnnnnnnnnnnnnnnnnnnnnnnnnnnnnnnnnnnnnnnnnnnnnnnnnnnnnnnnnnnnnnnnnnnnnnnnnnnnnnnnnnnnnnnnnnnnnnnnnnnnnnnnnnnnnnnnnnnnnnnnnnnnnnnnnnnnnnnnnnnnnnnnnnnnnnnnnnnnnnnnnnnnnnnnnnnnnnnnnnnnnnnnnnnnnnnnnnnnnnnnnnnnnnnnnnnnnnnnnnnnnnnnnnnnnnnnnnnnnnnnnnnnnnnnnnnnnnnnnnnnnnnnnnnnnnnnnnnnnnnnnnnnnnnnnnnnnnnnnnnnnnnnnnnnnnnnnnnnnnnnnnnnnnnnnnnnnnnnnnnnnnnnnnnnnnnnnnnnnnnnnnnnnnnnnnnnnnnnnnnnnnnnnnnnnnnnnnnnnnnnnnnnnnnnnnnnnnnnnnnnnnnnnnnnnnnnnnnnnnnnnnnnnnnnnnnnnnnnnnnnnnnnnnnnnnnnnnnnnnnnnnnnnnnnnnnnnnnnnnnnnnnnnnnnnnnnnnnnnnnnnnnnnnnnnnnnnnnnnnnnnnnnnnnnnnnnnnnnnnnnnnnnnnnnnnnnnnnnnnnnnnnnnnnnnnnnnnnnnnnnnnnnnnnnnnnnnnnnnnnnnnnnnnnnnnnnnnnnnnnnnnnnnnnnnnnnnnnnnnnnnnnnnnnnnnnnnnnnnnnnnnnnnnnnnnnnnnnnnnnnnnnnnnnnnnnnnnnnnnnnnnnnnnnnnnnnnnnnnnnnnnnnnnnnnnnnnnnnnnnnnnnnnnnnnnnnnnnnnnnnnnnnnnnnnnnnnnnnnnnnnnnnnnnnnnnnnnnnnnnnnnnnnnnnnnnnnnnnnnnnnnnnnnnnnnnnnnnnnnnnnnnnnnnnnnnnnnnnnnnnnnnnnnnnnnnnnnnnnnnnnnnnnnnnnnnnnnnnnnnnnnnnnnnnnnnnnnnnnnnnnnnnnnnnnnnnnnnnnnnnnnnnnnnnnnnnnnnnnnnnnnnnnnnnnnnnnnnnnnnnnnnnnnnnatttttttcacttgacatgcccctggtattcagctgagcatctcttgggaaaaagcgtttagtttgtattttctcaattgcatacagatcttgtgtgatgtcgtgacatctgtaaattaaaactactattgaaaatgtcactttttagctaagaaccttctttagtaggattttgatatttgagatttgaaggatttatatagacttttgcctgccatatgatctttctgagcctttgtcttgtcatctgtcagagaatgtggggaatagggctgggcttggtggctcgtgcctgtaatcccagcactttgggaggccaaggcgggtggatcacctaaggtcaggagattgagaccagcctggccaacatggtgaaaccccgtctgtactcaaaatacaaaaattagccgggtgtggtggcacacacctcctaatcttagctattcgggaggctgaggcaggagaattgcttcaacctgggggtggaggttacaggtagctgagatcacgccactgcgctccagtctgggtgacagagcaagactccgtcacaaaaaaaaaaaaaaaaatagagaatgtggggaatagtgccatcttgggcagttgtggtaaaaaataaggtgagtggagagctgatcttattttttcttggtttctgtactgcattcattttagaaaaattttatttaagagaaataatgtagaatgtagataatcattacttgaattcatacttggtgatataacttattttgatgaagacattgttaatgtcatttgcttttctgttaaaagtacttataaagagtaaaagataataacatcaacatgacatgtttatgcaaacataaagggactaacaaccataggacccatcatcatgcttactaaatgttaacatttaatcattttgtgtcagatttaactgttttcttgggggaagaaacagttttagttgaagcccttctttgtcccttaccaaccacccctctccttcctgaagttcatatcttttctcaagttggtgtgcattcccttgtcccttattttatccttttattttctatcaaatatatttttctttctttcttttgtttttttagagatgagtctcactatgttgcccaggctggactcaaattcctgcggtcaagcaatcctcttgcttcagcttcctgaatagctggaaccataggcatgcaccaccttacctgactcctatttaatattctaaaaatttgaggccaggcacagtggctcacgcctgtaatcccagcactttgggaggccgaggtgggtggatcatttgaggtgaggagttcgcgaccagcctgggcaacatggtgaaaccccatctctactaaaaatacaaaaattagctgggcgtggtggtacacacctgtaatcccagctccttgggaggctgaggcaggagaattgcttgaattcgggaggcagaggttgcagtgagccgagatcaagccactgtactccagcctgggcgacagagtgagactcttgtctcaaaaaaaaaaaaaaaaaaaaaaaattgggataatccagtcaggcgcggtggctcacgccagtaatcccagcactttgggaggccgtggtgggcggatcactttagctcaggagttggagacctgcctggccaacatggtgaaaccctgctggaatgcaggaatgcaatcatagctcaccacagccttaaactcctgtgtttgagaggtcctcctgcctcagcctcctgaacaattgctctttgtggacatgaagttgtttctgatgttttgctgttgtaaacactactttaattaggctcttttttcctctctttttgtgtatacatgtgaatttatttggggtagatatctggaactagagtattgtattgtgttgtgttgtgttgcattgtgttgcattgcgttgtgttgcattgcagtctcgctctcttgccaggctggaagtgcagtggtgtgatctcagctcactgcaacttccgcctcccaggttcaaacgattctcctgcctcagcctcccgagtagctgggactacaggcgcacaccaccatgcccagctaatttttgtatttttaatagagatggggctttcaccatgttggccaggatggtctcaatctcttgatctcatgatactgcccactttggcctcccaaagtgctgggattacaggcgtgagccaccacacccggcagtactgcatttattttagaaaaattagtactaatatagtcttcaactttattagatccagttctctaaagtgtttgtccacataccagcattgcatgagagttctctttgctctatatcttttcctattcttggtcttgacaaactttcactttttctgtctagcgagtatgaaatttcattgaggtcttagctcatagttcctagattacaattgagggtgtacacatttcttatgtttattgcccatttgggtttccgctgtttatttttcatattctttttttttttccgatttttttttacattttcttttttcctttgttcttaaaaagtttagggctgggtgctgtggctcacacctgtaatcccagcactttgggaggccgaggtgggcggatcacttgaggtcaggagttcaagaccagcctggccaacatggcgaaaccccacctctactaaaagtacaaaaattcactgggcgtgttggtgggtgcctgtaattccagctactcggggggctgaggcacgagaatcgtttgaacccaggaggcagaggtttcagtgagccgagattgctccactgcacttcagcctcgtcaatagagagacttcatctcaaaaacaaaaacaaacaaacaaaaaaaatttcgcttctttcttttatttttatgtcttcttcattcttgacgctagtcctttattgggtttgtaggttacaaatgtcttcatctattctgtggcttatcttttagtcactcatttttccactcgatctttttgtcttttttgtttgtttttttgagatagggtcttgctctgttgttcaggctggagtgcagtggcacaatcatggctcattgcagcctcgaaccccttgggctcaggtgatcatcccgcctcagcctcctggagtggctgggacagcagccaccatgcctggctaatttttatatttttttgcagagatgggggtctcataatattgcccaggctggtcttgaactcctgggcgcaagtgatcctcctgccttgtccttccaaagtgctaggattacagatgtgagccactccactgcagccaatctttttatctttgaaaatggtcttgtctcacatgattcttcttaaaatattttaaagtcttattgatattattgcaggttttactaactggttcctaatgtgcatgtatcctgttgtgttattttttgtagtgggtcaacaacctggaggttgatagcagatataattcgtggccttctagtttacaagagttgcttcgacccacctttcctggtgttattcggcagatcaggaaaaacttacataatatggtaagtaaaacttattgtctggctgtgaactctgtttctcccttggcctagtccctctttttttgtcatgtagaatggtcacttctcacctttactagctgcttcctcccccacccttcaccaaatactcttcccctgttcacactggaaaggctttgtagtgtactgaccacttgtggggctgtgggatgtaacaggagcattacagcccccctcagagtgtggggaaatgcttatttttaacacgaaggtttagactattgttttagtcttttaatttgtttttaattttaaaacatttttaattttttaatttttattttttctaatcagcttttccagattgaataagtttccttttcatactcttcacaccattcagtgatgtgtttgtttttattttaagactttatattttttagggcagttttagtttcatagcaatattgttttactagttttaagatagctctttttttacagtatattacagcatattgctactgtttttctttaatatcttaatccctaaaattcagcagtttaatttattcccttaaatatggttgtttgccaactcctacttgttattccttcttgcactgctttagagagagagagagagagggttcttcattggcccactttttccctctcatttctttcccttccctcacacagccgggaaagagatagtggtagggttagtgccaaggttggcctcctcagaacttgcagggaagattaccctctctacttttcttcttgtctgtctcttttcttcccccccactcccgcagaaagagtcttgctctgttgcccaggctggagtgcagtggcaggatctcggctcactgcaacctctgccccctggggttcaagtgattctcctgcctcacctcccagtagtgggaattacaggtgcatgccaccacacctggctgatttttgtatttttagtagagacggggtttcactacattggctgggctggtttcaaactcctgaactcaggtgatccacctgccttggcctcccaaagtgctgggattacaggtgtgagccaccatgcctggccacttttctgtctcttgaaaccacttctttcctttctagtcagaatttaaatctcattctgttttaccacatgtctgaactttattaagcgagagaatacgtctaagttgcttaacacgtaatacgtgtttatatgcttgcctgacagctgtggctgtggtctaagaattaggttctaagtgaattcttaattcagagatcctcagaaatgaatatacaaaaaggcaggctccattttttaaggtgagagagttgctaaacttggttttcatttggtgtagtagaaaaagcggcatcatcactttggagtacagttcccttgttatcagcgtaagtccatgagaaaatcacctagcccttcagtaccaggttttttgaacatagagggaggtagctgctatgtgtgtaattcatcttttatgtggttcaagcgtagctcgaaaaaggttggcttcatgtacagtgactcataacatttttctcggcccacagatacttgaataaatgtcatttcatgtgttcttttccctttcttcaacaggttttcatagttgatcctgcacatgagaccacagcagagttgatgaacacagctgagatgttccttagtaatcatataccactaaggtaacactggtattgatttgatgatgtatctaatttagctgaggttttatttgtcatttttaaatgcaagtctggtgctactgagttgtaggataattaatagtgcacatcactaatggcaattttatcttctggtcagtatgaagccagtgtcttttgggactgagaatttgcttctcaatgaatagaagcttaccaccaatgaattatcaataaatagcccatgtaaaaatagtttctggctgcagcttgcttcccaatggaagggaattttcctaggtgagtgtccacatcacaaaacctatttccactttcagcagagatatagagcattgccaataacttgttagcctgtcaaggactaaacatatacacagccttttgtagatgcaaacagtaacagttacttcacttgtgttgccaaacctgcctacagggtactgagtggctggatttccactgtctttttaagaacagttttttttattttttaaaggttttacatataaatgctaagatattttcacctacattctaaataattctggtaattttacatgttggtgaaattttaattcttagaaaatgtgaaaataaagaagaaaataactctttattcaataaatattactgtgtgttccatgattactactgggctaaatgctgtaaacatgtatgccttattctaccttcttggaaaagatcctctgtatactttcaaaccctttagggagatatatgatcaactgctaggttatgtcctactggttagttataagtgcgttaggatttcagggaaacaaaaaaaatcattgagatatttgggaagccaaaggtttttggagaagttggatttcaaataggctttgaggaaaacagagggttctgatagttggaaatgcagagattttgagtttcatgacatttttcatataaagcatgaatacatctggttagatggaagaacctattactggatcacaaccagagctatgttttgattaaaagagaaatataaggacacagaagaagttgggtcgtggtacacagttggcactaatacaatatttcttgaattgagggacgagaagagggcatgtggtcttctgattgcaaaggcaggtgagaagaaggcacttgaactcctaggcaactgagagattgtgaatagttggagagagccaggcatacaggctgctctttccttctttgtaggagctcatgtggtcctgcatgttggctgctaaatattgatacattattattaattaaactccatagtttacattaagatttgttatttgtgttgatgacacaaatgtatgatgtaaagtattcacattacaatacagtttaatacagattagtttcactgccctaaaaatctcctgtgcttcacttgtttatctcttcctcccttcccctaaatctttggcaactactgatctttttactgtcttcatagttttgcattttccagaacgttctaggttgcagtcatacggcgtgtgcctattcagattggtgtctttcactgagcaatgtgcatttaagcttcctctgtgtcttctagtggcttgatagctcatttcttcttatcactggataatagtcattatgtggatgtccccccatttatttatccattcacttaattgaaagataccttggttgcctacaagttttggcagttatgaataaacctgctataaacatctgggtgcaggtatttgtgtggacatgtctacagcttcttcgggtaaataccgaggagcgtgattgctgcatcgtgtgttaatagtatgcttagttttgtaagagtatgcttagttttgttctaaagtagcggtaccattttgcatttccaccagcaatgaatgagagatcctgttgctccacagccttgccagcatttggttttaccagtatttaggattttggtcattctgataggtgtgtggtggtatgtcattgttgtttaatttgccgttccctaatgacatatgatgttcaggatctacttatatttatcacctatctgtatatcttgtttggtgaagtgtctgttcagattttttgtccttttcttttttcttctttttttccccctgcccttttgtctccatttttaaaactttggttgttttcttattgttgagttttaagagttctttgtaagccaggtgcaatggctcacgcctataatcccaggactttgggaggccaaggtgggaggatcgcttgaggccaggatttgagatcaccatgggcaacatgagaagacctccatctctacagagaactaaaaaagagtagccaggcgtggtggcacacacctgtagtcccagctacttgggaggctgaagtggaggattgtttgagcccagaggtttgaggctgcaatgagctgattgtgccactgcactctggcctcggcaacagagcaaggccctgttgaaaaacaaacaagaagagttgcatattttgtttacctgtcctttatcagatggttgttttgcaaagattttctgccactctatggcttgtcctttcattctgttaatagtatctttcacagggcagacatttttaattttagtgaagtccaaattaaccaagtgttgtctttcatggattgtgcttttggatctaacatcattgccaagctcgagaccacctaaattttcttctctgctatcgtctgggaatttttgtttttgtgttttacatttagacctgtgatccactttgaatgaatttttgtgaaagatataaagtctggtctagactgattaatatgcatgtgcatgtccagttgttcagcaccatttattgaaaagatgattctttgtccattgaaatgcctttgccccagtatgttcagtgcaaagtcttttttgccagcccatctatagatacataatagtatctctgtggttaattcctttattttaaaatttaaaatctgataaactttaaccttggttattgctttttgtcgtgggacagttgtaaaccttttttggcttttcttttaccaataattctcatactgcatgtgctaaatgtcacaatccccccctttctgtttactttgaaagtgtgaaaatttttattctagtttttgtttaaaatcagaaaaaaaaaatctcttaaaactatagcaacgctcttcatgtcagtaaaggaatcttttcatgacgtggaaatggcttgctttaacagtagaaaggcctaagccacgtttgagagcctgcttttttattaatactttgtaagtggccgggcatggtggctcatgcctgtaatcccagcactttgggaggccgaggctgatggatcacctgaggtcaggagttcgacaccagcctggccaacatggtgaaaccccatctctactaaaaatacaaaaaattagccaggggtagtggcgtataatcgcagctacttgggaggctgaggcaggagaatcgcttgaacctgggagacggaggttgcagtgagccgagattgcaccattgcactccaccctgggcaacaagagtgaaactctgtctaaaaaaaaaaaaaacctttgtaagtggtgtatgtatacctttgccaatcatgttagagtagagtaggctgtgaactgtgcttttcactcaaagagttttcctctgttagctataatgtatgagaagggtacaaggatgtcattctttttaaccatttgcattctttgacatgtttctttttttcttttccctttccctccagaattggttttatctttgtggttaatgactctgaagatgttgatgggatgcaagatgctggagtggctgttcttagagcatataattatgttgcccaagaagtggatgattatcatgccttccagactctgacacatgtacgtttttgttcagaatggcaaataattttttcagatctaacttactcttaataacaatgtgtggtcattgtatgctaggcagctggggtgtatagagctcaggggtgggtcctgaatttaaaagtcatgtctgctgcagtgtatagagatggatctgaggaagggcaaagcaaagtggcagggatgccagttgatgagctgttgcagtgatctccatgagaagtaatggggaaggtagttaagcagggctgcggagaatgaaataggttcaaaagaagtcactcagaatagtaagtattttatactttgttattttattcactttatctctgctaaaggtttgcttttgtttgtttgtttgaatatatcttccacaacggctaccttaaaattttatttatttatgtactttttgagaccagatcttgttgtgttgctcaagctggtctcaaactcctaggcttaagggatcctcccatgtcagtcccaaatagctgggattacggccgtgcaccaccatgcccagagaatattttaactctgctttttaaagtttttatttatttatttattcatttattttttattgttataagtacacatgtttgatcgagggggccaaagaagatagagagatggtactgtacacagctggtataggcttggaggccgaatgtcacacagagacagacacagaaacagtccagcactcagcagggaaagctgggcagtattctgaggcttgtaacacttggttggcaggtgacagtcagcaggggatctggcctagggctgaaggggcgcaggcatcctggaggctcccagatctgagatcccgggtggcacctgctgtggcgcctgggttcagctcacatcattcagggacttgcaggcaaacttgggcagtacgaaggcagcactgtacacatctgagcagctgcacctgctccacctgctgccgtgtcacttgttgcatgggcttctggaagttggtgctcgggtttttgctgcagagcatgaaggcaatctggccactgggataggtggggacagtgcagtaggcgtgtgccaccatggagaagagtgactggcagaactaccgtgtctgcttgatgaggtccaggtgcagccactggtactcgccctggcagcagagaatgctgtcctcgttgagggccatcttcatgagtggtaataggattccttgaagaggctctcagcggatcccaggagtcagtgatcataatattgaaggcatcctggttctgcttcacgaaatcaaaatcgtcacccatatgcagggtcagcttagagctagagaagccaatggccatacccggcaggaatttcttagagacctgagtgccatccttttcagtctatcatcggaccacagactccacagaggggtgcttcaccaccttgtgcaggatgccgtctttgtccccgacgatcagcaccttttgtgggatggggtggttgctgaatggcaggttgattctcatctagtaggagaacttgtccctgtccatgcaggggatgatgccatccaacaccagcacactgctgtgggtcttactgtggaaaacaaggatatcctgggagcgtgagcgctggcagtggagcagctgctccatctgtagcaacaaggcttccctgggctcaggctgcagatctcatggaaccagccctcctaaatggcagcgtgaccattgaagccaggctccatgtctcttgggctctgcggcctgagactgcaggctgtgcagagccacagcacaacaggaccagctacacccaccacccactgtttattttattttattaaaaaattttttttagagacaggatctcactgttgcccaggctggattgcagcagcgcagtcagggtttactacagccttgaactcctggccctaagtgatcctcctgcctcagcttcctggaatagctgagactacaggcatgcatcaccatacccagctaattttgttgttgtttttaatttttggtagagatgatgtctcactatgtttcccaggctggtctcgaactcctgagcttaaacaatcttactgccttggcctcccaaagtgctgggattttacgtgtgagccactggggcttggctgctgttttttatttcagaagtgaagtaatactgctcactgtaaaaacacttgaggccaggcgcagtggctcacacctataattccagcactttgggaggccaagggagggagatcacctgaggtcaggagtttgagaccagcctggccaacatggtgaaaccccgtttctactaaaaatacaaaaattggccatgtgtggtggctcatgcctgtaattccagcactttgggtggccgaggtgggtggatcatttgaggtcaggaattcgagaccagcctggccaacatggggaaacctcatctctactaaaaatacaaaaattgggccgggcacggtggctcatgcctgcaatcctagtactttggggaggccgaggcaggtggatcacgagatcaggagatcaagagatcaagaccatcctggctttaacacagtgaaacctgtctctattaaaaattaaaaaaaattaaatgggcgtggtggcaggcgcctgtggtcccagctactcgggaggctgaggcaggagaatggcatgaacctggcaggcagagcttgcaatgagccaagatcgagccactgnnnnnnnnnnnnnnnnnnnnnnnnnnnnnnnnnnnnnnnnnnnnnnnnnnnnnnnnnnnnnnnnnnnnnnnnnnnnnnnnnnnnnnnnnnnnnnnnnnnnnnnnnnnnnnnnnnnnnnnnnnnnnnnnnnnnnnnnnnnnnnnnnnnnnnnnnnnnnnnnnnnnnnnnnnnnnnnnnnnnnnnnnnnnnnnnnnnnnnnnnnnnnnnnnnnnnnnnnnnnnnnnnnnnnnnnnnnnnnnnnnnnnnnnnnnnnnnnnnnnnnnnnnnnnnnnnnnnnnnnnnnnnnnnnnnnnnnnnnnnnnnnnnnnnnnnnnnnnnnnnnnnnnnnnnnnnnnnnnnnnnnnnnnnnnnnnnnnnnnnnnnnnnnnnnnnnnnnnnnnnnnnnnnnnnnnnnnnnnnnnnnnnnnnnnnnnnnnnnnnnnnnnnnnnnnnnnnnnnnnnnnnnnnnnnnnnnnnnnnnnnnnnnnnnnnnnnnnnnnnnnnnnnnnnnnnnnnnnnnnnnnnnnnnnnnnnnnnnnnnnnnnnnnnnnnnnnnnnnnnnnnnnnnnnnnnnnnnnnnnnnnnnnnnnnnnnnnnnnnnnnnnnnnnnnnnnnnnnnnnnnnnnnnnnnnnnnnnnnnnnnnnnnnnnnnnnnnnnnnnnnnnnnnnnnnnnnnnnnnnnnnnnnnnnnnnnnnnnnnnnnnnnnnnnnnnnnnnnnnnnnnnnnnnnnnnnnnnnnnnnnnnnnnnnnnnnnnnnnnnnnnnnnnnnnnnnnnnnnnnnnnnnnnnnnnnnnnnnnnnnnnnnnnnnnnnnnnnnnnnnnnnnnnnnnnnnnnnnnnnnnnnnnnnnnnnnnnnnnnnnnnnnnnnnnnnnnnnnnnnnnnnnnnnnnnnnnnnnnnnnnnnnnnnnnnnnnnnnnnnnnnnnnnnnnnnnnnnnnnnnnnnnnnnnnnnnnnnnnnnnnnnnnnnnnnnnnnnnnnnnnnnnnnnnnnnnnnnnnnnnnnnnnnnnnnnnnnnnnnnnnnnnnnnnnnnnnnnnnnnnnnnnnnnnnnnnnnnnnnnnnnnnnnnnnnnnnnnnnnnnnnnnnnnnnnnnnnnnnnnnnnnnnnnnnnnnnnnnnnnnnnnnnnnnnnnnnnnnnnnnnnnnnnnnnnnnnnnnnnnnnnnnnnnnnnnnnnnnnnnnnnnnnnnnnnnnnnnnnnnnnnnnnnnnnnnnnnnnnnnnnnnnnnnnnnnnnnnnnnnnnnnnnnnnnnnnnnnnnnnnnnnnnnnnnnnnnnnnnnnnnnnnnnnnnnnnnnnnnnnnnnnnnnnnnnnnnnnnnnnnnnnnnnnnnnnnnnnnnnnnnnnnnnnnnnnnnnnnnnnnnnnnnnnnnnnnnnnnnnnnnnnnnnnnnnnnnnnnnnnnnnnnnnnnnnnnnnnnnnnnnnnnnnnnnnnnnnnnnnnnnnnnnnnnnnnnnnnnnnnnnnnnnnnnnnnnnnnnnnnnnnnnnnnnnnnnnnnnnnnnnnnnnnnnnnnnnnnnnnnnnnnnnnnnnnnnnnnnnnnnnnnnnnnnnnnnnnnnnnnnnnnnnnnnnnnnnnnnnnnnnnnnnnnnnnnnnnnnnnnnnnnnnnnnnnnnnnnnnnnnnnnnnnnnnnnnnnnnnnnnnnnnnnnnnnnnnnnnnnnnnnnnnnnnnnnnnnnnnnnnnnnnnnnnnnnnnnnnnnnnnnnnnnnnnnnnnnnnnnnnnnnnnnnnnnnnnnnnnnnnnnnnnnnnnnnnnnnnnnnnnnnnnnnnnnnnnnnnnnnnnnnnnnnnnnnnnnnnnnnnnnnnnnnnnnnnnnnnnnnnnnnnnnnnnnnnnnnnnnnnnnnnnnnnnnnnnnnnnnnnnnnnnnnnnnnnnnnnnnnnnnnnnnnnnnnnnnnnnnnnnnnnnnnnnnnnnnnnnnnnnnnnnnnnnnnnnnnnnnnnnnnnnnnnnnnnnnnnnnnnnnnnnnnnnnnnnnnnnnnnnnnnnnnnnnnnnnnnnnnnnnnnnnnnnnnnnnnnnnnnnnnnnnnnnnnnnnnnnnnnnnnnnnnnnnnnnnnnnnnnnnnnnnnnnnnnnnnnnnnnnnnnnnnnnnnnnnnnnnnnnnnnnnnnnnnnnnnnnnnnnnnnnnnnnnnnnnnnnnnnnnnnnnnnnnnnnnnnnnnnnnnnnnnnnnnnnnnnnnnnnnnnnnnnnnnnnnnnnnnnnnnnnnnnnnnnnnnnnnnnnnnnnnnnnnnnnnnnnnnnnnnnnnnnnnnnnnnnnnnnnnnnnnnnnnnnnnnnnnnnnnnnnnnnnnnnnnnnnnnnnnnnnnnnnnnnnnnnnnnnnnnnnnnnnnnnnnnnnnnnnnnnnnnnnnnnnnnnnnnnnnnnnnnnnnnnnnnnnnnnnnnnnnnnnnnnnnnnnnnnnnnnnnnnnnnnnnnnnnnnnnnnnnnnnnnnnnnnnnnnnnnnnnnnnnnnnnnnnnnnnnnnnnnnnnnnnnnnnnnnnnnnnnnnnnnnnnnnnnnnnnnnnnnnnnnnnnnnnnnnnnnnnnnnnnnnnnnnnnnnnnnnnnnnnnnnnnnnnnnnnnnnnnnnnnnnnnnnnnnnnnnnnnnnnnnnnnnnnnnnnnnnnnnnnnnnnnnnnnnnnnnnnnnnnnnnnnnnnnnnnnnnnnnnnnnnnnnnnnnnnnnnnnnnnnnnnnnnnnnnnnnnnnnnnnnnnnnnnnnnnnnnnnnnnnnnnnnnnnnnnnnnnnnnnnnnnnnnnnnnnnnnnnnnnnnnnnnnnnnnnnnnnnnnnnnnnnnnnnnnnnnnnnnnnnnnnnnnnnnnnnnnnnnnnnnnnnnnnnnnnnnnnnnnnnnnnnnnnnnnnnnnnnnnnnnnnnnnnnnnnnnnnnnnnnnnnnnnnnnnnnnnnnnnnnnnnnnnnnnnnnnnnnnnnnnnnnnnnnnnnnnnnnnnnnnnnnnnnnnnnnnnnnnnnnnnnnnnnnnnnnnnnnnnnnnnnnnnnnnnnnnnnnnnnnnnnnnnnnnnnnnnnnnnnnnnnnnnnnnnnnnnnnatatctatgaaatagtcgagatgtcaaagaacagaattaacatggtaagagttttaggagtgtatatttaaaacatttaaactatgatgtagagaagtggcttgaaccaacctagaaggctttttaggctgtgccatgttttaggctgtcagtttctgtgctgttacctgttattgagcttgtctgattagaaagtaagcagtctgttaccgatgactcggattagttacccaatgggagttcttttctactggtgctatctaaaatggttataaataattaaattctgctattttcagaaaatggcaattacaaggtgtgcgatagacatttgtaaagttgcccactttacatcttgggtggtaatacagtttttactctgaaaagttaatctgagggacaagcacctatgttgacagtcaggaaaaatgtctgtcttaggtacatttgccgttttgttgccccagtattttctggccagtgaacctcttttgtcctggagaagggaaaagattggatgtattgtgtcttagagcaattgttgagcactgtttccccacaaaccttgttttgttttctgcaggtgtaatttctttgttagtgatatggacccttatttagaattgggtgcaaatatttacctcaggctttttgcatagagcgcttataatttatggtagcaaaacctgtgcacctcattttggcagcccatggtcacatgtagattttaaaatggaaattaattaaagatttagttacttggtcatagttggcaggtttcaggtgctcagtagttacatgaggttagtgactactgcattggacagcacagacaagcacagatagaatatttccatcattgcagaaagttctgttgtatagtgctgaccgtagaatatgtagttcagttttgacagcctgtgctacacacacacacaaacacacacacacacacacacacaaacacacgtacacacacacgcacttcataatttgcaagcttttgtggtcttgtaaaaacttgaactcagtaattcaatctcagatttacatagtaggatattaactttgatgtcatttttcatttttttaaaaagaaatatcttgagttattttttctttacaatatttctattgattgttgttagaacaggcatgtaagaaaaatatgctgtgttccatttgtctcacaaaaggcaaaaatatactgtttttgtggttacttgtgtttcaggaagcaagaggctactatgagcagactggagttggacctctgcccgttgtgctgttcaatggaatgccctttgaaagggaacagctagaccctgatgagttagaaaccatcacaatgcataaaatcctggagaccaccaccttcttccaaagagcggtgtacttggtgagtcacgtttcaaggctgattttttaaagagaacagttggcttatattttttgttgcctctatagtaggcagtaaaattcttagtatcactatttgggaggctgaggcgagaggatggtttgagggtaggaagtctgagaccaacctgggcaatatggcaagaccccatttctaaaaaagaaattaaaaaattagctaggcttggtggtgcacgcctgtagtcctagctactcaggaagcttaggtggaaggatcgcttgagcccaggagtttaaggttgcagtgagctgtgattaccccactgtaccccagcctgggtgatggagtgagaccctgtcccgttaaaaaaaacaaaacaaaacaaaaaactattttctgtaagtcacttgtaattggtttgcaaactcttggcaagtcctatgatgaaaatattcataaatcttctatatatggtaatttaaataactagtattattgatttcaggattaaatgtttattttaaaaattgcaggcagttctaagaaacatttattctatttgtagggaattttggctttggagagactcaatattatttttcatttatatataaatattaatatatatagttcttgagatataattcagacagtataaaagtcagccttttgaacggtacaattcagtagtttttattctctacacacagttatgtaactaccacctctaattttcagaacattatcatcacccccaaaagaaaccccacatccagtagcaattactcctctccattttgcccattttgtcctactcccagccaccctgccattggcaaacacaaacctactttctgcttaatagatttgcttgttctggacgttgtatacaaatcaaatttgcagagaacaggatgatattggacagatagcttgttgctcagaaccccaactctctaatcatgtggttggtctttctagtgttaccagcccccaacctgagtcattgcattagcacagactctcgggccccactgtgcatcaacccgtagtataaaccaccatgtgtgtcctaaggggctcaccatgaatgacaaagacactcctatcactggatttagagtttacatcccagaaactagggccagccaaattatttaccacacacagtccttttctcttccctcctctcattctggaaatatgcacatggtggtactctctcatgtcccacagatctctttatgttcctcagactggataatctcagtttatctatcttcaaattcacttattctttcttctgtcaactaaaatctgctattgagcctctctagtgaatgcttcatttcagttattataaatccagatttctatttggttctttttgataatttcctttggtttatagatattatttggtgagatgttggtcttaaactttactttggtagacatggtttcttttagttcttgaatatatttgaaatcatttatttaaattctttttctaattaagtccaatgtttggacttactcagaataatatgaacataatgtaagaatatacattacacattttacttatataatagtaagaatagtatgtcttggcctcttctcttcctgagtatacaccatacttttttctttctgcatgtctttttttttttgtttctgatacagggtctcgctctgtcacccgggttggagtacagtgacatgatcttagctcactgtggcctccaactcctggacttaaatgatcttcccaactcagcctctcgagtagctgggactataggtgcatgccaccatacatggctaatttttgtatctttttgtggagatgagatctttctatgttgcccaggcaggtctcaggtcgcgaactcctgggcccaagtgatctttccgccttggcctcccacagtgctgggattacaggcatgagccaccatttctgcatatttaataattttgtttttgacaactaggaatttgaaataatataatgtgacacttcttcaccgtaccagggtttatgttgttctttgttgttgttgtaactgttatttgtttagtgactttcctgaaccaattctttcttttattttctttcctttttttgagacagagtttcgctctattgcccaggctggagtgcagtggtgccatctcagctcactgcaacctccgcctcctgggttcaagtgattctcctgcctcagcctcccgagtagctgggattacaggagcacaccaccacacccaactaatttttatatttttagtagagatggggttttaccacatcggccaggctctaatttcagaacattggtctcgaactcctgtcctcaagtgatccactcacctcggccttccaaagtgctgtgactacaggcatgtgccaccatgctcggccctgaaccaattccttaacatctgtattctttttcatgtgtggcttctgaagtttcagcttgtttaacttactggtcagctgatgaacgaacagagatttcctttgatgcatgaattcaaaaagtctcccagttttccccaagggtctctgtgttgtgttggggcacactttccacactcaaccaggcagttggcaactctgccttagtcttccatttttgcttgcacagagccccaaggttagaggcaagggtttaagaccttctaagattttccctgggcattcacgtacccctgggcatggtgcttatggtctctcaaattccaagaagtttgtcagagcttttcaaagtcccttatggacatcccattccccagcctttttttttctttgttttttgaccagctttgtgttagcccatgtgttatctgccacctcaggcagctaagatgttaaacaattgcccagttgtgtttgacagatacccccagggaaaaggctgttggcactgagtgaggtctggttcagcccaaataaagagaacccctgagaattctctagtgtcctagttgttttattttggggccattgattttcaaggctttgtgcagctggggagatgtaaatagtagtggggcaaattaattgttacaaaggtcactttccttaccaaaactttttttgagacagggtctctctgtcacccaggctggagtgtagggattgtgatcatagctcactgcagccttgaacttctgggctcaagcagtcctcctgccacagccttccaagtagctgggaccataggtgtatgccaccacatgcagctaatttttgtatgttttgaagagttgggattttgccaggttgcccaggctgttctccaactcttgggctcaagcaatttgtctacctcggcctcccaaagtgctgggattataggcatgagccaccgtgcctggccagtattccattattaaaaataggnnnnnnnnnnnnnnnnnnnnattccattataaaaaataggccgggcgcgatggctcatgcctgtaatcccagcactttgggaggccgaggcgggcggataatgaggtcaggagattgagaccatcctggctaacacggtgaaaccctgtctctactaaaaacacacaaaaaaaattaggccgggcgcggtggctcacttgggaaaccgaggtgggcggatcatgaggtcaggagatcaagatcattctggctaacatggtgaaaccccatctctactaaaaatccaaaaaaaaaaaaaattagctggacatggtggcgggcgcctgtagtcccagctactcaggaggctgaggcaggagaatcgcttgaacctgggaggcagaggttccctctgggaaccaagtgcagccgagattgcgccactgcactccagccagggtgacagagcaagactccgtctcaagaaaaaaaaaaaataataataataattagctgggcgtggtggctcatgcctgtaatcccagctactcgggaggctgaggcaggagaatcgcttgaacgcaggaggccgaggttgcagtgagccaagatcgtgacattgcactccagcctgggcgacaagagtgaaactctgtctcaaaaaatatataagtaaaataaaataaacatttacttcattccctagtattggacattacttctacattttcactagttacagacagtgctacagtgaatattctaatatgtatatacctttgtacattgtcttgaaaaataccaagtactggaaaatttgaactaaatgcactacaaaaagatgtgttatcagccagttgtggtggctgacgcctgtaatacaacacttcgagaggctgaggctggaggattagttgagcccaggagattgagaccagcctggctaacataacgagacctcatctctacaaaataaaaaaaattagccaggcattgtggcatgcacctgtagtctgagctacttcgggagactaaggcaggagggttgcttgaggattgaggctgtagtgggctataatcatgccactgcactctagtctgagcaacagggcatgaccttgtttctttaaaaagaattaagagatatgctatgccagtggtatgaaattcaaaacagaaatgtaaatgaagagaaacttttagccatacacccctgtgctgtactactcatgatttcttcctcaagacaactaccgtgtgtgtgtgtgtgtctgtgtgtgcacgcatgtgtgcatgtgtgtgtatacaagggctggtcagaaggtgttacatttacaattatttattttttttaattaataacttttttttttttttttttttacaaatgtttattatatgtacaacaggcttcaggacaacacttcattccagctataggtggcaaaagatgctatggcagggaatacagatgtttaaatatgaatgaaatcaagggtcaccatctcctcaggcacaaggcacagcttacttgttgccagatttttttttcttttctgtttttgagatggagcctcgctttgtcacccaggctagagttcagtggtgtgatctcggtttactgcaacttctgcatcccagattcaggtgattcacctgcctcaggctcctgagtagctgagattacaggcgcccgccaccatgcccggctaatttttgtatttttagtagagacagggttttgccattttggctaggctggtcttgaactcctgacctcaggttatccacccgcctcagcctcccaaagtgctgggattataggcatgagccattgcacccggcccagatttcttaatttcacctgcagccaggggtcccttccccatagccttctattttagctcctatttttgtttcttctgctcctctttttgtttctgcttgaaagtcttaccttcctcgtccatctccttggcctgcttcttgggctgtttcagcagcaccttcacaggcagacatggcgcctgccacaccttccccaggccctgcaaccctacttttaaaatttttatagactttgccaaattcccctccttgaactcgatgggcttctaattggagtcaagtagatttataatattgaccaaagttgtatacatgggccaacatgtacagtgagccatctaatatctttgtcttttgatttgtatgattggttcatatgctccttattaaatagctacaaataatgtctaattggaattatttagacttgaatgtgtatatttgattcacatcttttatcttgaaaatgacttcaggtcgggcacggtgagagaggatctcttgagcccaggagtttgagactagcctgggcaatgtggtgaaaccccatctctacaaaaatacaaaaattagctgggtgtggtggcacatgcctgtagtcccagctatttgggaggttaaggtaggaagatcgcttgagccctggaggtcaaggctgcagtgagctgtggttttgattatactactacactccagcctgggtgaaagagcaagaccttgtctcaaaggaaaaaaaaagaaaatgactttaaagtatacttgtgtgttaaatattttaagtttgataaatctgcacatttgcacagttgttgacacatggctctgagatcaccttcaagaagtataactatttctgtaatattagctgtgcaaaagggaagaataaatgacaatgatttcctatcctctcattgtaattctgactctggagatgtaagtttatttggatggctgagattgaacaaagatgggagtggtttttattacaaagtatattaactgcttgagagaagaccttttcctattttttttttttccttgggacagagtctcactctgtagcccagtgcagtggcatgatcttggctcactgcaacctctgcctcccaggttcaagtgattctcctgcctcagcttcctgagaagctgggattaccggcacctgccaccatgcccggctacttttgtatttttagtaaagatggcatgttggccaggctggtcttgaactcataacctcaagtgatctgccttcctcagcctcccaaagtgctgggattacaggcatgagccaccattcctggcctgggtttgcatttcataatcactttgcattagctttgtgagtttgagtaagttatttaacctttctgtgccttagcttcctcatctttacaatgaatgtcaacaatatctgcctcacgttgttgatagaggtagagatgctgtaggtgatgtgcccaggtatactcggcagtgacagggaccaataacatagtaacttctgtcttaactattattagcacagaggaagccatttataaagttaataattttttggttcctaatgaattattattgctaaaatttgctttaccctcccccctcaacctcctttttttttcttgcagggtgaactgccccatgatcaagatgtggtagagtatatcatgaatcagccaaatgttgttccacgaatcaattctaggattttgacagctgaacgagactacctggatttaacagcgagtagtaaggagcatttcaggaacaaccttatgctttttttgacttgtgcttcagaatctttacatttttcagattttaatattctgattatcttctgcagtgttcagaagatagcccaagattgtgacaaaattttatgtgtaaactctttgcacctttagttcataatatgagattctaaattcacaagagtttcctcctaaagaagaaaacatcttctgggcaaaaccctgtgaactttgaaaaatatttagtgccatttaaatgccaactaaacagacaatagatgatgagaatggacctggattgttcgcttctctagtcataaagcagttctctttcttcatcctcattctagagtcagtcagccataatgtcaacaaatatctcagtgaattttactctgagaacttaggaaggcctttagcagcttcatcaagatatgatgtatatgccataaaactcaaccttttaaagtatacaattcaatggtttttttaatgaaaaaaaccccacaaagtttgtgcagtcatcaccactgtctaatgatacatcattatcatcaccccccaaaaattccccagaattccatgtacctattagtggtcactctctgttcctcccttcccctatcctctggcaacaactaatctactttctgtgtctatggatttgcctattctagacatttcatataattggaagccttttgtgcctggcttgtttaatttagcatattgttaaggcttatgcatgttgttgtgtatgtcagcatttcattcctttttatagtccactttatggatagtccacatatatctgttcctcagttggtggacagttggcagttttctgctagaataccttataagagccaaatatgttaagcccaggtgcaatttgttccttgtgccttcctcgagattctgaggcctcttcagcaaacacctggaaataagatggaactgtcatcactagcccatgaaatctcactggggaaggaaagatgtgtgtaatgaagtcataaccagctatttattgttatagttgagtataatgaacatatcaatctatttatggttgttaacgtaatgcactatctctaatagacttgaaactgaaagtttgttttaggtagaggaaaaatacatgtatatatacacacacacacacacacacacactcctatacataagcacacacacactgaggaaaaagtgtaaatataggcttatatttgagaaagaaactacccagaaagtgagctttttcttcacagccgggttttcctttcttccctgaagtttcagtagagcaaggtgagcgtgttgtggctcttcatcctaagtgtttattgttttcatcatttttatttaaatttgaagggttgtctctggaatacacatgaataaggaacataatagcggttttgtttttgaatttccttttccattgagtgttgcagcaatgagctatgaaacagtgctagtccacagtggcaaagtgccacctgtcagctgaacatagtgcagacatcaattaggaggctctggcatcctcttgacctggtggtggtggcattgtcactcaggtttctttggctttggctgtcctggaacctttttagtaggatactaatttttaccagcatggtaaaatttttaattttatactaatttttatcggcatggtgtgctctcccttcccccacgtgatatcatggaccgtgtgtgacttattttctacggttttcctggatagtattctatggatagtaggtgttcagtgtgcattgtcaagtgacagtgtagatggatgagcatgtgcacagatgaataaatgagtgggtaggcaggcaagctgtgtctgacagactgtgatgagaagactgacatttgtatagggtgcaataatgtttaagattggggagattgttagagacagagagtttacagtactaggctgtaagaaattactgggtagtttagagcaagagaatgacttgatgaaactggaattctaggaataataatttgagggaaaatgagtaatgaggattgccctttgacactaattggagaagggacatatgcaaaaagagtgaaaatgaccttttatttctgttaagggtttaaaaggtgatattttgttagacctgaaaaataaaaatcagttttcttacgtattttctcttttacccctgcttcctctgtaggaacaggaagagcttactccactggttggactagggaagggagaaatgagttaaggggatctctttgagattgtcctccagttgacaagtgacaggaatgggaataggatgaattcagccattaaactgacacatacttatatgatagctgtgtgagatatgtatgtttccatcaaccttgtgtctttgatgtgtgacttcagtagggataggggccatgttgtgaagttgttcagtaaacatggaacttaatatacttcactcacgcatttctataaatcttatattatgatcaagtcaggttatcagttgaatattaagaatagattgaactggaactaatatatacgtatttcattttttctcccagataacttctttgtggatgattatgctagatttactatcttggattcccaaggcaagactgctgctgtagccaatagtatgaactatctgacaaagaaaggtaatccatttgaggcttattatcttgcattcaacatttttttgaaagtatttgcatattcatcttaatgtgcaaattaagagagaaaagggaaagagacttcataatttttcttatttcttataaagctttgagtctagaacatatctatttaaagtttaattctttgtatatttgttgaaagtatatatttgtttaaaaattcagatgtcttcataaattttgtattacctgttttaccttttgactaaagtcaaaaggaaaaatatttcatagttcaaatggaaaaacatttgtgatgtaaaaatgggttaatgaattaaaaatgactgtacagggttaatattattttggggtttataagataaagttggttttagaaagccttgtataatctttgaagctgattttatgcagaggtatttatttaggctaagattgtgtaaaatgacgccctgtagtggcggacagattctgtcgccctcgggtcagtgcttcagaaaagcactggctgttattttaagtcagctatttttaccgcctttttaaatccccgctgtggtctctccccaagagaagttctggtttctcagctgtatgtaaagtacaagcaattactccatttggttctttaaagaaactgtttcttagggtactgggacagcgccatgacaccgacaggactaagcagcaggaagaaccatagaccgtgttagccattgtttagactttcaatttttacagtaggcattcattccagaaatgatactttttttctactcttttctctttacctttgttcaggaatgtcctccaaggaaatctatggtaacttaaaacttcagaatgttctatttcttaattttcttctttggtttcagtgaccattgtaatttagaatttatcaacacttaattgtactgtttccggaatctgtgggtaacaggaagctatatcaatgtagataattttttttttttttttttttgagacagagtctcattctgtcacccaggctggagtgcagtaccatgatctcggctcactgcaagctccgccttctgggttcaagtgatttcaagtgattctcctgcctcagccttccaagtagctgggattacaggcacccgccaccacgtccagctaacttttttgtatttttagtagggatggggttttaccattttggccaggctggttttgaactcctgacctcaagtgatccaccctcctgaacctcccaaagtgctaggattacaggcgtgagccactgcacccggccaatgtagataaattttgtataaacatttgtaaagaattagtttcagaaaattacaaattagtatgattaaaaatgacaatatgttacccacatgttcaaaggctgtttttcattttacatgctaacagatgcccagaccagtgcattaatcagtagaattaatcagtgcatgttcctagtctgtaactaaactctgtggaagattcccctgctttcctatagtaaaggtttacgactttttcttctatctttattaagcttgtcattttcttctttttgcatggttcttacaaattatttggtcaatttcattttcagaatgttgaaacacagaatgtgcttctctcctctgactcaattagctgtttttgtttttctacagatgattcttttattaggccagtaactttttggattgttggggattttgatagcccttctggacggcagttactgtatgatgccatcaaacatcaggcaagtatctatgacttcattttatatttttgtttgtggctgtagttgtcttcatgggcttcgctgtgcggctaggattgttcagtgggagttgggagtcctgctttcttaatgctcgagggaacggagaattgtatctctagagatctgccagctctcaagaaaagagatctaagactacagtatccaggctttgttgaacgggatagattcttatagagaaaaaaataaatagcgagatcctcatcatagacaagttttattgcatacctgttcatgttcttggagcagagttgctccaacaattgtgttgtgtactgtatcggggagatggggtccttaccacgacagaggtctggacatgggggcagtagcacacaggaatggtagtgtgtgtgtttagtagaagtagatccagatgcactgagggatacacacataggtgttctgaaaagatatgctgccattaatagttgggcttgagtgagtggcaatggcaggtggttgggaagcagctgattcttctggagagtgtcatcgttagaggatgagatgtcaaaattctttttcctgggctgtttcagtttgcatcttcatccatacctcacaaccctcctcatggtcccctttccaccctgtacctgggaaggtttactgaaataaagaaatatccaggtggtttcagttttactcatatgccgagttcctttattgttcaaggagtggaccaaatgctgtggtcaatttgaagttagaacagggcagttctagctaagggcgatagttatatgtgaaaggcactctaacacaaatgcgtaaatcttcaaatggtagtagggtaggagaatggggaaggagagttgcattttttaataactattttaattgaagtaaaatgtaggttcacaagaagtgctcaaatcataggacacacagtgtcacaaagagaacacactcttgtgaccaccactcaggtcaaaaaatagagaattctcaagttcctgaaagccctcccacacttgtgcccacccacacttgtgcccagacactacgcctcttccctcttctcatattagggaataggtttgcctatcttttagtttattaaaatggaatgttatgcaatttcatttgtgtttggtttctttacccaatcttttgtaagatttattcatgatgttacaagtaggggtatagagtcctttttcattctgtagtattatatcatatggctgtaccacaaagttttatttgtttaagctatttgaaggacagttgggtttttagcttggtgctattataagactgctgcaatgaatattctcgtatgtcttttggtacacccaaatataaatgtctgttgcttatgttattggtacaagcccttttttggctttgtgtgtcctgggtgtattcttccacttggattcttgtcttttcacccagggagagattgaattgtactaggaatgtgggaaggctgtatgaatgaagaagggtttgaggagagcactgaaaacacttctaaaacaagtgcgttagaagaatacaaaatgtgtggcataagaatataaactgtgttgggtaaagataggactctgagggtctgtaatttatgctatatttaccgggaaggtaagaaatgaagttggaaaggtgggctgggggccacttcatgtagggttttgaatgcttgatgatggcatttttaattttattttgaatgaggaggagaactatctgagactttttttttttttttttttttaatgagacggagtcttactctgtcatccaggctggagtgcagtggtgtgatcttggctcagtgcaacctccacctcccgagttcaagcgattctcctgccacagccttgcgagtagctggaattacaggcgcccaccaccatgcctggctaatcttttgtatttttagtagagacagagtttcactctgttggccaggctggtctcgaactcctgatctcgtggtccgcccgctttggctttccaaagtgctgggattacaggcatgagccactgcgcccggcctgagacttttaagagagatattatttgctacttattgaacatgactgatgttaatgctgctttttaagttcaaaaatatctacaatatgactcccgtttcccattttgtgaacagaaatccagtaacaatgttagaataagcatgatcaataatcctgccaaagagataagctatgagaacactcagatctccagagcaatctgggcagctctccaaactcagacttccaacgctgctaagaacttcatcaccaaaatggccaaggagggggctgcagaggccctggctgcaggagctgacattgcggagttctctgttggggtaaggctctgagcctctcatgaggctgccccattttgtctgccacggaagctcacccactgcagcttacgtgtccggttcatgatcacgatttgtcattttagtcctgagtctcagggaatttttttttttaatttggaagtttccctttattacttttaaccttgcctagctttcatgtggtgcatgatttgagtttttgtgtgttttaagtatggagccatttgttatgcacagtttttaagagagacaatatggcttatttatagagcaaaaaacggagatttgaaccacttataggttcaaggcttatatgttcttgatgtgtttccagaataagcctgtgtttattcatttatattttatgttacttatttttttgacacagttttgtagtttttaaattttttacagaatgatgagtatatactatttgacgtttgagttaggaaaacaggctgtcactggaaattagcaggatttaaaaatgcagagtaaaggaatgatgaatagtctgctagtcgaacaaatcacaggaaaagataaggaaatagcagttactctaagtagtagggagatggcggggagactggagaattgacacatcttaatgttaattatgaaaattagttattactttccagggaaagaaatttttatggtttattcactgtgtttatttgtttatatggtttgcttagtaacgactatttttccttaataatgattactttcctagggaatggatttcagtctttttaaagaggtctttgagtcttccaaaatggatttcattttgtctcatgccgtgtactgcagggatgttctgaagctgaagaagggacagagggcagtgatcagcaatggaagggtgaggatttgtcaagcttgacttcacattagatccgtgaacagtctttgcagcattctcctctgaagctagtaaactcttcagacagagccactcttttttcaaaggtgattggggcttatgaagtgccattgatgtttctgcctcctatttccaaggagctgtgctttttgacatagacaaatatccccatatggagccttcctgctgtcggtgagagtgtggtggctctcagaaagtcagtcagtatggactttgacacataaagtagcctttgttgtttttattcaggtagaattaatgaaaactactttacgattttattttactttgtccttgaggaattgataagtaaataactacaagtatttgctttgggcttcactttgtattatttcactgattttatctaaacatgtacctgtctcaggtctttaagatgttctggcgtatgaggtagcctgaggacgccagagggttccttaccagcttgctgagtgcaggcagccttccagagctaagcgcctgctcttctctccttcacagatcattgggccactggaggatagtgagctctttaatcaagacgatttccacctcctcgaaaatatcatcttaaaaacctcaggacagaaaataaaatctcatattcaacagcttcgggtagaagaagatgtgtaagttttgccataggaggaattacaggggttatataattggactttcctcattgatcagttagaattatatgttgttactcatactacatatcccaaggagttttatttccagtttaaaatctaataatactcttcaattccagttttaatgtatgcttctgttgaaacaagataatttattttgtagggtactatttaaggaactgaactagttctctctttttatttttataatttttggttgtggaaaatttcaaatatatgcagaagtaaagaggctagtttatttattacctggaatacttatgtaaagtgatacttttcatcattatctatttggttacccttcagttttattttgttcaggaaaggaaaggcagtttaaatgtttcttttatttaccagtgcagaatactgagttgtttcccttgtatcttcaaaggtgatgatgaattggttgttgtcggtttttaattttaattttcagtgttattataagctgatgtgttttagtgtgttattttcttaatggaagaaaataaattgtttggatggaccctggagtccattgttacatatatgtagtttctgcattaaatatcaaatgactatgtagttggaggatctatttctatgtttaattgtttgaggaaccacaatacctttcccacagtggctgtaccattttacattcccactggcaatgctcaagggtgccggtttctccacatcctcacaacacttgtaattttctggggggttttttgtttgtttgtttgctttttataatagccatcctcgtgggtatgaagtgctgtctccttgtggtttgattcacatttccctaatgattggtgatgttgagcatcttgtcatgtgcagattggccatttatatatctttgggaaaatgtctattcaagtcttttgcccatttttaattgcgttttttttttttgtcgttgagatgtagcagttctttatacattttggatgtcactttcttactagatacatgatttgtaaacattttctcctattctgtggagatgtgttctttgatgcatagttggaggatataaaattttaaagttctgcttgcgaggttgcaatgagctgagattgcgccactgcactccagcttgggtgacaaagtgagactgtgtctccaaaaaaaaaaagttctgctgggtttttttcttacatcatcatgctgcagagttcaagagcatgttttagagaagtgttgacttggatagctgtcaaagtcagctgttgccatgtcttgtatgacctgggaagaaatcttttctcattttggccaatactggggctacaaataaggaggatccatccctcttacctcagtggctcctgagtgatgccccttgtcccgacctgtgaaatgcttccctgatgtaggtcaggaggtactcgtgactcgaagcagccatgtcacaggcataggcttggtgtggcatgctgttggaccactgcagggagctccttggggtcttcttgggctatataactgccagactgtgcctagaagacttgccttttgccaatgagagatggctctcgatctttcctgggtgaatttagggaaatcaggtagtcatggggccaaaagactaatgctaaaactcttaggcttcccaaaattaccttgtctgcatcaggttttcattagcgccagagctgctccaccttggagtggcccccttccccgtgacagccacagctatcattcatgacccagtctgcatccccaaggctgccctgaagcttggctgtgtatactttgatcattgttcttcatcagccttcagggagtttcttgttggcctgctcactccagtccacgtaaccaagtgccccttgacatgttttgtagccgtgttgacacatcacaggaagagaatggcctgtattatatatatttggcatttatattgagaagttgaaccaaaatagttaattttatatatttgctgggttcataggaaatgtatgtaggcttaattacagttcaaatacattcacagtgctcttttaaaattcttattcaggatttagtctttggttcagcaaattggagtgttttttttttttttttttcaggtttagttcaagatctttttcagttagaaatcaattttaggctgggcgtggtggctcacacctgtaatcccagcacttgggaaggccgaggcgggcggatcatgaggtcaggagatcgagaccatcttggctaacacggtgaaaccccgtctctactaaaaatacaaaaaattagccgggcatggtggcgggcgcctgtgatcccagctactcaggaggctgaggcaggagaatggcgtgaacccgggaggcagagcttgcagtgagcgagatcgcgccactgcactccagcctgggcgatagagtgagactccgtctcaaaaaaaaaaaaattaattttagaagaggcagggacaataaaattctttttaaagtggtttacttcagtgttaattgtaatagtgaaattagaaacaacacagatgttcagtagttggcttaatatttagattattttgtatccataaatgtaacattatgcagtcataaatatattgaaataggctgggcacggtggctcacacctgtaatcccagcactttgggaggttgagatgggcagattgtgtgagcccaggagttcaagaccagcctggcctgtactaaaaccctgtctgtactaaaaatacataaaaattagctgggcctggtgctgcatgcctgtagtcccagccagtcgggaggctgaggtgggagaatcacctgagcctggaaggtcgaggatgctgagatcaagccctgggcaactagagtgagaccctgactcaaacaaacaaacaaacaaacaaaaatattgaaatatcactgtatttattaaccaaggaaaggatttttataatatgtttttaagtgaaaaagcaggctgccagtataatttgtttatatgtatttaaaagtatagaattatgagccaaaatatcagaccttgttacttgatattatgtgtaatttcaatttttggcttttatgtttattttccagtgaattattactctaatagtcataaaaagtaatagttttaaaaggacaagggagaatgtaaataatactgacagcctgtaatgggccagggcctcagctaggtgcattgcagagttgtgcagttttactagagtcatgcagcgtgggtgctgtctccatttcacatgtgggaaagtgagtaacttctccaaggttataccactaatcactctttctcatgcctatcagtacggactttataccttgttcaaaccatcttgttagaattcagtatttgggctgatgatatgtttggcaataattggaaaactttcagttaaaaagatgttaagatttctctaaccccttctttcagggcaagcgacttggtaatgaaggtggatgctcttctgtcagcgcaaccaaaaggagatccaagaatcgagtaccagttttttgaagacagacacaggtatagaattaatgttgaatttgtgcatattcttgaatattaaactcttatgtttgctttacctcagctccttcatttttccatataagatttatatataagttcttacaggaattgaacatttgtttggtgtgcagttttcacatgtatatatttgtgttcatatataaaattcatatgcaaatctcagttgtatgaaaactgacatttatttctaaatgaatctgaaataactctgagtgcacccttgtagtagaaaatagactgcatttaattaaacagagaagttgtacttttcttaaattcgagaataaacacaggcaggtcaagatagctcatgcttgtaattccagcactttgggaggccagtgtgggaggatcgcttgagcccagaagctcgagaccagcaaacaaagggagaccctgtctctacaaaaaaattttaaaacattagctgggtgtggtggcatgtgcatgttgtcccagctactctggaggtagaggctgcagtgagccatgatctcatcactgcacttccagcctgagcaacagactgagaccctgtctcacaaaaaaattaaacagagattggctgggcgtggtggctcatgcctgtaatcccagcactttgcgaggctgaggccagcggatcacctgaggtcaggagtttgagaccagcctggccaacatggtgaaaccccatctctacaaaaatacaaaaattagccagtcatggtggcagatgcctgtaataccagctactcaggagcctgagacaggagaatcgcttgaacccaggaggtagaggttgcagtgagcagagatcgtgccattgcactccagccttggagacagagcaagactccatctcaaaatcataataatagtaagataaacagattattaaagtacttgtctcattcatcttttattgaaaactttttttaaaaaaaaaaaacagggtttcattctgtcatctgggctagaatgcagtagcgtgatctcagctcactgcaccttccgccttctgggctcaagtgatcttcctacctcaacctcctgtgtggaagagaccacaggcgcttgccaccatgcctggctagtttttgtattttttatagagatggggtctcactgtgttgcccaggctggtctcaaactcctaggctcaagttattcatctgcctcagcctcccaaggtgcttggccgaaaacttttgttttaaataagcttagcatagtgagggagtttgcctttttgttcttcacttttttgttttgaaaagtttaaaacctagaaatagttgaaagactaatataatgagcacccaaatatccttcacttagattcaccagttgttggtgtgtcacatttgctttatctctgtcatctgcacacgtgcatgttgtgtgcgtgtgtctgcatgtgtgtgtttgtgtagtacttctagtaactgctttagtagtttatttatatgtttgcatacacacggtcatattttttcctgcaccatttggaaatacgttgcagacatcctgatgtaacatgtctgacgttttccgcatgtgtatcctgagtgctaggacttctccgcagtactgttagctgacctcagaaatgtaaccttgatacagtaatattaaaacacaatttctgttcacatgactccagtatctttgtaatgaccttctacaactgttttttgtatttgttttggtccagattacatattacagagttgtgtctctttggtctcctttaatctggaagagttctttgccattttttttcctagtcttttgtcttttatgatgacattttttaagagtccaggacagttgtcttatggaatgtctcacagtctgagttgcttcctcatgattagatttaattgtttctaggaaagagccctgcgcagtaatgtatatagcctttgctgtagctggcaagtatatacatatacactgattgtgcctcggaatccccagggaggctttaaatatagatgcctgtgtcctattcctctgtgtttctgagctgatcagtctggcatggattggactttggtttagtgggcctgtgttttttatgacccatccttgtggggatcaggtgtgcgtggtgagatcatttgatgattgtaggctggaatggaggccctctctgtttgcactggttgtgtgtcctaattttttatgtcagcagtgggtgaagattcttatggctcctggataatccttgttgaatttggccattagcacccagattgcacccattttctcaacattttgtgaactttcaggaagtaactcattagtcaccagcgggaggaaacctttcctaatcaacctgccatcttgtttacccttcttgcccaaggtagcgagtcctgagcaaagacctcttcccttttcagaaatcttcttctccatgggtctccatgttttgtataattaaaataccttaattataaattctattatgagacaaattataattcctattagagaagttcctcttattgggagttgtgtcagttaaatgaatgtttattacatttaactcagaagtttctcatttatgctagaaatagaaagatctgaaccatcagttatgtatattcttgccctcaaagtgtggtccatggaccagcagcaagacattgtctgggagcctgttggaaatgcaggctttggacccaccccagtcctgaggaatcagcacctgcattttaacaagttgctcctgggggattcccgtgtgcattcatgctactaagcacagtattcgttgacatttactctacgaaccataggcaaatgtgtataatctccaaatcttgttcctgtctctgtcacttttagttttattctggtcttttctctgcacaatatagtgaatacatttaaacatgatgttgttcatattgttcccatttccacacaaatactcctctttccttgttttttttcgagtccctttttcttgttctagagatgtggggtaagtaaaggacctcacaaggtcaatttgtggtgtgcctgttgctgatcacctagaacactgctggctcagaatgtgaacatgttgtgtgaatctctaccccaaacctggtgtgggcaggcatgaccagatgttacactcttgtgtagagtcctttttgagactctctctctggttcccttgtgagcctttgtataatgctattttctaatgagtttttccttctagaattctagaatagcagagaggtgcaaattatattagggcagtggctctcaaaatttggcttttacttagagtttgttaaaatgcagattgctggacccgtccccagagtttctgattcagtaagtctgggttggatcctgacttgcttctcacaaatgcccaggggaagctgatgccactgctctggagtcacactttgagaacagttgtattagagtaacagaagttttgttgtgttagaagaataatgattggcagtggacttaatctgaaattgttaataatgccagagatcgaaagcacctacctcaacacagatacaaagctattctcatggttatttccaaagcagtgaagatgtgaagtaacctccatgagcatgtaaattgtttccagttttcttcgttatgctgttttgtggtattcttttgtattcatcccacttaggtaaatgttgtttggtaaaaaaaaagtaaaagtagtggttagtattgtaaccacattatagtattgttcagagcaaacaaagtataatggtttaaacagttaatggttttcaaaaattgggtataattttaaatcctttcaagttgagtccttttaaaagttcattagaggttcctgctccttttaagtcaccagtctgtgtgacttcacagggagtccatgcaacaggaagttaccattcagttaagaacagacaagggggctgggcatgatggctcatgcctgtaatcccagtgctttgggaggccaaggcaggcagatcacttgaggccaggagttcaagaccagcctggccaacatggcaaaacaccgtctctactaacaatacacaaattagctgggcatggtggcatgtgcctgtaatcccagctactttggtggctggggcgcgaggattgcttgagccggggaggtggaggttgcagtgaaccgagatcacgccactatactcccagcctgggtgaatgagcgagactctgtctttaaaaaaaaaaaaaaaaaaaaaaaaaaaaaaaaaaaaaaaaaaagacaaggaccaggtgtggtggcttatgccattgctttgagaagccaaggcaggaggatcacttgaggccaggagtttgagactagtctggtcaatatggtgagacccgtatctctacaaaaaaatataaattagcccggcatggtggcatgtgtctgtagtcctagctacttaggaggctaagttgagaggatcatttcaacccagaagttagaggcttcagtgaaccatgatcacgccactgcactccagcctgggccacagagtgagaccttgtctctaaaaaagtaaataaggaaaagaacaggcaaaatatctatctataacttaatgctgacgaaggatgtggtgaaatttattttttggccttgtaaatttgtttagttcttcaggaaatgtggttgacaatacttattagccgcaaagtatttgtatcctttgtctccataatctcatgtctagcacttccttgactctaaagaaatttccaaatgtggagaaagttggttgtacaaattgtttacaggttgaaagccatctctatgtccagcagtaaagaaaagctggagtaaactctgacagcttcatttggtgaatagcatattatttcttatagaggatgcttgttgtgtaacagcatgtggaaatctttatgctacagtagtgagagacggaaggaaattgttttgaaattgctaatctgtatctacaactaatgtttatacaggcatctagaaaggattacgtagagatgcagctaagtgggctgggatagtgaatattttgtgattatatttttcctttttctttgttttgcaggttttctggaatgttctttcattattttttaaaaattgatttattccttttctttttgtactcttcttgccaagaagtaaaaactggcataatgttatcagaagctaacttcagtagcttttctcagtttttggttaaatacagtttcaagctgcttttcctctctttacatggacctttcagtccatttcagatccattattaaggttttgcaatctttgggatagacagaatcatatagttggccactgtcatagtctagtctttctagatctaaagttctttgaaatgctaagaaggttgaaggttatattgtacaaaaaaaacttttgtttcctgtgtcctccaggttaatgttttatccttgtgatctttcagtgcaatcaaactgaggccgaaggaaggggagacatactttgatgttgtggctgtcgttgaccctgtcaccagagaagcacagagacttgctcctttgctcttggtaggaacgctgtgcaggaagtgtacatcacctttgtttgaagttgtcacatgctctgaaattcactgagagcttcgttttccttgagttgccttcaacaggcactggacaatgctatggggttctagggcagagcaatctttacaaagattgacagtggctgtgaaacagcctcacagccctagaaagttggtgcaagtgtggttggctgcctcatgtaatttaaaaaagtgattaacatcctcatttagagtaaaacatcctggaattaaggtatgctatattttaatttataatatcagagataaaataaatatgttttttcatttttccttttttataactaccatggattttttgtcttggcatgtcttttagacatgtacagtgtgttacaattttaggacatttaaaagacctttgacaaagacagtcgctccaacattcattgccgaataaatctctaaccttttttgtgagtattggtatctctgttttttcatcctttggcatgtgagcggtgactctgaggcctgtagtttttccatgatctgcctgctgcttccccacaggaactgccttcgtgtgaggagcagtgagctgcagcagcctacttcccattgcttttggccacgtcctatgtatgtgtgatgtagattgtgcagtagagttgtgatttccagaagtttcgccagtgcagactctgtggctgttatctttatatcttttcttgagatattaatagctcagtgtcaaataataaatttctgaagaaaaaaatcctaaatattttgtcatctggttttccttctaggttttggctcagctgataaacatgaatctgagagtatttatgaactgccaatccaaactttctgacatgcctttaaaaaggtaaaacatgctatgtaagaaaacagttgaagaaattgtactgaatccaagttctgatattgcatgttagaggatcagatggatttataggtggacatcatgtttgaaatggtcatttactaaatgttcagttttgccaaatttcattctaatcagaagttctaagaacatagtgtgtttgtagcatttaggtggcattaacccaggctgcttgcatttgtgccttttctttctttttttcgagatggagtctcgctctgtcgcccagattggagtgcagtggcatgatcttggctcactgcagcctctgcctcccgggttcaagggattctcctgcttcagcctccttagtagctgggattacaggtgcacactaccatgcccagctaatttttgtatttttagtagagacggggtttcaccatgttgaccagcctggtctcgaactcctgacctcaagtgatccgtctgcctcacttcccaaagtgctgggtttacaggtgtgagctaccacgcctggccccatttgtgcttttcatcttaaaagaagaatattcatttcaagttggaatatacatgttagaggaagcttgcttagctatatattgtcatgagctttggaatggtcatttatgaaaaaagtgatacagaaagcagttagcgttgtggctatgggaaatttctaacttgccagtgtgctgtgttttataggttagcttctaagtggattgaaacagcatttgaaagtaaccaaagggttcccagcttccaccattattctcgtataggggaaatgtttacattattagtgttttcaggactagcctgagagcccaatcagtatttaggaattggttttaaagagaaaaatgagtcctccttgaagggaggaaaatgcccaggacctaactgtgaccctgacagccatccatgtgaacgagtggcctccgttcaagtgattggattttggcttgcaggtggacagtatagtggctgctgagtatgagctagagtacctgttactagaaggtcattgctacgacatcaccacaggccaccactgagcactcctcctcagtgctgtccttgtttgccttttcttgcatctgcagcaaccacaaggaggcatcataaggtcaaagatggttttggaaacacttttcccaatctggaagggtactcctccaaatctaatttgttttaaccagttgttacctgtgtaagggctgtgcactcaagtcctgttgtcacatcgaaaattatctaacactttccttttcaatttcagcttttaccgttatgtcttagaaccagagatttctttcacttcagacaatagttttgctaagggtccaatcgcaaaatttttggatatgcctcagtctccactgttcactctgaatttgaacacacctgagagctggatggtagaatctgtcagaacaccatatgatcttgataatatttatttagaagaggtaagaccatatctattgcttccaaatacctaatcatgtataatacagcagattgaatcatagtctaggtgggcctctgagacatcagtgttcaggtatgatatttttttaaacaacagctttattcacatggaactcatataccataaaattctccccattaacgtgtacagttgagaggttttagtatcttcacggagttgtgcagccatcaccactatgtaattgtaggatgttttcagcatccccagtgaaagccccatactcattagcagtcactcttcatttccccagcccctggcaactgctggtctactttgtatctctatggatttgcctattctgacattttgtctaaatagaatcaaatgtggtcttctgtaactggcttctttcacataacaaattgttttcaagatccatccatgctgtagtatgtatcgacgcttcactctttttaacttgccagataatattttatttatggacatatcacgtttcatttatcctttcacgaatggacatttgagttgttttcactttttggttgttatgaataatgctgctatgaatgttgtgtgcaagtttttctactgatacgtgagtacaggatgtctttgcatttaggtctttaatttttttcaacatttagtatcttatcctcgttcgtatttttagaataacgtccttattgtttttttctcctttctctttccaacctagtttttataattgtatacagtcattaaccaccactatagccacgatgcagaacatttccattaccccaaaaagttcttttatacccctttgcagacagtagcctcctctcgcctggtttcaggcaacaactgatctgctttctgtcattatacttttgtcttttcttgaatttcttaaaatatgatcatatattatgtaagtcctttttgtctgcttcctttactttgcataatgcatttcagatttattcatgttgtctctgagtgcattcaagtgattggattttggcttgcaggtggacagtgtagtggctgctgagtatgagctggaatacctgttactggaaggtcattgctacgacatcaccacaggccagcctccacggggactacagtttaccttaggaacttcagccaacccggtcattgtggacaccattgttatggccaatctggtaaataatctgttcatcagatagtgatattgtagttacgttaatttgggcactataatttatgatggagcaattagcattcttaaccatagagtgagattaaaattcattatgggctgaatttggtcaatatagaaatcattagttcagctaaatttgtaggttagaattacatgtcaaaagaaaaaacatgctggaatactcagctataactgaattggccccctgaaaatagattgctcatgagctgacagcctttttcttttctttggaagtgcaacacttattcatgcatcacacgttgattcttccctgaagcacagctaaagagcagatgatttattggtgtgactggcctttattgtactagtttttttttttttttttttgagactcctgcccaggctggagtgcagtggtgtgatctcagctcactgcaacctccgcctcccaggttcaagcaattctcctgccccagcctcctgagtagctgggattacgggcacccaccaccatgcccggctaatttttgtccttttttagtagagatggggtttcaccatgttagccaggctggtctcgaactcctcacctcagttgatccacctgccgtggtctcccgaagtgctgggattacaggcgtgagccaccgcacctggtctgtgctagagtttttaatgtgtagttttggttttttaagagttgcattgatttgtttactgtgttattcacattatagttgattgatatttcagaaatagaagtaactgttcctcagaaataacattttggtgttttgaagagagctaactggacttttcttcttgtcctagggctactttcagctgaaagccaacccaggagcttggatcctcagacttaggaagggacgctctgaagatatttatagaatttacaggtaggagtaagtgatgcagttacattatcccagaacttttagaaatgagcattagctctaattgaatactaccctggcagttagccaggcaacatgaatttaatttgcagttgtatgtgatgaaacagtggtttttccaggaaattaaatatggaagaattgttagaatagaattagataataagaggtatagatgctaatgagtatagtcaggctttattctttaattattcctttgtgctaacaatatcccagaatcaaatcattctatcagtgtgatgcggctcatagataggcagatgagaaacttgaagaaaggagaaaagaaagaaagaacagccacacttttctgcccagagagtgtatgtgttgaccctgagtgatttgcaaatgcacagtacatggaagctttggtcttgaagctgtgctgttagtgctggtattccttggtctgtggtggcatagtaagaacattccctctatagccagcttttaccttaaggtttactgcacatatttattagtttaaaaataattatgttgcctttaaaaaagtttgatataaattctgcttaacacaatttaaattagttttaaactgtgtgaagaggcttcccgtcaggttgtgtaggggatgatttccattagggcacatttgaagcactctgtagtatgtccttgccttaattagctccgtagcgacacacatgaaacagtggattagtgcctggttcttacccaggaaatagaagaattctgtattataataacaccattgtaaacagtagaagctttttttccacataacattttcctcagataaggttttacaaaatttgggatgcacttccgaactccttcccttttggatgccctggcccttgccagccctccccttcccaggagcatggtgccccctcttcctagctgttcagggccccacccccattagaatcttcctttgcctgagaaccctactctctgctagatgacagcaaatgcagtgaattcatgttgtaattatgactttctgcaccttgaaatttggtgactggaaattttaggcattgctgttgattagtagggaaacatacatttaatttttcttcctctgctcctgtctgcctgcaaatagaatttgttacagtttttctggtagcgtatagacaccaggttgagtacagggcctattgttgactgattgttgcctccggcagaaagagcgagcagatttcctttacaacactattccagttaaagagtagtggccgggagtgatgggtgatggctcacgcctgtaatcccaacactttgggaggccgaggagggtggatcacttaaggtcaggagtttgagaccagcctagccactatggtgaaaccctgtctctactaaaatacaaaaattagccaggcgtggtggtgggtgcctgtaaactcagctacctgaaggctgaagcaggagaatcacttgaaccccggaggtggaggttgcattgagccgagattgctctactgcactccagggcaacagagcaaaactctgtctcaaaaaaaaaaaaaaaaaaaaaaaagagcggaggcagtgtggttccaataatggttcagggggcctgttccctgcattcctttatcgaaggctctgtgcttggctcagagcttgtgaacacaggcggttgtttagtactcaccatgtggttaccacacatgggtgcctctcactacgtgatgggtaatttgcaagaggactcacaaaggaggtttgggcatgcaccttatataaagagaggtttcaacacgtgcttctgtgcagctcgaaggagcttaaggagcaagaagatagctggatctggaaaactcctttatgagaaggatgatggactcagatgctctgagagcatttgctgccttttgagaattgtgccttgtaatattgatctttcttttctcgcaaagccacgatggcactgattctccccctgatgctgatgaggtggttatcgtcctcaacaacttcaaaagcaaaattattaaagtgaaggtgagtttggtaaaagtagtggcattctgttattggacagctgtcatttaaaaatatgtatcttggaaccagcccaagagtctctttggaatttgctatggcaattatagggatactgctttaaggcaaaatgtctttgtaactgtgagtttgtggcttccctcaactgaaagattgtaccttttgggtaatctcggtgtgcagaacatgtcccatcttatataaaatattctcatagatgctatgttgtttatatagccacaattcatagtgttgttgatgattcttttctcaatattgggggaactggcaatggaaattttcaacaataataaaatgatagtcctatttaatttcttttgacttgtactttccgttctctgaatgttgaagctcttagtgccttaaattcaagtacagtatattcttgaagaaagaatcattacacacagtgaaacctaaaataggccatccattgttgagaagaaaaatggtcactgtactgccaagaagaaacccctgtttgtgctagtgaatcctgaaaactggtcataacatgaaatacctccctcccaacagctagagcccccagcagccacactcttccctggaactagctgttgactcattgaatcgtgcttctggtttcactgcacagttgagtttgcggctctttgcctatgttgcaagctgaaaatggggttcatctaattaaaagaggttgctgtctcctcacataaggttatgatgtgaatgtcctggcgaagatacttctattgaatccttctagactctgggtggggttgtgcctgtttgtgagagaattgattgataattccctattgatgacaggctcacagtgtatatccagtgagaggcagttttatgcctgtgagacatactgggagtaaggtttatcacatttgattgcaggttcagaagaaggcagatatggtgaacgaagacttgctgagtgatggaacgagtgagaatgaatctggattttgggattccttcaaatggtaagttgacattgtaagagttatgtttttaaggaaaaactgagatataagcaccatccatccctcctttttgcatcttgtgattctgtctgggcctttcacattctactttgtgcagctacatctcacacttatatttggcatagatgagtattttccactcgattgatccaaaagaggttcatgtctcctagtggggaagttacttctgctccatactttgtgactctcattgcctgtacctgctctttggaaatttgactgctccctgctcagtttacttcccgttgtgtaagttgcattctggtgcagcctgtgttcagtctcttcctaaaacaacactgtcggagagtgaacattctttttgtaggttggttttgtcagtcttgtggtctctccagggtgtgagggaagcttcataaccactcctgctgcagctcacccgctagggaaggatgggaagcgcagtctctttcctcttactttcaaaggccgtgtgtctgtatgagtgtttcaagtggtcttttttttacccttattgttataggggctttacaggacagaagactgaggaagtgaagcaagataaagatgacataattaatattttctccgttgcatctggtcatctctacgaaagatttcttcggtcagtcttgttgattatttcattatatatgatgaatgaattggtcagtgttcttatttagagaggaaaggttttgtgggattctgctcattatactcctgtgtctttgaagcactctgagcattgtgactggcttgccatttatcattggatttgttttgatcccgccgtctctgtgaagttgaactatgtagtgagtgcttctggatattacaaggctgcagccctttaacgtcactgtacacattcatagactgtactgtttactgcctgccaaacattgcttaacccagagattaggaggttgacatagagaatagaatcagaacagaaccatggaatacttcactgccttgtaaagattcacaggattttagagccaggagagagcttagttcttacatgtgaacacttctgttttataaacaggctgaggccccgagtgtgaagggacttgtctaaggtcacacagctacagccagaagaggccacgggctagggctgcctgatgtagtggtcaccagaggcactgtcaggaaggcctgagagtcacttttctcattgccagggctctgttcactcttaatttttcactacagatctagtatagaaaatcaaaatgtcatttgtctcatttttagccctcttatttccaagaaataatatcctacctaaaatagtgacaataataacaaccgaatttggttaaattcctccattcaaaaatgtggttttgttttctgagtaaggaggccggagctggtagccttcctctctaaagcagggcctctgtgtaggctgcaggaggcgctgtggttacacattcttcccttagcaccagatgctgatgtcatgtgacaggagttttggggagtgatgtcagttaccccgatttccagggttcatctggaccataactaatatatcagttcatgaagcagtttatttagaggtgtaacagaattaaaacatttgcctctgtcagttaagtgtagttttataggtgaggaatgccccttctctttagtgataacttcataagttggagtaagtacaatttttcattttccatcactgagcgtctccctcggcctaattgagccattagttagctctgccgtaaagagcatttaggtgtctcgtgattgactctacataatgttgaggttaaataacattggaaagctgttattaattacctgcttttgtttggcagcataatgatgctatccgtgctgaagaataccaagactcctgtgaaattctggttcttgaagaattacttgtcccccacatttaaggtttgtttcacagagaaagggaaaacattcttattaaggagatatttactgtatatttttcatgacttttgttttatctgtatactttagcaaattttccatttactaagataccctaatttggttgcatatttttattttgattattcttccagattggtctatttgaaggaaacagttaaattgtgtttaaaaacttggatgatatggtaggagagtcttttgttgttgttattattagcagtgtcttactgagataacgtttccttcctctgaagcctgcatgcttgctttaatttagaaagcacagcgatggtttacattgaagagaatgattggtgttagcatgaaccactcctagatgatgtatggaagtagtgcttcctctgtgcaaaacaaaacacgtacttggaatgttttctgcattacttatatcagtcagtatttgtcatctaagttgatttatttgcatcctttttttttcttgtagaatttactaagtgacttttaatatattcaataaccattctccttgataagcactttactgctggcgcctaaaggtgcttatacttagaatctgaaagacttattcaaaaaggacaacacatttgtccagagttctggctttgcagtgttattccctgggttagatctggcctcgaggaaggcttgtcatcaagctcagtaaatgccttactgaaatcaagtttagacaaatggacttaaagttcatgtgctgtaaaaacacacacagagggatatacatctaaaatccttctcttgaacattctgtcatttcatgtggtgaccagaagtcataaagaaatggggatttgacaaaggtttatatctgttcttctatgtagtcatgagtgggtcacggccggtctttgtaagaccactgttttggtaaatgtgttttatttgtcccgtatcatggtggttggcttacattatgaaagcagttttcttaatcagaagaaatgattatttgttgttcccatgtctaaaaataggagtttataccttacatggcaaatgaatacaatttccagtatgagcttgttcagtacaaatggccccggtggcttcatcaacaaactgaaaaacagcgtatcatctggggttacaagatcctcttcctggatgtacttttcccactagttgttgacaagttcctgtttgtggatgctgatcaggtaggcccttaaaggccaagttttgacagtttgtattaaaagcaacaaattgcttctttttaaatgctattttttccacttatggaaaaggacatgcttattttacatttagaaaatatgaaaatatgtatcacatagatgtcatcactttttaaatttgcatttagcttatctcctttacatctttttctctgtctttttaacatcattgtgatgacataatgtgtgcagttttgtatctgacttaattcatttaacatgaaaactaaaaattagaaaattaacatttagcagtgcttgccatcatctctaattatctgcccaaaagataggagttattgtcatgggtaatagacgaagcttaagtggatacatggctttggcagtagggaacctccggatattcttccggccgtcagggtttgacttagtgaaagggaacatgtgattttagagcatacaaactcaaacagcataagtgtacgtctgcccacagccttccacttcagcccgagcgggcggaaacccaagtcagccacctgagtggaaggatgtaatgtgtgtgaaagtcactgggacagagacttcactcacctctttggaattctcttccactggcttagcctgaagtgtgccttcctgattgtaacatagccacatttaatccttgttgagtacttacgatgggcaaggcattattctacatctgtccatccatatgttaacttacataatcctcccagcaaccctgtgagataggtactgtcattatcattatctccattttacagatgaagaaactgaggcacagaaaggctaagcagttgaaatttgttttattcctactcccacacaccttgctaagaagtgtcttacatgttagtgagtcaaccaggtaataagtggagcaatcaaagtgcatctgcccctagtgcctgtgccactaaccacggagcagccttccatgctgccttaagcgagccactctgtatctgaaggaaaccgcattagagctgtctgcatggttgcttaacaaatgactttttatattctccagattgtacgaacagatctgaaagagttaagagatttcaatttggatggtgctccttatggttacactcctttctgtgacagccgaagagaaatggacggctacaggttctggaagtcagggtactgggccagtcatttagccgggcgaaagtatcatatcaggtactgaaaagaagcactcctaacactgttacggggttttccttaaaattgattttgtgtggttaaaattgtgaataggtaatacattggtatggttgaaaaataaaaatgataaaaaatacacagtggctgggtgcagtggctcatgccttaatcccagcactttgggatgccaaggcaggtggatcacctgaggtcaggatttcaagaccagcctggccaacatggcgaaaccccgtctctactaaaaatacaaaaattagctgggcatggtggtgggcgcctgtaatcccagctactcgggaggctaaggcaggagaattgcttgaacccaggaggcggaggttgcagtgagctgagatcacgccgctgcactccagcctggatgacagagtgagattccatctcaaaaaaaaaaaaaaaatacagtgtaaaaaaaacttcctaatcctgtctctctctttcctactcagttcctgttctcacagcagataacctcccaacttattgactgtctatccttccagattttcttaattcttacagaaacagctgtgaatgtgtattctttttttttttacacaaaatatgctacctatttatacattttgtaacttggcttttttttttttttttttacttaatgtcatatacatcttctcagtgaatagagagagacctgattccttttcatagctgcatattattccagtgtgtgagtgttatttatagttttccctgtgacctacaatgttgcaatgaataatctactaaataatttttcatatctcatatatttgtgagataaattcctagacgtagaccttttaggtcgaacagtgtgtgtgttgttacatttctaatgagcaccccattctcttctctgcgagaagtgtgatttgaagatgtgcagggaagaggaacgtgtaggaagcggcacatgcagagatcactgctggggtttagtgatggtggcttcattctttacattcctggtccaaaagaactgtaaggactgtaacactctggggttttcccccccctgtaacattgaagacatcatcaggatatcattgaataatggttgtttatcagttactatggcttttgttactgccgcatatgctagaaatctttggtctgagattatttctttcggatggcaaatacagaacagtaacaaaagcatagcacagtatagattttgcagtgactttcttagagatctttaaagtagcacactttaactccactgtagggctgtagcataccttttcaaagaaaagccagaatatttggctagtggcctgttccattattcattgggtttagttttcctgtcgtaatccatggttggttgtaacaagcgggtcttctttattcagtgcactatatgttgtggatctgaagaagtttaggaaaatagctgctggtgacagactcaggggacagtaccaaggtctgagtcaggaccctaacagcctttcaaatcttgatcaagtaagtgtccattttttatggttaactgtgagtgacgggtatacagtgttgcatcagaaaatgaagtattacttgtgtcttcagtcctctcctcacaggatggcgtcttgttttttcatggtgtgtgtgtgtgtgtgtgtgtgtgtgtgagagagagagagagagagagagatttttatctgccctcaagacatatcagcgtgaaaaatgtcatagatttgatgctggctggggagagagatggaaggagaatgctgcctctctgaaccattagcatatctttgtattttgtactcaaactaatctcataggtttgtttctctacctactagggtcagtttgtttttctgctgtaggaactaaatagctcaggattcgtagtatagaatcacagtatagtatcacagcttcccctttttctatgtcagaaaccatgatgtgtttcaaggctagctaaattactgtttgttaatgttaagcatttttcagaggtgagattgtagtttaagggttttggatacatatttcacatattttaagcattttattttgcttaagtctacttaaatgtttttaaacctttattgtgatatgtagcatccataaagaaaagtatacaaaaaacatacatacatattcacatacatccaggaattattatgaagcaaatacccagataccacaacctagttcaagaactagaacattatcagcatcccagaagccatccttcctccctaacaaaagtgtctagcatcacgacttttatggtaatcatttttgtttctttatagatttactgtttaagcatgtatccataaacactagtttaatttgctcattttcttctcctctatctcaatggaataataaaaggtaaacttttttgtttgtttgtttgttttgagacagaatctcactctgtttcccaggctggagtgcagtggcatgctctgggttgcactcactgcaacctccacctcccgggttcaagtgatcctcctgcctcagcctcctgagtaactaggattacaggcacgcaccaccactcctggctaatttttgtattttcagtagagacagggtttcaccatgttggccaggctggtctcaaactcctgacctcaagtgatccacccgctttggcctcccaaagtgccgggattacaatcacgagccacagtgcccggctctacttactttaaaatttgtgtgatacctggtatcttctaatttatggagctactatggatctgattctgttgtattatttctgttattcttttgttcatactgtctatcacatatttgtttatcttctgtagtgtgtcaggcgttgtttttgcagaattattttggggaataatttgagttcaaaaatggtatcacccaacagtatttgtttctctcttttttttttttttttggagatggagctttgttcttgtagcccaggctggagtgcagtggcgtaatctcagctcactgcaacctcagcctcccgagcaggtgggattacagaggcgtgccaccacacccagctaatttttctgtatttttagttgagacagggtttcaccatgttggccaggctggtcttgaactcctgacctcaggtgatccacccaccttggcctcccaaagtgctgggattgcaggtgtgagccaccgtgcccggcctttttttttttttttttttttttagacaaggtctcactctgtcacccaggctggagtgcagtgatgcgatcatggctcactgcagcctcgaactcccaggctcaggcgatcctcccacctcagcctcctgagcagctgggacgacaggctcacaccaccaggcccagctaattttttgtattttttatagagatggggttttgccatgttgccctggccagtcttggaactcccgggctcaagcgatctacccacttcagcagctatttttaaattttagtctgttggcagggttttgtagagaagtatcatctatttatttttgtaccatcatggaacattctttacaagtatcgcagtcaatcatttctgtacatttccttgttccatgtaagtcttaggacaatggaacattttattgtggcaaagtcagaaggactccacaggaaaaaggtttaaagcatagggtagcattggctagaaaaaatgtcgtctatttgggagcaagtctcaatagacaaggtagattcagaacttccttgacagaagcctgcaaaatttacgaaccaccactctatttagttgactttcagaagtcagtaggagtatttttctcaggattgccctaatgaagggagggttaggtgcaggctgtttgtaagttttaagccaaagcttttcagttgcttattatgggcagatgttttatggatcctctaaaatttgtagttttgaataacttctctaaggcattggtaaggaccttttccattttaaacatttgtgattggcatgtgatctgtaacgagcagctgtacatcactgatgttctatacgtttgtctccacacgaactggctgggtgcagtggctcatgcctataatctcagcactttgtgaggctaaggtgggtggatcgcctaagctcagcagtttgagaccaacctggggcaacatggcaaaacgcatctctagtaaaaatacaaaaattggccaggcatggtggcgggcccctgtagtcccagctactcaggaggctgaggcaggagaatctcttgaacctgggaggtggaggctgcagtgagccgagatcgtactactgcactccaacctgggtgacagagtgggaccccatctctcaataaataaataaataaatatcgccagaactttagatacatgtattttatttttatttttttttaaccaaacaggatctgcccaataacatgattcatcaggtgccaattaaatccctccctcaagaatggctttggtgtgaaacgtggtgtgatgacgcctctaagaaaagggcaaaaaccattgatttggtaagccgtatgtggtgtgcttctgcatgttcatccactggatgtgtgagtgaatcacgattaatgatttttatttagattcttaaatttaagaatttcctagattcttatttagactttctctgtaattgtgtagtttgtcggggctattcttatcttacagaatattcttataaatattcttatcttatagaattagtatcgtttgttgtatagtaagcataagtatatagtttgttggggctattcttatagaatattcttataaatattcttatcttatagaatatttcactggttttatttccctgcttacattaggaaaccaaatcccttagcacttaatgggactgttttcacaacttacaatctgctgagtcactccttggcttccagtttatctctgtgccttgtaatttttccaaatggactttcacttttcctgccttccattagccactcacacattctttgtagatgtaaatacagctttacatagcccactaccatattgcttctggtagtatatcatttggttccttactattgttttcttgtccagttaggacttgtaacccaagaacctttgaattctctatcatgtggcctttcttcaactcagctgaagtgtgttcttttggtttcacagtgtaataatccgatgaccaaagagccgaaactggaagcagctgtgcggattgtcccggagtggcaggactacgaccaagagatcaaacagctacagatccgctttcagaaggagaaagaaacgggagcactgtacaaagagaagacaaaagaaccaagccgagaaggtaagcacaaaccgttggttttaggacagtacttctttccatttctgatttctgcttgttgtaaagacaatagaataatggataaaaggaagagaaaaatctcctattaatccttccattctaacatcaaccagtatatatttttcattttccttttatgttggtcttctaaacagtatttattagtgcaattgctatgtttttttttttttctcgtttttctggtgagggggagaaagggtattttaattgtgattatagttatttaggttcatgagttttgtgatacataaaccaaaccttttgcagagttcttcttagattccttgttttttttttcattaaatctgtcagtgtactagtgaatgaaaaaatttagatcaacacaaatatgtagttgaagaaactttttttttttttttttgagacagagtctcactctgttgcccaggctggagtgcagtggcatgatcttggctcactgcagcctccacctcccaggttcatgtgtttctcatgcctcagcctcccaagtagctggaattacaggcatgcaccaccacacccagctatttttaaattttatttattttttattttttgtagttttagtagagacagggtttcaccatgttgcccaggctggtctcaaactcctgacccaagtgatccgcccgcctcagcctcccaaagtgctaggattacagacgtgaggcactgcgcctggccgaaaaaagtattctttaaaacaagcatgttgggatggagatggaatgcttgtatttaatttagtgttaagtctttaatgtcttccctgttgtgtgtgtcttgaatgatagctacttgaaaaaatcattagaatacgaaattgactttttaaaatattaataagttgggctctagatttaagaaaaattttaaatgtatttatttttaaattgtcacgtaataattgtacatatttgtggagtccatagtgatgttttggtatgtacatgggctctggatttttaagatttattctgctttagactaattctaaaaaagtggctgggcacagtggctcatgcctataatcctagcctctcaggaggctgaagtcggaggattgcttgagcctggaggtcaaggttgcagtgagcgactgcactccagcctaggtaacagagagagaacctgtgaccaagcaagaccctgtctcaaaataaaaaaatccagaacatggatcttgggtgatttgcctatacatccctcagactgtactatgatattaaatatcacagctggaaggttatatagtaaccataaaagtaattaattccgattcatcagtaaaaccctgaggatttccatagataaatgggcaaagaatgtggacacactgttcaagtaagaggaaacacaaataataaatgaatttgaggaaacagtaatcaaattaaagcagtctatcactagtatctgctacatggaagaaaacagacatagtgataatgccatttgtttgggaggcggtgatgaaaccgttgtggatgtagcttgatgaagctttgtgtattggaatagcccttgttacaaagcagtacatctgccattagaagcccgtaaggcgtttatataccctcaagaattactctcttgagaatatatctgaaagaaataattcaacagaaaaaacaaagttgtatacatgaaaaaatttattttactattacttataagccagaagcatcaaaaacagtttaaacatccaagaatgagctacactgatacatagaaaatgtttagatgctattaaatgataaaagaaaaatcccgactaaaaaaatgcatgcaacgtttactgaaagtaaatattgtatttgtgaaaacaattcagttggagtggggtttacagatagtttccatttttaaaaaatctttaatttagtttttgctttcaaaatacagtacaaaagcacaaatcccaaagatttagtaagtgagataagatgaaggtggaggtacaaagaataggttccagtgatgaaaaatgcccactcagtggtgtttgtaatttgaagatcatctgttttcttttctgtggttctccttttccttaggtcctcagaaacgtgaagaattatgatctctggagaaggacaggaaatcaccccatttgaaaaacagtttttataataaatgctagttttttctgatctgtctatacaactgctgataagccggctgggcaggagtgccacaccttttgattctgagcatttgattctgacttctgtactctggtggccactggatctttgggattaaagctctgttggatttgtacctcagaggaagaccaagtggctgatcctttggactctgtaaagagcattcttctagtcagagggtggaatggcagcagcaactggaagaaaatgagttttttggtgcccacacccaagagcacacacatgctgcactgtctcggaaagcagggccagctagagccaccatgttcttccttacctcagtttacctgcggcctgcgctgcactgcagatgcccaccctgccctgggtctggccggcggaagctctgtccaaggtccacacacctccaggtttacgccaacatccttgtgccctccccaccttctcttccaacgcattaggtgcattgtttaattgaaatccaaccaacaattgtgtgtcaaggctggtttggtgcagtggctgggcaaattaattttgggccaggatgggggtgggttgcagtgagggtagggaaaatgtcaggagtaggaaggttcgggggttaagggaagggaaggaagaccagaactggccatcctcttttataatccattagtagcaccatggctcatttgaaatgaaaatattacacttattccccacccaaccgcagtgaactttctaggtaattgttttgaaaacaatttttgtatctgtgaaagtctttgctttttctttccaccttctagaaaagtctgctaccagtttccttactgaatacagccatactcagcccctctcgcatccagcccgtcagggtcagggtcagggtcaggctccctcaagacgagcaccgcattgtctgccctcttttgcgtaggatttttctctcagacccaggggacattgccttggacttttctctacaaatgccctcagatgtaagaccagaaatgattctgcttgtggaactcgtggctttctgtcctattttccttttatgtgagccctgcaggttgcctttggcgcccacaccagttctgtcttcatgtcgctgcatcgtgaagccccatttgcctttagtccctgctttgtgtgtcttcacttccacagccagtgttgcccctcagggcatactttgctggtgaacgggctgtagagtcttgagtatgttattggcctaagtgggcatgaggccccagcatccgactccatctgccaggctgcagggcacagcagcactggcatagacaggcacgctctgtcttccaacgtgcaccagccttttcttacatattttgcctgtttttaaaaaatacgaggagagggtgcagatggatactgtgccctcaccctcctaagccaggtaatatattgatgtgcagacttttaagaaatcttagtcttatcacaaatatcaagtaatttattttttccattttcaaatgcaaaagttagcctaggaagcctcccagtcatcctgaaggaccttttgactttgcttttataattctgttaaaaattgaggaggggattaatgagtacaatgaaaacaaaacaaaacaaaaaattaagaagaggaaagctcaaaagaggataagagactgaaaaggcacctcagaatggctgctgtgggcagagtctgtgacatgacttttccccgccctgcccctctgttcagagcagctggaaagatgggatcagtaagattaaaaaacttttgttcggccaggcgtggtggctcacacctgtaatcccagcactttgggaggctgaggcggacggatcatgaggtcaggagttcaagaccagcctggccaatatggtgaaaccccgtctctactaaaaatacaaaaattagccgggtgttgtggctcaccctctattcccagctactcgggaggcagagacaggagaatcgcctgaacccaggaggcagaggttgcagtgagctgagatcgtgccactgcactccagcctgggtgacagagcgagactccatctcagaaaacaaacaaacaaaaagaaacttttgttcaagctgcatcttcacattgaatgaaagcattcagacgggtgactgctgctgtccacaactgtgggcggaagtgtgccttttcccagtttctcgtccaggaggttgcatagcaaatactcaagtcactgggatatatgctttccaaatgctggcccccatagcacctttccccatgtctttctaccaagcctcttatgtttaatctgtgcagggaagacaagagtagaccatattctctgtgtgctgtgcatgtcctggtgtcactcattgcctcttatctgtcgccattctaatataagtcagcttaatagttgactctgaataatgcaaaacccagcttgcttccagaatggcctaggaccctcctcctcctgccagtttttttttttttttttggttcatgtggcataatcatctttcaaaattaaccaaatgccccagaaaatgatgttaccactaaaatattttctccaagaaggcatactgtaacagaaaagataggtaagatatttttttcccaagaagtaagaattgattgtgctgaatgttcaaactctggaaactgttcacagtatgttgttcttagctgttatttatataaagtgaattattttctctctcaatcatgccatagtggagacttttgtttgtgagtaagtgacagagtaatatgaaataatgtgatatgtcagagtgacatgcagcatcctgagcctgtttttatgttctgtgtacagtggcatttgattgagatcaaagcctgtcacagcctgctgctgggggtgtggggatatgccagagtcctgtgtttggttttagaagtttactgaatgtttcccacatggagaataatggatggcatgttagtttctttaagagtggtaaagttgtacatctgtcattgttgcatttcgaattgaacacatagatgcttgcctgtctgcttgggtgaatgcctcttgggagagcgaagattacgtgcatgatgtatgttaagaaacagtttccggtcaggcacagtggcttacacctgtaatcccagcactttgggaagccgaggcgggcggattatgaggtcaagagatagagaccatcctggccaacacggtgaaaccccgtctctactaaaaatacaaaaattagctgggcatggtggcacacacctgtagtcccagctactcgggaggctgaggcaggagaatcacttgaacccgggaggtggaggttgcagtgagccgagatcatgccactgcactccagcctggcaatagagcgagactccgtctcaaaaaaaaaaaaaaaaaaaaaaaaaaaattaaaacagtttccataaatggagcttaatttgctctgctgtccttaagccctcgtgggtttttttttaagagagtctcattctgtcacccaggctggagtgcagtggtgcgatcttggctcacttcaacctctgcctcccaagttcaaacaattctcctgcctcagcctcctgagtagctgggattacaggcgcctgccaccatgcctggttaatttttgtatttttagtagagatggggttttaccatgttggttggccaggctgatctcaaactcctgacctcaggtggtgatctgcccacctcggcctcccaaagtgctgggattacaggcgtgagccactatgtccggtcaagccctcgtgttctgaaccttgtcaaggctctgcctgaatgagttttcatctgattgtggggaccaagtccctgagtagagggccaagagctagggacagggggaagagactggcccaggtggtagggaggaaagaactcccagagtttcctttagccaggaaacctgctctactgaccccgtgacttggacagtcagacatcaccctgagagtgacaagtgtaaaatgactcccttcctcccccgccctccggaagtatatttagatacttgaaagcagtccttttctaaaatggccttacctatgtggcctgaacgattaaaagaaagaactcagagttacaagggaaaaagaaaaagagttacaagggaattgtagtctttttctgaatagaatattagtactgtggtattgcatttcatgggaatggaaatgtattggtaaagctacctgatggaagctttctcttggtaacaaaaatggagggtgtattatgtgcagttatttaaatatatgtattccattgttgcgtggtttttttcccccctcaagacagagatttgctcttgttgcccagggtggagtacaatggtgtgaccttggctcactgcaacctctgcctcctgggttcaggtgattctcctgcctcagccttccgagtagctgggattacaggtgtgcgccaccacacccggctaatttttgctttttttttttttgagacagaatctcgctctgttgctcaggctggagtggagtgcagtggcacaatctcagctcactgcagcctctgcctcccgggttcaagagattctcctgactcaacctcctgagtagctgggattacaggtgcctgccactatgcctagctaatttttgtatttttagtagagacggggttttgccatgttggccagggtggtctcgaactcctgacctcaagtgatccacccgcatcggccccccaaagtgctgggattataggcgtgaaccaccgcgcctgtcccattgttgtgtaattttaataattagttttttaagtacttgattttatgggcacatttttgtgggatgattggagttaatcaaataaagcttgtcatgtgtgtagtttggtaagataacttctttaaattcatgttttctctgccttgaggtagtgagggaaagatcttaatcagtattttggtaattaactgattgaattcaagcaaatgagacatcatgaacttcagtggttattgatatttcagggtatatacctgaaatgcctagaggatacagatttctcatttcattctttggtctttcatttctctatatacagaaatgaaatgacacttctgggaggcagtagaagcaggaagtcaatgaattgagtagagggtcccattccctcaggctgtcattgatcagtgacaatttataaaaacaaactgcaaagtctgtggcaagtggctgcctgcttcctagaaggagcccatgaaggttaaactctgtggtcggtatttgcaagcgccgggcgtggtggctcacgcctgtaatcctagcaccttgggaggccaaggcaggcggatcacccgaggtcaggagtttgaggatttgcaagcaaaaggtcctctcctgagtctttcccagatacccagcagtgcagaggctagctgtggaaggttgcagtgggacaggaatgtattgtatgccttgccttacttgtcaccattgagatttccagagaaatgggcataacgtctcttaacaacaacagcagaaagcaaaatacattaacttaaggttgacaacaaaagattatcaagtaccatgttttccaaccaaccagttattcgtggtaataataaaataaaggtgggaaaatgttataatttttaaggaaactgtgtactttaaaaatcttctttatgaatatccaatgttactgtaatcctgctccattaaatgcagcattgttgtcaggtgctgcctcttgcttgggaacagcattgggcttttaaatgtctgcagaatctctgcgttcgaagggaattgagaatgaacttcctggtactgtaatgaaaataaggtctgctcaacacagtaaacgtttcctctcttctttaaaactgcgcagtcatttggcctttgtgtttaggaagggcagattgatagagcacaaagtccaaccccttcatctagcagaagctgcaaacccagacagaggaacgagggctttacctgagtcttgtctgctgctggggctggcttcgggttgcatccagttctttggattctgaggatccaaagcacccaggtctcctccaggtcctcaacctctgggagctgccccaggcagaacttggcaggcaggcataacaggtggggtgggagggggaacctcaaggcaagaaggtgtcatgagacccctgggccggcagagttccttaggagggtggcatggactttgcattttgccagttctctgagctcctactccggggtggatatgcattgaggatgtagtctctgtgtgatgatggggagggcggggaggggcacctggtgcctgtgaaggcgcaagagagggccctaaggtgcaggaccaggactaagctgctacaaggaggtggtgcttaggttgaagcctgaggactaagtaggggcgaggggtgggcagaggggaggagcttgagctagtgtttttgagggagctgcatggaagcctgcacgtggccaggagagggggaatgggtttgatcctgggggcacaagaaggcccttcaggggtttaaactgggtgctggcactaaatgggttttttcttgtaataaactttgtgttgaggtctgtagcacatactgaaaagtacataaacacacaccttgatagtttttcacaaagtgaaagcactagcatatccatcatccagataaagaaaaggaagttggagtttattttaacacttaaacatctgattacagtctggcatccaggaagggcagagcagcatgtgtcagaccagcctacgcctgatcattacacacactatttgaaaagcactagagcctgctgagataccggcaagagagggagagcacgaaccatcagaagaagtgaaacctcatgtggctcacagggaataaaacagaaggtggcaggcttactaggcccaggagccaagtcacttcaggacgttcttggccgctgcacacttgtgtgggggcacatcccagaaaggaggaagccatagaagcccccaactttgccttgtatagtctcatcaagttcttggcgggttcctgtattatacataaacagggcagaattccaaatggaaagcaacacttggaaggctggaaaagctgagtagagatttcagaagatgtgctggggagaagaagtttagaattcattttccatcaaattagagggatttggtaactatttcagactttgcatcgaaaacccagggtgtaggccttaggattaggaccacatcacagaactcaaatctagggtctaggactgagggcaacactaagatagacctaccctcgtaaagcctaaaatgaaggcttcgcagaatcagggtgatcgctagtaaccaaactctgctaaaacaaaagtttttgtgggaaaaaactgaatccagagtgtctatagtatattattcagaatgtcctgtatataaccacatcagtaggcacgacaggaagtgggaacatatgacgtgatcaagaaaaaaaatcaggctgggtgcggtggtgcacacctgtaaccccaggactttgggaagccgaggcggttggattgttggagcccaggagtttgagaccagcctcggcaacatggtgaaaccccatctctacaaaaaatacaaaaaattagccaggcatggtggtatgtgcctgtagtcccagctactcagaaggctgcggtgggaagatcatttgagcctgggaggttgaggctgtggtgagctgtgatagtgccattgcactccagcctgggtgacagagtgagaccctgtctcaaaaaaacaaaatcaaaacaacccataaaccaaggtgttgaaatcattcaataaaaatgttaaaataattataaacgtttttctcagacataagtggatgcttttttattgccttttgatacgtcctgagtttgtgtgtgtgtgtaggtatatgtgtatatatatatttattaatttaattgacaaagattgtgtatattccaggtgtcccgtgtgatgatttgctacacatgtgcattgtgtgattatcaccactgaattaggacacccatccccacctgtgctgcacattagatccccagaacttatctttttttctttttttgagacggagcctcggtctgtcgcccaggctgaagtgcagtggtgtgatcttagctcactgcaaccgccgcctcccagattcaagcaattctcctgcctcagcctcctgagtagcagggattataggcgtgcgccaccatgcccggctaatttttgtatttttagtagagacggggtttcaccatgttgttcaggctggtctcaaattcctgacctcatgatccgcccgccttggcctcccaaagtgctagggttagaggcgtgagcccccacacctggcctatcgcgcaggcttaagtgcaatgttgcgatctggcctcactgcaacctccacttcctgggttcaagcaattctcctgcctcagcctcctgagtagctgggattacaggcaactgccactgcacctggctaatttttgtatttttattagagatggagtttcaccatgttggtcaggctggtctcaaactcctgaccttaggcaatctgcccaccttggcctcccaaagtgctgggattacaggcatgaaccaccacgcccagccccacagaacttatctttaaactgagagtttgtactcttttgatctgcatctccccatttccccatttgcagaagaaaagtcagtgaacttgaagacacgttaatagaaattatctaaattgaaaaacaaagtggaagaagagattgaaaaagaataaatgagcagagactcagtaaactgtgagacagtataacaaatgcgtaactagaatcccaggagaggagagaaaatgtggcagaaaaaaaaatacggagaaatattggccaaaattgtttgttttttgaaaatgcggtcttggcccagttttgaggccctagctttgaggtcctggctagaggccagtcagtcctctagagcagccaatcaagtttacaccctcaactacctcccttcttcagctcaagctccaggccagcactctgacaccccagggcagtaccagacatcctgcaacagcccctgtggcccagcgccagctgagattattccagtcagtctcagtctgctgcccctgcctcacctgttccttcctgggaaaccacaataaggggtcttgcccacattcccctgctccctgtgccccataaccagtggttgcttccactgagtggccctgcgtggagtgctgtttctccccagggaactgagtgcgacatgtcaaatttaccgtttctctcttgatctgcatctggcctcaccggaatcaccactccctccccttaaaagcaggatgaatataaagaaggccacacctaggtgcatcatagtcaaatgctgaaaattaaagataaaatcatgaaaaagtagtagccaggaaaacaaaaacacctgatgtggaggggaacaacaatgaaaatgacagctgacttcccatcaggaacaggggagtgacgtcatagaatgctgaaaggagctaacatcctacatgcagggaaaatattcctcaaaaatgaacctggggccaggcgcggtgcctcacacctgtaatcccagcactttgcgaggccgaggcgggtggatcacctgaggtcaggagttttgagaccagcctggccaacattgtgaaaccctgtctctactaaaaatacaaaaattagccgggtgtggtggcaggaacctgtaatctcagctactcgggaggctgaggcaggacaatcgcttgaacccggcaggcagaggttgcaatgagccgagatcatgccattgcactgcgcctgggtgaccgaggaagactgtctcaaaaaaaaaaaagaagttggaataaaaacattttggggtaactgaatgctgacagcattcattgtaggagacaagtactacaaaattgctttaaaaaaaaaggctcccaggggggtggccccaagagttggggttcagtgtcctccaagccctggtcctctccaataggcctgggatctgccccacctgacccgttctcccgaccctgaggttggcttcaatgctaaggaagcccacaatattgtcaaagagtgtgtgctggtgaagattataatcacatcatcaaccaagcatagtggaacaatccttaacacatctggttaagttgggaaaagcttatacatatattgtgacctgtgcagtggtccagaagagcgcatatggctttcatacagccagctcctgtttttgggataccacatctgatggaacctgtaccataagatgggagaactggaccatgaaccgtattgtcaacgtttttgccattgctagtgttctttaacttactaaaaatgttgggctaaagccattaacttaaagaatttgtcagtgtatcttttcaaaaaatgagtaatatttattagtgtgctagatgacaagcgt

SEQ ID NO: 577 - DNA, 4758 bp, Homo sapiens
cagtgagtttttagcagaagacagtcaagagaaattttggaattttgtagaagccagtcaaaatattggatcatcagatcatgacggtaccgattattcctactatcatgcaatattggaggctgcatttcagtttctgtcacccctccagcagaatttgtttaaattttgtctgtcccttcgttcttactcagctacaatccaagccttccagcagatagcagctgatgaacctccaccagaaggatgtaattcgtttttttcagtgcatggaaagaagacttgtgaatctgatacccttgaggctcttctactgacagcctctgaaagacccaaacctttattgttcaaaggagatcacagatatccctcgtctaatcctgaaagccctgtggtgattttctactctgagattggctctgaggaattttccaattttcaccgccagcttatatcaaaaagcaatgcaggcaaaatcaactatgtattcagacattatatatttaatcccaggaaggagcctgtttacctctctggctatggcgtggaattggccattaagagcactgagtacaaggccaaggatgatactcaggtgaaaggaactgaggtaaacaccacagtgattggtgaaaatgatcctattgatgaggttcaggggttcctctttggaaaattaagagatctgcaccccgacctggagggacagttgaaagaactcagaaagcatcttgtagagagcaccaatgaaatggcacctttaaaagtttggcagttgcaagatctcagtttccagactgctgctcgaatcttggcttctcctgttgagttggctttggttgtcatgaaggatcttagtcagaattttcctaccaaagccagagcaataacaaaaacagctgtgagctcagaacttagaaccgaagtggaagagaatcagaagtatttcaagggaactttaggattacaacctggagattcagccctcttcatcaatggacttcacatggatttagatacacaggatatattcagtgggtcaacaacctggaggttgatagcagatataattcgtggccttctagtttacaagagttgcttcgacccacctttcctggtgttattcggcagatcaggaaaaacttacataatatggttttcatagttgatcctgcacatgagaccacagcagagttgatgaacacagctgagatgttccttagtaatcatataccactaagaattggttttatctttgtggttaatgactctgaagatgttgatgggatgcaagatgctggagtggctgttcttagagcatataattatgttgcccaagaagtggatgattatcatgccttccagactctgacacataggaagcaagaggctactatgagcagactggagttggacctctgcccgttgtgctgttcaatggaatgccctttgaaagggaacagctagaccctgatgagttagaaaccatcacaatgcataaaatcctggagaccaccaccttcttccaaagagcggtgtacttgggtgaactgccccatgatcaagatgtggtagagtatatcatgaatcagccaaatgttgttccacgaatcaattctaggattttgacagctgaacgagactacctggatttaacagcgagtaataacttctttgtggatgattatgctagatttactatcttggattcccaaggcaagactgctgctgtagccaatagtatgaactatctgacaaagaaaggaatgtcctccaaggaaatctatgatgattcttttattaggccagtaactttttggattgttggggattttgatagcccttctggacggcagttactgtatgatgccatcaaacatcaggcaaaaatccagtaacaatgttagaataagcatgatcaataatcctgccaaagagataagctatgagaacactcagatctccagagcaatctgggcagctctccaaactcagacttccaacgctgctaagaacttcatcaccaaaatggccaaggagggggctgcagaggccctggctgcaggagctgacattgcggagttctctgttgggggaatggatttcagtctttttaaagaggtctttgagtcttccaaaatggatttcattttgtctcatgccgtgtactgcagggatgttctgaagctgaagaagggacagagggcagtgatcagcaatggaaggatcattgggccactggaggatagtgagctctttaatcaagacgatttccacctcctcgaaaatatcatcttaaaaacctcaggacagaaaataaaatctcatattcaacagcttcgggtagaagaagatgtggcaagcgacttggtaatgaaggtggatgctcttctgtcagcgcaaccaaaaggagatccaagaatcgagtaccagttttttgaagacagacacagtgcaatcaaactgaggccgaaggaaggggagacatactttgatgttgtggctgtcgttgaccctgtcaccagagaagcacagagacttgctcctttgctcttggttttggctcagctgataaacatgaatctgagagtatttatgaactgccaatccaaactttctgacatgcctttaaaaagcttttaccgttatgtcttagaaccagagatttctttcacttcagacaatagttttgctaagggtccaatcgcaaaatttttggatatgcctcagtctccactgttcactctgaatttgaacacacctgagagctggatggtagaatctgtcagaacaccatatgatcttgataatatttatttagaagaggtggacagtgtagtggctgctgagtatgagctggaatacctgttactggaaggtcattgctacgacatcaccacaggccagcctccacggggactacagtttaccttaggaacttcagccaacccggtcattgtggacaccattgttatggccaatctgggctactttcagctgaaagccaacccaggagcttggatcctcagacttaggaagggacgctctgaagatatttatagaatttacagccacgatggcactgattctccccctgatgctgatgaggtggttatcgtcctcaacaacttcaaaagcaaaattattaaagtgaaggttcagaagaaggcagatatggtgaacgaagacttgctgagtgatggaacgagtgagaatgaatctggattttgggattccttcaaatggggctttacaggacagaagactgaggaagtgaagcaagataaagatgacataattaatattttctccgttgcatctggtcatctctacgaaagatttcttcgcataatgatgctatccgtgctgaagaataccaagactcctgtgaaattctggttcttgaagaattacttgtcccccacatttaaggagtttataccttacatggcaaatgaatacaatttccagtatgagcttgttcagtacaaatggccccggtggcttcatcaacaaactgaaaaacagcgtatcatctggggttacaagatcctcttcctggatgtacttttcccactagttgttgacaagttcctgtttgtggatgctgatcagattgtacgaacagatctgaaagagttaagagatttcaatttggatggtgctccttatggttacactcctttctgtgacagccgaagagaaatggacggctacaggttctggaagtcagggtactgggccagtcatttagccgggcgaaagtatcatatcagtgcactatatgttgtggatctgaagaagtttaggaaaatagctgctggtgacagactcaggggacagtaccaaggtctgagtcaggaccctaacagcctttcaaatcttgatcaagatctgcccaataacatgattcatcaggtgccaattaaatccctccctcaagaatggctttggtgtgaaacgtggtgtgatgacgcctctaagaaaagggcaaaaaccattgatttgtgtaataatccgatgaccaaagagccgaaactggaagcagctgtgcggattgtcccggagtggcaggactacgaccaagagatcaaacagctacagatccgctttcagaaggagaaagaaacgggagcactgtacaaagagaagacaaaagaaccaagccgagaaggtcctcagaaacgtgaagaattatgatctctggagaaggacaggaaatcaccccatttgaaaaacagtttttataataaatgctagttttttctgatctgtctatacaactgctgataagccggctgggcaggagtgccacaccttttgattctgagcatttgattctgacttctgtactctggtggccactggatctttgggattaaagctctgttggatttgtacctcagaggaagaccaagtggctgatcctttggactctgtaaagagcattcttctagtcagagggtggaatggcagcagcaactggaagaaaatgagttttttggtgcccacacccaagagcacacacatgctgcactgtctcggaaagcagggccagctagagccaccatgttcttccttacctcagtttacctgcggcctgcgctgcactgcagatgcccaccctgccctgggtctggccggcggaagctctgtccaaggtccacacacctccaggtttacgccaacatccttgtgccctccccaccttctcttccaacgcattaggtgcattgtttaattgaaatccaaccaaca

SEQ ID NO: 578 - protein, 381 aa, Homo sapiens
SEFLAEDSQEKFWNFVEASQNIGSSDHDGTDYSYYHAIAAFQFLSPLQQNLFKFCLSLRSYSATIQAFQQIAADEPPPEGCNSFFSVHGKKTCESDTLEALLLTASPKPLLFKGDHRYPSSNPESPVVIFYSEIGSEEFSNFHRQLISKSNAGKINYVFRHYIFNPRKEPVYLSGYGVELAIKSTEYKAKDDTQVKGTEVNTTVIGENDPIDEVQGFLFGKLRDLHPDLEGQLKELRKHLVESTNEMAPLKVWQLQDLSFQTAARILDVELALVVMKDLSQNFPTKARAITKTAVSSELRTEVEENQKYFKGTLGLQPGDSALFINGLHMDLDTQDIFSGSTTWRLIADIIRGLLVYKSCFDPPFLVLFGRSGKTYIIWFS

SEQ ID NO: 579 - DNA, 76644 bp, Mus musculus
  misc_feature (1)...(76644): n = A,T,C or G
gaatctaaataaatctgaaagaaaggaaaataatttcacaaagcgctttaaggaacgataagcactggcagaaaaggaaatgacgtgtctgaacatgttgctgagccttaaggattgatttgagaactcatccagggactggagtgcggagtcacaggtgtgcagataaggaaacattaactttcagctttattgtacaaaacaagtcacaattttctcctctaatagtcttgaaattcttccaagactgagctttgagaatgaaatcctaatttttagcaggagagaattttaaaatcccaaatttttattattaatccttggctcactgcatattttctcatccacaactggcctccccacccccatttaatttaaacagtgtatatatgcacatactaaaatgagattggaacacctataaaccctcacccaacctaagtactgttagtgattctcaaagaatggtccccaaagcagcatgagacacaccaggaacttagacatctgaggcccattccctacctgctgaggcagaaactgggatctcagaccagcaatctaagctttacttagctcaccaatggactgtggtgcacattagtgtttaagttagagatgagctgcagttgagatctgtgcgctgtgtccttccctctcttccaagagtaatagtgccctgagggtttggtttttgtttttggtttgtttgggtttttttttgttttgttgagttttttgtttgtttgtttgtgttttatttttttgggttttttttggggtttttttttgttttgagacagggtttctctgtctagccctggctgtcctgaaactcactgtgtagaccaggttggccttgaactcagaaatctgcctgcctctgcatcccaggtgctgggattaaaggcgtgcaccatccactgtgttgcctacttgaaccgggtacacctggagagagagagagagagagagagagagagagagagagagagagagagagagagagagagagagaggagagagaggagagagagagagaggagagagaggagagagaggagagagaggagagagaggagagagaggagagagaggagagaggagagagagagaggagagaggagagagagagagagagagagagagagaatggannnnnnnnnnnnnnnnnnnnnnnnnnnnnnnnnnnnnnnnnnnnnnnnnnnnnnnnntaccccccccacccacccccgccaggcttcttgatgtattgttgccaagttgttagcactagtctgccggctccacacttggtgcctggagccatttcgtcagcactcggtggccaggctggccgcttattccggaaattctcaggaaaacgggttcagcttctcagcaggtagcagaagagcagggcagttgtcacttcgaaagaagccagccaggtcggacagctgcaccacaggtggccccacctcagtggcagactagtctgtaccagcccgcttcaggctgggggaagctacaccactgcacagcctgccctgaggttttacttacacattcacgttcctgtatagcaccaatgcatttgagtaacactgcctatatttaattaccattttaaaagacagcggggcacgtagtctctatcttacctttctaattcaacattttcttcctaagattcaaccatattgttcattccttttgacttctgcatggtgtgtaaagacttgtggtgagttggatatgctttttgggatgatttagaagatagactgatggcgttctctacaggaactacagaaggtgaaacaaacgtccacggcgtagtcagtctgtgtgttctagttgatctgcaaatttgcaaaaggcaagtagaaagtagataaaactaaaagtagagggttgtctgctcactagcattcatggtcctggaaggtactctgcactgactagaggataaagctaaacaccaagccagttacaaacctttccttatgcaatgatggcctctctgcatgatatgctggtacaacaatgccacacaagatgtgggagtaaccaaccactgtctggttggatttagggaccactccatgaaataaagccagtccctgacacttctcagttggccaagaacctgagactagacaggcatggacccaggagcaaaccaaacactactgttctgctagaaggacaataacaataaaatgacgcctaacaacattctgctgtatgcatagatcagtgtctcactgagccagcatcagaaaagtgtcctcctacagatgagagcttgtatagatagccatgagtgaacagtgtgcagaggatgagaggctgtggaacactcagtcctaaatgggacatcttcatcaaacctcagggctcaggaaacgatgctgaagagaaagaaagaaagaaaaagatggtgagaggtagtgaagatgagagacaccaagaaaacagcaccttccagacaggatcaatgcatatatgaactcacagagacagaggcagctaacccggggctctacaagtaggggcctgatgggtcccagtgctaagagggtcacaagtttacatccctaacccagaagctacctccagttagcaaatgaaaacttgttttctcagaggagtcttactaggatataaacctcacttagggcaggccccaggctcagcaagagttggctgacacaaaactaactcagtaatacctgtggagatggtgtgtctcataacactttgtgtgctcgggttttaccttttgcttatctagtagtttccaattttgtaatttttatggtgtgtgtgtttttatagtgtgtgtgtgtgtgtgtgtgtgtgtgtgtcctttgtttttgttttctctgtttcctttgttttattccagtttgtttgtttattggtatgtttgttgtctaaaaacgaagaaggtggaactggatgggtgggaggcagtaaggatgtgggaggactttaagaggagaatgtactttatgaaaagtttatttccaattttaaaaagaaggaaaaaaaattgaaaaggggtggagttgtataaggtaaacgcaactggcaaatcaggttctccttcaggtctacagtttccgttgccagcaagtcagtgcttccgcagacaagcgtacgctttgtcctggcttgttttctgtggctgtgataagcttcatggcaaacaacaacttgggaaggaaagagtgtattgtagcttactttctatctatcatgaaaggaactcaaagcgggaacctggaggcaagaacggaggcagaatccaaggaggaacacactgcttgatcccatgacttgctcagtttgcttccttatacaacgcaggaccacctcatcagggtgacactggccacaatgacctgggggcctcctacagcaatcactaattcagaaaatggccgcagacttgcctacagacaatccaatggaggcatcttctgaatgaggctttccctcttcctagatgactctagcttgtatcaagttgacaaaaaaaaaacaagcagaacacctttttctcccatcttataaataaaatgttgagagcctactagggctctgcttctctccttccctgtgtaacagaactccctgaagtaaacagctgctcatagatgcaactggttcaagtttggggcaatttcaaacagaattgatatttacattctcagatgtctctcttggtacctacatgcaaatgtttctctgagtctatacctaggaatgaaactgctggaacattaaaaaaaaaatgttgaatgttcagcttcacaggataatgccaagtttcttccaacatagttaaataaattcacactcctatatgcactcttatacatttccttggaaaaaaatcagtacttagtgtcatatgttttcattctggccagtcaagtggatacaaagttatattactgatgttcacaacatccaaaaagtgagatatgaaatgttctgcatccatacagtgctttctccacgaggttagctcttccagcccgaatcctcagtcctgacttgctcagttgctttcttcagtgctttaaagtttttatcatagaggtctatatacttgattcaatataattcaaggtaaaatgttgaagctgctgggtggatttctgagttcgaggccagcctggtctacagagtgagatccaggacagccagggctatagagaaaccctgtctcgaaaagccaaaaaaaaaaaaaaaaaaaaaaaaagttgaagctgttgtgaatctgttttcctggttgctttctctatctttgacattggcataaaaggcatctactgatttttttttttttatgtgttgactttgtacccagccactttgctgaaagtgtttatctattctaaaagttttctgatgcagtcttttattttcttgagacagggtttctctgtgtagaccaggctgtcagacttacagagatccatctgcctctgcctcctgagtgctgggattaaaggcacatgccaccattgctgggctaaagtattcctttgggatctctttggtattgagtcacatcccatctgtaagtaagaatgtcttgacttcttcctttcatatttgcatcctttttaactttttgctctcactctcagttcaacagcattcaggaggcagaggcagacagatatctttgttcaaggccatcctggtctacaaagtgaattccaggacagacaagggatacacacacacacacacacaacacacacacacaccttgtctcaaaaaaaaaaaacaaaaaacaaaaaaacaaaaacaaattaaacaaacaaaaacccccatattgttgagatgtagcagacatcctggtcctctgcccctctgggagggattatattgtagatgttatcatttggtgccaggcacctgatggtcagttgttctccacattttgactaattgtggctttttataatggtctttgatgcagttttctttgatgagagactagagctgcatttctctgtggttacaaggatttaggaagaagttagcaattacactggtttaggaaaagccaggaataggtttccttcttgagaccatccatgacctcaccagccactggtcatttgctatgtttataataagagacttgaattccttccttttgagtgtgccttaagtccaagtattgtccacttacaaataaatgacttaaaaagtaataaactatttgtccatgtatgaaggagaatatacatattttagaaataattcaagggtgggagaataatccttacagaacttttcacagtggaaacttaaaataagcaaatgtttcttgcctagtgttgttgtgagaatgcagtgaagtgccaggataaatattacagaatcctcagaggttggtgtcaagactctcacagacacccaaatccaaggatgtccagcccttatataaaacaatgcagtacttgaatatcatgcacaatcatccccactgcatcaaatcatctctaagctgtacactaacatgtaaatgtaaaaggtcgtatgtaagcgccttgtgcttgtcaggctgctgtgttcaggaacaataacagcaatgtctgcacgtgctctggggcagctttccaaacacagcttcaagatgcattggtttgttgttggtgggattgcaggcttgtacaactactctggaaatcagtttggcggttcctcagaaaattggacatagtactaccggaggatccagcaatacctctcctgggcatatatccagaagatgccccaactggtaagaaggacacatgctccactatgttcatagcagccttatttataatagccagaagctggaaagaacccagatgcccctcaacagaggaatggatacagaaaatgtggtacatctacacaatggagtactactcagctattaaaaagaatgaatttatgaaattcctagccaaatggatggacctggagggcatcatcctgagtgaggtaacacattcacaaaggaactcacacaatatgtactcactgataagtggatattagcccaaaacctaggatacccaagatacaagatacaatttgctaaacacatgaaactcaagaaaaatgaagactgaagtgtggacactatgcccctccttagaagtgggaacaaaacacccttggcaggatttacagagacaaagtttggagctgagatgaaaggatggaccatgtagagactgccatatccagggatccaccccataatcagcatccaaacgctgacaccattgcatacactagcaagattttatcgaaaggacccagatgtagctgtctcttgtgagactatgccggggcctagcaaacacagaagtggatgctcagtcacctaatggatggatcacagggctcccaatggaggagctagagaaagtacccaaggagctaaagggatctgcaaccctataggtggaacaacattatgaactaaccagtaccctggagctcttgactctagctgcatatgtatcaaaagatggcctagtcggccatcactggaaagagaggcccattggacacgcaaaatttatatgccccagtacaggggaacgccagggccaaaaagggggagtgggtgggtaggggagtgggggtgggtgggtatgggggacttttggtatagcattggaaatgtaaatgagctaaatacctaattaaaaaaaaaaaaaaaaagatgcattggtttgactatccagatgcgaaacctacatatcggtagcaatgattgtgaagacaggaacatatgccacattaataatgaaaatgattttaaaatattgttaaaagtctaacaaaattctgctcttttgcagttgtagagagaaatggcctaagtgttattcagttatgaccttaagaaactataaactataaactataaactcttgctataagagaagtgcttgtgagtagtgatgcctttaattccagaactctggatctctgagttcaaagacaatgtataaaacctagtatagatagtgagttccaggccagccaaggcagtaatgtgcttctcttgttaagcatgatgatctgtgttcaatcttcacaagcaacattttaaataaataaataaagcaagctgagcatggtacaagcccagtgagagggagggagggggatggagacatgtgactgcctctggcttgtttgcctgctagcctaggctacttggagagctccaaccaaagagagacacagtcttaaaacatagggagatgctgtgtggtggtggcacacacctttgatgccagcacttgggagacaaaggtggaaggatcttggtgagtcaaggccagcctagtttacagtgacaaccagggctacatagagaaaccctgtctccaaaaaaaaagaaagaaagaaaaagagagaactcctaagatataacacccagaattaccctctagcctccatgcacacacacacacacacacacacacacacacacacacacacacacaagtaattagagtatgtgcacacacaataataataattatagcctaataatacataatatatagctacatgcataataataagaaagagctgcatccagtcagcctcagtcgaaatcagtagccttctttctagctcccttcgatgtacttaaagcatcttgctcaggctgtactagtgatatatcaaatatgaaatggatgtcctttgacttcatttggctatttgatttccttttaccctctacaaaataaaacctaagcatccaaagcccttagcatagctctttcctcattcccaggctagcttcttttttttttcttttttcttttttcttttttttcttttttctttttttttttttttttgcttttttttttttttttttttttttgctttgctttgctttgcttttgcattttatgtcctcgcagtcagttgcttagtgttgctcatttgtgccatcgtgtctcacaagtctggctttagtctgtgcccctcttctccagtcacatgctcccacctctctgtgtcagtctcacttaccctcgaaaccatccaggatatcgtcccatatgttcctgttgagtcatcttttgtatccagtgctttttaagtacctggaagtggcaggcacttgataaaggtagtggatacttaataaacaactctccaataccgtaattggtgccagtgaccagcaaagattccattgctactgtataacagcacaacagtccattctacaaaaaagaacatgaaatatggcaatcactaatctttgtaatgatatgagtcactctttctgtctactgattcatctaatttacccagaattcccttccgctgactatgcccatcctttaacatggagaccatggaatgctctcctatacaaaatgcttttgagaagtaaaatacttaaagaagtacggagcaaaagatgacagtgatccacagactaaataacccacacgctccttccagggttttcatgtgcacaatttaatgggctgaatttttcctcaccactggcactctccaggttctcaaaggagatcagggttgattttgtaaatagttgaagtggtgccgaaatcacttccttccaatcctgacgccagctctgtctcataggagcattgctctctgcaggccgggtgctagggcagaacaccagttctctcccagtcttgaaagccatcctgtggcagatgtcccactagggacagtttaagaggaaaagaagttggtactcaaagaagtcaagtaacctgcccaagagcatctctgtggtaagcatgaggagactgcactcacaagcagcctgcttccaggcctccctctgagtggctggagcacacatcctattgtgcacagcacaacaataaatgtgcattgcagtggctccatgtaaaccaccctttacctcggcatgcagcaaattaccatttacattacaaataagattaaaggagtcaacttatctacatttgatttttttttttttaactaaggccattttgagacccatagcactgtggtcaggcagtactaagtcctctaataggggtgttttaagtcaaaagcattgggcttgtgagctgcctaacccaagggcactggctgcttttgaggtgtggttccagcactcacaagggagtttatagccacttgttgccccaggtccaaagggtctgacgcccctcctctgggggagggtccctgcaccacacacaagcacatacataaataaaataacaaaccaagaatgctggagggaactaattcctctgtaactgtctcatctttgcaattacataggatgtttttccttttaactgtttttttcttttttcattagtgcatgataattgaacaaaagaaaaattaaaatcatagtgacatttctatatatctattcaatgtactttgaccacattcactctttcttccccaagtatttatgaaatagcttacgtttttgtgctttttttatacttggtggttttaatcagcacatctttccagaaaaaaaaaaaaaaaaaaaaaaaacccgctgtgtggnnnnnnnnnnnnnnnnnnnnttccacctaggactgagaactttctaggtctctctctctctctctctctctctctctctctctctctctctccctccctccctccctccctctccctcttcctcttcctcttcctctcccctctgttgtttcctcagaaaagctcacttcctttctggaattaatattgtttccaacacgttaagaaacaatctctgtctctctctctctctctctatctatctctctctctctctgtctctctgtctctgtctctctctctgtctctctctctctgtctctctctgtctctctctctctccttctctcttccccctccctctgtcctttcctctctccttcctttcctccctcccttccctctccccctcccttctgcttcctcggtagaagccgggaagcacaggactgaccagaagaaacagaaagaaccgcatcactttgactgactttatcttctatccgtagataatcacaccagagttgcacttttgtctttaattccgtttctggacacctcttttccattcagccaactgggtgagacaaagcccgtcggtgccctgagccgcagaactctggtcgggggctggctggctgtaaattgacgtggcatggaaattctccactaagttgcagcagctcacgagctcctcaaagatcgagcccagcctccgggagctggagctaaggctcagtaacagtaacgttaaagaagaatggataaaagtccccagctcctcgccttggacccgccgctttctttctggctatctgtcatttcgctgaaaaccaaatcaaagcagttagtctgtaactttgttttcgcagcttaaacaacaaaattgaccgcgcttgctcctccggctctcccctgcaatcttaactccttgcagactttgccatggggtgcggacttaggaagctggaagaccctgatgaaagcagccctggaaaaatattttctaccctgaagagaccgcaagtggaaacaaagacagaatttgcttatgaatacgccctgctggactttactttacaaggtactccttatttctattgtagctagtgtctgtctccaaaataagagaagactacgtttctgaagtgtggacctgtggagtcttaagctcttttccataatgaaattggtccatctaacaatgacgctttgtttcttaattatatttggggagattttgggttgtattttgttttgtgtgcttttttttttttttaacatggcttatatatactatacaaaattaagaaaactacttggaaatgttccttttatttttaaagcaaatgggacaaatgtttgatttctaggccaaattgctggagccttaatgacagcttgtgttttgaaaagatttgaaaggcagggactgtgggctatgggcagtgctacttgtatgcagttgtggaaaactccgccaaggcaattctgaggtggccagtgtgctgaattgtgtgttgctcatgtgataggtttgaccaaactaaaggttgaaagaaattagttgtttttggttttgttttaatgggggaaagtagcctacagaaggcactccctcggctgggtgctccgtccctaacagagaaactctgttccaaaaagttgaaaacacaaacaaacaagcccagatggcagctccagcaagggaagggagggaaggggctgaggtgcctcctcttgacccaagtctttgcctccctcctctctggaaaccctgaatactgcttcagagtccctgagacacaggacatagcagggtttaaagcgaactgcgtctgtaattatgatgtgctaaaaaaacaaagaaattaaatttagagaaatttgcttgctgaattttccaaatactagtattaagttcctattttaattctttgattctacagcccattagttaattgaaaactgtactgcgcatccaactagatgcttttactccctaccaccactgccgccttccccctgaaaacagtgcatctttgtgcacgaagcaagagcagcccatttttctttgttaaaaactgagctggccagcaagtaaaattcagagacacagaagatctgtacctgtgcttcgaacatattccccactttttttgatcaaagaatccaagtaaggacaaggctgccaaaagaagaaaagttaatattctcaatgttcttctttgttgtgtgaatttaaagtggattgagttaatgctgatggaaaagtagccaaaaagtcatgaatttttatatgcctttttaaaaagtcattcgggaaaattctttgagacagggagcttctacagtgtggttctcgtccttaccaatacagactggatagggcagaaacgcacagggtgggaaagcatgcctttcttgtgtatcccggaagctgtaggctagaaccattgtcttgtgcaccttaggatcctgaggcacagctcaccttagggctatagagcttcaagaagctaacatttttctgattcatgccatttcaaaacattagcacctccaacaaatttctatatatgtgattacctttgaatcaagaagatacacagcttttactcaacagtcattttggttttatcagaaacctttttctccatgaaaggagcataatttccaccttccactctagatgttgctgcgaaagggtaatttcaccgtaaagcacaggcatgggtttgatgtgcacatgcgcacactaaggcaggcgcatgtctttaggtagcatctgcttcctatttggtacaggcgcctggtctccggggcccatctcttcctagttctcccacatgttcttgtttggggtttttgtttaaccatttgttttggtcttgcctttgcgtttgcttcagaagccaggactctgtgtaccagcccaaccccgccccctcttccaggcgtagttagcctgcctctttcctccattctttgacagccacctgcctgccactccagagtctatgatagtgcgtctgggtgggctaacacatgccagccttctgctcggcactggccaacccttcctggaattgctgggaagagaactgaatggtggctgctcctagctgccagaccaccacacagtgagaaaccttggcggaaacaaaatggcctggtgacagctgtgtgtattcctcagttttgtttttgtttgttttttcccaaacagtagccatggaacacagaataaagtttaagaagggagagccttccaagtccctgtgttgtgttacagtttgtcttgaacaagttgtttctcactcagttctacctttctcccttccccaatcattgcatcgcaaattctgttgtactaactttcggtggtagtgtatgtgtcttagtcagggttttactgctgtgaacagacaccatgaccaaggcaagtcttacaaaggacaacatttaattggggctggcttacaggttcagaagttcagtccattatcatcaaggcagaaacatggcagcatccaggcagacatggggcagaaggaactgagagttctacatcttcatccaaaggcagacagtagaagactgacttccaggcagctaggatgagggtcttaaagcccacacccacagtgacatacctattccaacagggccacaccttcaaatagtgccactccctgggcagagcatattcaaagcaccacagcaactactgtagccaaatgaaatgtagttttcattcactgctcagtggttcagagcagcccctctgttatgggtacatgctctcgttactaccctctttccaccctctcaccaaatatccagtcggatgcaggggagtgctcagtcagcaaatgcttgttgtccaagcataaggaccggaggagtcttataaaactcaggtgtgtcgagtgacccctgctccagggagacaggcaggcagatgtctggagagtgctatccagcctcaccagtctgagtgccagactgcctgaagcctgcctgtctcaaaaaataaggtacaaagtgatcgtgggcaatgaccagtgtcaacctctgccctccacatgatgtacacacatgaacacatacactcgtgcacacacgcatgcacacacacatgcatgcacacacctgatccaaccagaatacaaagaatttaaattcccccatttcttctctcctctccattctcattaccactctccatagccattcatttcctctctgctttccctgccctctgtcttcagtggcttctttgtttgttgttgtttgtttgtgtttagtttgtgttttttgttttgtcagttgggaggatgtgatgtcttccagtcattccatacatctcaacaagaaaataatagcataatgattaggcacacaagactctagtccagtgattctcagccttcctaatgctgagaccctttaatatacttccttatgctgtgaccataaaatcatttttgttgctacttcctaactgtaattttgctactgttgtgaattataatgtaaatatctgacatgcaggatatctgatatgcgacctccccaaaggggttgcaacccacagtttgagaaccagtgttcttggcgtgggtcatgagtccttttaagctgctgtgcagatcccttaactgcaaacagggattctaacaatacttacatcagacagctgctttagatattaaaggaaatgacagaagattacccacaggggagtgttcactaaagctagctgctgctgtccctcctgtgagaacaaggctctatctctattccaaggctgggacggacctcatccctttcctttaaactcagttcttactcctctttgtattcatagctagaagtggtgatttgaggggcaactcaaataaagtcttcaaaagagggagtatgtggccagccaaagtgttctggcctgatccggggcacagctgtaaagagaataactcaaataacatgagtgagccaagagcacaggtttaatacagaaggagtcagttatgtaaagtattagagaaaattcaagaagaataggaatgtcgctgtgtgagaacgtactgaaagttaacaagagttaatatatggtcagaaatagagggttttttttaataaaaaatctagtcatgatagtgtatgcctataatcccaggtcttaggagtctaagacaggaagattttaagtttgaggccagcctgagctacagagcaagacctgtcagaaataaaaaagaggggggaggagatagaggtgaagggaagtaaaagtcaagttgtattttgtataactgtatcgatctaataaactccaggacacatgcccctggcgatcaaagggtttttaaatgttaaagtgctgctgggccggggaggggggggcgcagaactagtcgtaatgaaattgactggatcctcttcagcattgatatagtctctattctttcttttactaaactatataaggtgtttcattatgtttgaagtggtaacacagtccacctaagaagaataacaaacacagacaattgtggaaaagaatgccattctgagtctggagaggaagggatctctaataatagcaggcagctgacccacttttaaaactgtcaagaactggcagtgtgcctagttggtagtgtgtgcctagtatgaatgaagtttgggttcagttctctgcactggataaaacaaagtgtgaagaagacacgggcctgtaagcccagtactgtgcaagtggaggcagaaggatcgatcagcgggtgggtcaaagctgttgttgtctgcacagcaaattcgaggccagcctatggtacatgaggctctgactaaaaaacaaaccaagaaaacagacaatgccactcttagtccgtctgtgtacacactaaaaccgcccggttctgtgtatgtgaacagactaactctgcaagagctcctgtagcagggcctgggcaggaaacaggagtcacagcatcctttcacattgtgcctgccctgtgatgcagcctgggactgcagaggctctgccgtggacctgagtgggcaggtccaggaaggctcttcagaagtgcatcccactgcatcccagatgtaaaggatgagtgaggctcaggaaggcctctgtcctgaaagcttcaaccaccactacaagacagtaaggaaaagacagctcaataaaggaatagacaagaatctgaacagacaaatcagaaataatccaagtgaaagacatgtgaaactgcattccaatcatcggtgaccaagaacatccgtattacaaccactactacaaaacacccagaggaaataaaattttgaaaggttgctaatatcaggtgtcagtatagtgctataatcatttgaaaaacagttgatattttctacctataactgaagatatgcccagtgccgacatacaccatgtggtgcacaaggatgtccaagtcaagcaattgggaattcccaacccacaggcatgagtgaccactggactacagatatccactaatgcagggcagggagatgggggaataaagggcatgggagaaaacctgcgtcccatcagagttccggtgctctgggaggttggatgcattagactgctgcatgctttccacacggccccgggtgggtgtctggctgtgtgaagccacggaatcccagcttgcgggggaggggggtggacaaggggcagtcttaggtaccagattctcggcctcgagcatcccagacacctgctggacaccatggaagagctgagaacagaatagggtccccaggggcagctcagtcagctccggggccgaagggtggagagggcaggggggagagggaggcgctgggtggttcccacacaggcgagaggtccttggtccagtccatggctagagcgtaggaaggccttctggtgggaggttagacatggctccttaggagaaagcctatcccatcgttcaagcacagcgggccatgatggttttagagctttattttagaaaggcagggtgaaagagagaaggtagaaagagggagagaggctggccatggccacatggagagagggggaagggagagagagagggagggctagagagtaagaaaggtgagggcttaaagagatccaggaggggccaagcagctcctcttatagtgggctgggctatcaggtaactgtggggaggagcatacctggctatagtcaggtaactgtggaggtggagtctaaccagaatgtcagaagcttgggacattgtctacatgactgatagtcacggaattatggagttgggggctctgtggtttcagacacctgtctctgggaacgtggctcagtttctgtcccttgtagagttttctactgggtcaccggagcaagcctcattcaagcacaatagggtgcctatcacagccgcacacactaatggtttctgtaaaggaccaaactataacatattagtctttctgagccatgtggcctcagtcacacctgattgactctgcacaccatgctagagctgccaaaagggatacacagctaaactccacggcggtcctttgctgactgctcttacagtgcaatgagagcacaactttaactgtcacaggcaagtccagcactgtggggtatagagtgagatacctagtaaccaccgtatgatcccatttcatacggctcaagacatccatcaggtggcctgcccaggggcaggctgctcctttagcacatagtctatgcttgacactgcattgtagagactagggctgtgttcctggtctgcagcactaagggaagagcaaggagtaattactggacagtcaaggctcagtatggtggaaggatggaaccaaaattggaaaggatggaatgggaggtctcggaagagcaggccactttctcgatttttcattaaataattgttacctgggagttggtagttttaagtatgttctgtgcttgtttcctgtatatgttatacccaccatcagggtacagttgaaagtgtggatgggaatatggacggagataaagcaaacaaggcagaaagtcagggtgactggaggtgagaagcaggaggaattctgtggcctgagagaggcagcacagaaagtggagagaagctttcgtacgtgaaagagaaagtagacaaaggcaggtcacaagattcccaaaatgccatgagtctattgtcatgtgtccagtgccaagcaagttacaagcctctaattctagcacttgggagcctggtgcaaaataactggccccatgttcaaggccagcctggactccaaagaccctgcctcaaaatacaagtagaaagaaaagaaaaagaaaaactgccattatgttacttcatttaacaacatgagtgacttcagcagtggctagcttcactaataaacaaaggtcgaaatgctatttacattgtattccatttctcgatttcttaaaacttataatcctcttaacagccacatgctaagatactcagcggtctatcatagtctaaaccagtgattctcaacttgtgggtcttgaccctttcacaggggtcacatagcagtatatcctgggtaacagatatttgcattactattcacaacagtagtaaaattgcaagtataatgtagcaacaaaaataattttatggtcaccaccaccccacccccacccccaccccacacatgcgagactgtattaaaggactgaggtatcaggaagattcagagccatggtttggctgatctcatgtctggattcacaaatgttcaacaactgtggttcaaacaataacgttttccttcctatggcactggagtgtcccagtttccacctcatcctgcctgggttccagctcagcctcagaaattactaacaataagtcaatgtcctaatctctctccttgagttgccctatcaggcaatcagatccaccatgcagggtttgctggaatcgagaactggccatggcctgatcacataggacttggcacttataggagttaactctggtctacagttgctggggagagcatacaggtcgccaggccattgccccctttaaactatggcaaagttgctggctggagtttgcacattttgtttttacttaagataacaattttagatgcattccataaatttaagccagtcctcagaggtaagaaatgaaatatgtatttctcatagcactatgtcatcagggccgaacttttgagtgtttaacaattgcttgactttatggtggagtatggctttgtatcttttttagtaatttgggcttgtttgtttgttcgtttgtttgtttgtttgtttttaaggcctcatgctataagccagcctagcttgaaactcatttatgtaacacgggcagcttcagaacttgtggtcatcttcctgtgtcagcctcccacatgtagggatgacaagcatgaggcaccatgtccactgactggcatttaaagggtcactctttggagctttttaccaaaggagtaagaaaagcatcacagatacttcgtttttcggagctttgagaagagacaatgttgttcaaccctcaacatgttttaattgtagcaataaaagttcccttgctgtttgtataattttcaaaacagttacagactgcttcataacaatagccctgtaagatacagcaaggcttttacagatcatgtaacattaatttaccagtaaccagccacacccacagggccataaacaccatgtgttccttcttcccaacaccttgtgcagcactcaggcaagcaagaaagcatacagctgctgctcactgcctgtgctggcaatcgaccagaagccaccgcctcctcccccttaatcttgtgtgtctacagctctgatattactttcctacataaggacatcaaaccaaaggcttgtcctcaaaggctgggcctgtcatagatttgtgattactccactctgagtgcagttgaaaagtccttgctcagtgtgtcctgcgctgcccgcctcacagtgcgaacaattaggtttgaatacctaacagtcaacaccaactctgttgaaaatattcaggtggagggacgacatgaaaagaagttctccacaaagcttttgaatttgagatggagattgacaacaagacccctggtctacacacacatgcactcacacacacacacagacgcacatacatacacatatacacatgcatatacacaccaatatccacatatgcatgtgtacacacacatatacacacacatgcatttacatacacacctaatagtgactcctaccaagccagccagagacaaggccagctcagtaaagtctttggatggaagtcacactattgctcttcaccaaatcctgtcctagtttgtcatcccgttgatatagtaaataccatgattaaaaacaacctagaaagaagtgggtttatttcatcttatacttgcagtcatgacccatcattgagggaagtcgcagcaggtacccttagggagtgtcttagttaggattttactgctgtgaacagacaccatgaccaaggcaactcttataaaaaacaacatttaattggggctggcttacgggttcagaggttcagtccattatcatcaaggttggagcatggcattgtccaggtaggaaggtgcaggaggagctgagagttctgtcttcatctgaaggctgctagcagaatattgacttccaggcagctaggatgagggtcttaaagcccacctattccaacaaggccacaccttctaatagtgctcctccctgggctggacatatacaaaccatcacagggagttcccattaaacagcccagagaagcttataaacaagtaactgtaatacagcagtgtacacagtagaggaaggaataagtaacgtggggttggggacagagaaggcttattgtggtgagacagagtgacagacaggttcagaactctgaactgtcccatgtcaaagtgaagtgcacaagagggaggctggcaggaggcctggagatcctgcaggccacgctaacttctccgcttcctgccctattgccatgggagccattacatggctatagttttctttaaaatgatgtacaattgtcacctagttctaaagataagttcccattacatttcattctctggtcctaagaatttgttccacattgttgttcctcagctgctttcttaaaaaaaaaaacaaaaacaaaagtcagggtttgtagaccaaatgtttaaaacaagagtgaagccagatgggtcaggaagcctgccacacagacagacagacagacagacagacagacagacagactgggctgggtgtgtactcggagaccaggtgcttcttcaaaggtcaggactgtcctttgttctcatgtctattcatcatgatgaagaaaatattttagatggtaggatattagttgacatccaagagggactaaaacggaaggaaatgtatcggcatgactctctgtggagtgcctcgttttcgtttgagaagctggggtgagtgctcactgctgtggaactgttccatcacgtgagtgttagtgtgagggcgtggagacttcctctgacccttcttcctcatctgcgccttaaccttcttcctgtgctcaggcaatcagcaacagttctgcgctggactccactagcccgtgaaaagccagcccagcccttacttgcaatgaattgcatgttttcttactaatcagctccaggtctctttctggataattatccttattgtcctccataaaatgagaagtattaaacagagaatggagctatttaaatgaatacctctagaactgtggagacaggctctccagctgcgtactggctttgcttttaatcctgtagtcaacacaagtacgttcttagagagtttgggggggggggtgcagtaggggggtggagacttcaattacatggcaggggcttttttagtttattttggtttttgttttgttttgtttgtttgtttggttggttggttggttggttggtttggttttttaagacagggtttctctgtatagccctggctgtcctggaactcactctgtagaccaggctggcctcaaactcagaaatccgcctgcctctgcctcccaagtgctgggattaaaggcgtgcaccaccaccacctggcctacatggcagttttgcttttaaatttcatctatgtctagttctgttcttttctttaatgatttctgtctaagaaataaaatttctcccctttttaggttttaaacttatagaaactgtatctttaagaaatcatgcatctcttcctttaatcccagaactcaggaggcagaggcagtcagatctctatgagttcaaggccagcctggtttacagagcaagttcctgaacagccagggctacaaagagaaaaaacaaaaagagaatactaatgctactaaaaataataaaaagaaatcatgcatctcatcctagtcctaaaaactattggctctttaaattatcattttgatgtacatcattgatatcttttaaaggcaatatagtcacttagataaaacccttcatagtaaaggaacatgtgaggccgtctggttctggacatattggcaacattgtgtatccatcagttgggtcaatcacctttagctattgtctaaaacaggattagtctacagtcatactaccctgaacacatttaatctcacttgaaataggaaatatataacacatgttagtgtgtcttactcaaaattaagccatgtggctggctgtctctcctattcactaatattatcacatactgatagaaataaggtagaattcaatattaccaatgtgaaattttctcttcattcttggtatctcagcttcaacaaatccagacgtcatcaagataaattcagtcctggatatagttgccaaagtggaagactattatcttaagggctatgttgttggggccattcacccagttatacaacctgtggggcagcggaagcaccttccagcaagtcacctgtacagggcggtgctgtcccggctgaagctaaggtaagcagagcgcttgagaaaagtcacctcagagacagttaagaatgatgactttctttaatctttttttttaagatttatttattatatgtaagtacattgtagctgtcttcagacacctagaagagggcatcagatcacattacagatggttgtgagccaccacgtggttgctggcattttaactcaggaccttcagaagagcagtcggtgctcttaaccgctgagccatctctccagcccaatctcaagaagagagagagagagagagagagagagagagagagagccagaacagcccccacccccaacgttgtctttactctttggaggcaaataaataccaagggagggtgtgatcgagaaagggaaagtcgagagagattccaaggaacgcccattaaagctgggtgtacctggcaacttcctacaggaaccaccagaagatannnnnnnnnnnnnnnnnnnnaggtcctgaattcaattcccagaaaccacacggtggcttacaaccatctgtaatgggatctaatgccctcttctggtgtttctgaagatagctacagtgtactcatgtaaataaaataaataaaccttaaaaaaaaaaaaaaatggtagctggagcttagcctgcctgcatcctaaaactttcatagtagaagaaagcactacaatgccaagttctcataaattaaatagacatattggcaacgtttcccctgggattcttgggattgaagctatgctttctttaacaagcaaaacggggtctgaaggaccttttgggttgagtacatagttcagtggcacagcacctgtgcaaggccctgcgttagctccacaagaaaactgttgtcttagttactgttctaacttaggtgttgtgaagagacaccatgaccaaggcaactctttaaaagagaaaccatttaattagggagttgcttacgattatcacgtgatggaacacaggcagtggcagtgctggggctggagctgcaggcggaaggcagaagaagaaacactgccctctggcagtgacacccctacaccaacaaagccacacctaatccttcctaggtgatcaactgaagactaagcatgcaaatgtgttagcctaggagggccatgggcattcaaaccagcacagctgctttgagtctctgcaatgaagaatgaaaatggccataatgttgcctcaaattaatatattaaagagtcttgcacaattcttcatctttataaaaactgtcttagggacttctggctgggagaggtacggtgaatactggccttgcaagctttgaggttgagttcaatcccagaacacataaagggtggaaggagccagccccacagagctgtcctcagaccctacacacacactcacacacacacacatacacacacacacactcatacagacacacaataaagtgatacaatttttatctcaaaattgtgtttcctcttcacagtggtgggtgaacagcaatcttactacgtaaaggctaaagaaaatcataagaggggaaagggtgagagaacaggaaaatgggaaaaggaggggagaagagagagcaggcctttacattttcagatggtggactaggggtgcatcagtcaatcgagtgcttgcctagcatgtgggaagcattgggctcattttctggtaccacagaaaccagatataggctcacacgcctgtcatcctagcattcaggagggtcaaaaaataaagtcattctctactacatattaggtttgagacctgtctgagacacttaagttatctaagtattaaaaaaaaaaaaaaaaaagctgggtgatgttggtgtatgcctttagtcccagcactcaggaggcagagggaggcaagctctctgagtgtcaagaccagcctggtctacagagcaagtaccacaacagccaaggctacacagaaaaagcctgttctagggccggtggtttggcggggaaggggggagcgagcagaagttttggaggttttgttgttcactgctaaagatcaaatccaagatctcgcacattctaggcaggtactctaccactgagccatgtccccagccccttcagtctggtttattagaagcagtaactacctatgcatacacacacactcacacacacatacatactcattcacacacacaatccacacacagaatccacacacacatgcacaggcacacaagagtgtgtatggacttcagcctttactagaatataaatgtttccattccaaacattattaagcactttcatttttacacttttgacatttttatgctgtagtaatgctatgtcttgattacaaattccatcaactgtgtataaatgcccttcctgcttttggtgttagataggctcagcagtggctacaacctggcaaaagttagagctcagtaaagacaaagagggagagacagacgtgttgctctgcatttaaataggattgtcgtgctcctgtgcttacttgtgctcctgcccaacagcagtctccttaaattaggaattcaaatccctggaagcttaaattaaggaaatacaaggtaacagaaatctctgtgtgtctgcagcactctgagataagcatcaggaatgaaggaacaaagtgatggccttgaccttgcttttgagccgctcaaggctttcctatggacatagctggaaagcagcagcttgcctctgaccatgcctgttctccttgcagccccaagcattctgcagcaggcggacaaaggcgcgcaaggcttgtgatggaggagtgtccactaacttgtgaggcacaagcaaacgacgctgcaaaggaactcatggacaaggtactgcgtcgaaggaactgagagtgccttcctggggcagctaagaaacagtttcctttcttacctgaaaaccaccgggaagccaggcatggtagcacaggcctgtaatcctggggctgtgcaaggggaggggcgatgagtgcaaggctatcctcagctacaacacgagttcaaagccagcctgggctacatcatgagctccaggcagtctgggctacagaggaggatccagaagattaagaaaccaatggtgccatattccacggaattcaaaatgttgagcctgtgagccattactaaactgcattagccaggaccctatggaggaagagcatgagagtgagtgcactgaagggcttgtccggttggtttatgtagcagtctaaggaggagagcagtggcccccttcacactggggctgccttataccctgaagcagctccttccaaagaccggatgcctaaccagtctcagctggatgctgaaggcctggaagattctggaaaaccactagtcttcagtccctttttgaaggctgaagaaactgggctttaatgtcagacaaaactagcagcagcaatttgctgccagcatggtggactgaagcagcacaggagggcaagagggcagaaggccaaaaaaaaaaaaaagctttgtgcctcccgcttcctttagcggggctgccaccagaagcaccgcccacctttagggtgggtcttctcacttgggttaatctgagcaggaaaaggcttcacaggtgcgccatcaacttggctgttaatcggttccagatcctgtcaaagtgacaaccaagaatagacaggatcataaccaagcgccaggagagcagaccagagggagcaaaaggaagttcggctgcacagaagtttaaccgcaaatgtagcaatagggtatggcaagcatacgtgtattttagtcactgcttaggggagcaggtctgtggaaagtaaattccaaaagtttcagatgaaataaaaagattttctttttttaaaatatgaaaaaaaaccaaaaaagtagacacattcagttgtgaatggaggtgttagcaaaaaaattattttatttttttaagaaaaaataacttgaaaagagatggagggaaaattacaataatgtatactttgaaagctgcataaattaaaaaactgaacactaaatgtagattgaccaaaccagggaagatctatatgtccataaatattctaaattgatagaattttttgttgaaagtttttagtcacattgacattcttataagtccttttcttgttgttgttgttgttgttatcgtcgtcattgtctttggttttgtggggttttcgtttgttttgttttttaaaacagtttcactatgtagccttagctgttgtggttctcacccctcctaatgctgcagttccttaatacagtccctcatgttatgatgcccccaaccagaaaattatttcattgctacttcaaaactgtaattttgctactgctatgactcatataaatatttttagagatagaggtgtgccaaaggagatgcacaggttgattttttttttttttagaccaaactggccttgaactcacagggatcagcctagcagtgcctctgagtgctggaattaaatcagagcagcacacccaggtggcctttatttaatttaaatatatggtgtcaaggacccactccgctttttttcaggtaaagattgtgagactggagtgaggcatgcagactcacatcttccgacctttgagcacttaggatgctgagggcagggggaccctggcttccagagcagcctgagttacaaagagaaaaaggaaaggtggagtgtttctgttgctgccttcaggcggtgacctcacttgtggaggatcacctgtggactgcgactcacactaacagctgttaaccaggtctcttccagtttaggtacaggttaccattcagctgagggggaaggaaaaacccaggctttacagagtgcacaagctgctctctgctactattctggtttttatttgttatttttcctttctgggaataaatccactccagacagtttcttttgaaaacaaaaatgtagctactaagtgagtcttgatagagaaccaccagggtgcttgttttgaatctaacttcctggacaccgttgaagacctactgaaacaggaaagcctgctgttgcagcccctagagtagtggggttcttctctaagagaaaagcttcaggaagcatgcatgtgagataggccatcattgccccgggcatgcacaagagcaatgccaaagattatttttgaacagccactttgtgtgacgacttgattgttgaacagctaaacagttaaagtcaagctttaacaacatattaatgtctcctctatttttagtctgtgtccttgtctgtggtactgagggctgaacatgcacgcctcctgcatgctggcactctactctgggctagatcccacccctgaccattctgtttaatattcagtttgcatttttttttcaggattttaaagcaccccattaaaaaatatcagtcctccaaggcaggcaagacagaccaagatgtaaggcgtggctcccagagctgatgactagagttcagtctctggaactcagggcttagaagaggagaactaactcctacaagctgtcccttgagcagtacatgtgcatcacaccatgacacatacatgtgcacatgggcacgcacaagcacacagagatggatggatggatggatggatggatggatgatagatggatggatggatgatagatagatggttggatgatggatggatggatgaatagatagatgtaactaaaattatccatcctccaagtaaaaatggaaaagacatcaatatatttgttcacagacttccagggaaaacgaagcatatgttagagtaagaaagaaaggtttatttgaatgtctccactgaacccaatacctagagaggacactgactagaaatttacccttcctacttccagaacaccaagccctctcttacctccctcttttctcccagtgcacctgggagagggaaactgtggttacatataagtacccacacagtgtgaactctcggaatgtaactcttaggactgaggccagggtggcatagtcggggcgctggctcctggcagcctccacttccgagctggctcccagaagctccttcaactgcgttgctctgcagtttgttcagttctccctgcctttgaaaatcccatttcattctgtctgggtttccatgtaagtccggggcaacacttcaaacttttagtgtagatgtccacatcagtgaccatgaaaaaccaacactgctgagtcagacacagcagtgcatgcctctgatccctgcgctccggaggccgaggccagcctggggtacagagggagttccaggacagccagggctacacaagagaaaccctgtctcaaaaaaacaaacaaaaacaaaggcttcttcatttttgctttaaataagcaaaatttgtaaattaaatatgagtatttacaaagggagggaagaagacacagcctttgccctggggagtactgccagctgaacacaggagaagaacgatgccacccttaggtcctgggcattgtgagcttagaggagttgagatgataatatcacaagcatgagaatggagatcactattactaagatcccacattgtttcgccacttagacgctccctgcttcagagactgttgactgactgacaggctacatctaactctgtatttggcccagggcagtggcagacatcaggcaagggcagactagaaagcttcattacagatgcaatgaactggactcatgctttatatgtgaatattcataagaactgatcttctaacatctttcagaatcaacatcaaatagtgctgtatgttttttgcttttcaattaatgcattctttaatagtgaggttatatttgtttcagttattttgggagtgttctggaatagtctttaattttgctccaactggaaagatcattgttaatagcctccaaaacccatgctataaaattactaggtcttgccaaatgtggcagaattgcaggggaaaatacagtcctgtttttatcatttttttaaagatttatttatttattatatgtaagtacactgtagctgtcttcagacactccagaagagggtgtcagatctcattacggatggttgtgagccaccatgtggttactgggatttgaactcaggacctttggaagagcagtcactgctcttaaccgctgagccatctctccagccctgtttttatcatttttaagccagatcagttctgtttgataagtcctgctgacactgagacccaggttctcagttggcttctaggggtgcctcggttactagtcagtttattgtcttctaacggcctcctcagagactgaagcttagttggctgggtcatacatgggcttaccttggtcctgccatctctttaaaccccagattaatgccgctgctaaaagagggatgaagtttgttgggctggtctcccagtgctacttgccatctatgcactgtaatggagccagccacgatggagttgcagagtcggggctacacgtgagacaagattcacaagacaactgcaaaggctggaatgaaggagcccttggtggacacttgtctgaaagtggagtggaggaggaacctcagcatgaaagtggacagcatcagacagagaggaacagcagccccagctacgctaacccaaagcggggagaaggtaactgtgagcgggcaagggaggagaatgcattcttacattccccaactacacagttattttaaagaactacaggacaaagttagtgtcagaggatcataaggacattgaactaatctaaacttgtgggttgttaagttattatagccagaagtagggcaggccaatgtttcaggcattgggtctcccagtggcctagccagccagtcgccttcgccctcttctccaatgaaagcagtgacttgaccaaggaagcagcttggtaaacagcctgtgggaatttcagggcaggcctttcccccttggaaaccaagggactcgctttgatcctcattagaatctatgacaaagggacatgacaatgagccagttagtgtaacaatagtgcccacagccagaaataactgcagacaatagtcttgttcttctcggccaagtctcaagttttcccaagaaattgagtattttgctcttttatttttgactgtgtaaaagtttcctgacatctttgcaggattttttttttttttttgtaaaaccaaggagagctttttttttttttttaacatttttacaaatagttgttacatgtagggaaatgtcttttaagcaggggtacaaaacaaatcctagctttctctgtaagtcaagtattttgttgtttaaatacgattaaaaagaagagaaaacccaccacacttatgatttctagcagactttatccaaaggagtaaaaaaaaatataatgcaggttaattgctcaaatctgtgagagtttcacagctatgatttaggatttttttttttaatcaacatcaaaaaaaaaaaaaaaacctaaagactgtgtaaactgtaagttaccctgagctctggagacaaacgcctcaatttctttctataaaggagagagttgcagagcctctctcacgggttgtacaaagggaaacagcccacccagtacctggcacaaactccagcaagttgacagatgctcccatcctttgatcagccttggcccagtgtgcagcggacggagtctgggctttctggttctgagacactttcagtccccgtgcatccatttgagcagcatcttctagaggaagagcaggagatgaatttgcagcagtgtaccgttgaagttgtgctgggtcggcttctctttgggttttgattgtttgtttcttgttgttgctgttaagctgaggaccaaaccctgggccttgtgcttgaaaggcaagaactctaccactgagctaaatcctcaaccctgttaaagcaatcttttaaatggtaaaatatttatacagtaaataactgtacaccgaaaaactaaaagctttcttgagaacaataaataccaagttcatcctagcagttatttttagagattggaattggagaccatatactgctagatactacacagtaggctccgcactgtgtccatcgtcttatttctgtgaagaagtagttcaaggccagtgtgttgtaatgttactaactgtgttggggcggggagggcatagagatggcgtaggcagtaaagcacttgtcccacaaacgccaagtcttgagtctggtgtccatttacccaccaaagtcagatcagaagcgcatgcttacgccctcagtgctggacaggcggacacgacggccagatcagaagctcggagtcagttagagaccctcactcaaaaccgaaggtgcggaagagctgaagcagctgcagcgttaacctctggcctctgcatgtgtagttgcacccagacacaggacacaacacaagcatgcacacagatagacacacatgttttcaattgagcgtggctatttttatgattgtctatattcatttgtatgtttgtaatggctaacgaagaacaatctttaagaattttgaacagtaaggttatgttcttcccttttccctgaccgtctagccccagatggtaagctgtacatggtcttcaatgcttttgaggaagatgcggccagctgggcctatcaggaaggtgtcctgtccatgaaagtgacgcggaagggagctgtcatcagcgctctggacgccaactggctagaactaacgacattttactataagcaaggcttctctttaattgactcttttgtgtgctgggagacacctaaaggtgagttttacgttagtaatatatttatatgtaaataatctggatttggatcaacactgctgaaaatatttttcctttcaagttctatcactgtaaggatgggtataattctttttttaaaaaaaatatgttctcatcattgcacaactttaattgaaaagcttcgtccagtgagatggctcagcaggtagagggagctacagctcagcctcaagccccgggccccaccataggaggacaaacccagtgtcccaagtagagctccgaccccaacacggatacagagcacgcacgtgacatgcctgtgcccccatgttcatgcagcagacacgcagagacaaaatgcgtttggcttggtttggcttggtttggttttctgagacaggatttctgtgtgtagccctggcctcctggaactcactctgaaaactaggttgtcctcaaaatcacagagatcctcctgcttctgtctcccactgcctggctaattttttaaaatttttaagaaaagctttcctattgctggatggtggtggctcgccagttataatagtgagatcctgtcttttaaaacattagtaggggggctggagagacggctcagcggttaagagcactgactgctcttccagaggtcctgagtccaattctcagcaaccacatggtggctcacaaccacccgtaatgaaatctgactccctcctctggtgtgtctgaagacagctacagtgtacatagaatacattaaataaataaataaataaataaataaataaataaataaatctttaaaaaactagtaaaacaagcctggtgtggtggtgcacagctttaatcccagcactccataggcaaagacaggaggacctctgggttccaggccagtctgttctacagagctagttccaggacagccaggactacccagagaagcattgtcacaggaaagagacagagacagagacagagacagagacagagacagagacagagacagagcactttactatccttaagagcaaccctgagcaggtttagaattgtaatgttgtaatgtttgctatggcataggaaccattaagaatcggcacacaatggggggatcggccagcagaaattcccagatacagtgtactacaacagcccagtcaggaagcttggggtgccatcctgtagttagtatacatatttggtgtattcacccaatagttagtgaatttctagctctgtgtgtggagaataattcagagatataggcccattcttttgtttgtctttctctgtagctaaagtgtggtacaaaccagtcttatctatcccaaaaacaaagagttccccaaaaatgactttaacaaagattagtgttcaaagaaatgaaaaacaaatagtgggcaacctggggagaacgcaccccaggccgggatggctgcaaccttaacgctcagtgagactggagcaaaggctgaaggagaaaccaggcccagtatcatgagaccactctgtccttaaaccagtcttctggtgccttccccggtggcaacagatgacaggatggaacctagtatgtccaggagtcatgctctacaagatccttttaactaaagccaatgctaaaagccacgcccaaggagaggcacaggccgtgccctgcagagatgccgagcacacagcaggtgctcaataaatactcctccgtgttttctggttactggaaacttgagtgggcagacagaggctgtttcctagtgggggctgggggaaggagtgtgaaactcactttctgcagctttgagacattagtgagaacattggtgtggcaccgaggctccaaggcagcttattttctgatgactcgtccttcttggcatgcattatatgtcacactttcagtgcggatcatctttttggagactggttttgatccctcacgctgtttctctccctctcttctccatcttctctttgcagtggctaagttggaggcattccaactttcggttagtgacaaactgcctaagggaaagcaaaaatattcttttcagtctctctcaggcattcctgcctcaggcctggcctgataaaaataaaattagctacagcagctgcttagccagaaaccgtctggggctttagttcttagagccccagggcggcgctcccactttgtgcagctggaatgtcttttcagacattcttccacgccatctttgccaaacctctactcacccccctcagcctgcggtctggacactggagtgtgtgtcactaggactttccgaggacactgcagaggggaggctgaccagtgtccgagtctgtgagaaggcagtgtgaagaaggaggcagaactggactctttgttttgaatagttgatgcctgccatcccgagcacaccaggaaacaatgcagatttgctccgtcttgcttctgccatcatcacaaatattgtcagaaatcagacgactatggagaaatggaagcacaaaactcaaccctgtccagaagcttaaaatacattggctcacaaatcacacgggagaaaatgctttacacgcagtggtggaggggaagggataccctgaaaagtcacctacctcgctgggcatgtcagagctggcactaccactgtcagatccgcccctacagtggccttccacacacacactctcagccttttctgttgtgaatgctcccccggacacacacgaggagaatcatgctcagatatagtctgctcttctttatgtgtcacttcttagggctcccctttgattgtgtgtggattctcttcctttcaagatacttaaagaagtacagacggttgataaagtcaaaaggtatctatctttgtttatgctcaaaatctatgtatgtccttaggtgtgttatcatgtttgcaatatcatgtttcaagcaggctgtggacgtaacaaaatatgcacacacacacacattcaaaagtaagaaaaatattcagtgtatacccaacagaatcctgtgacaggagaaccagggaagagtctacaggaaagatgactagagactatcgagatagctcaaaggtcaaggtgctcgcctcctcctgaccacctgagttcagttttccagggcccacatgacagaaggagaaacagaaggagacagaaggagaaaattgactcctacaaattacccccagaatccacacatgtggaacatgcacacacccacacatatatgcacacacacacacacatacaagcatacatacaggaaggtaataaagtgcaactaagaggctataggggtctatagggagcaggcatgtaagagccaggatagactgttcaagacaaagagcacagagctagtgagaagaacctggaaggtctgagtggctggagcagggtatgcagggaaagatggctctagacaaggtgagaggtgggcagggctctgtttgtcaggaaagctgtggcaagagctggcatgtgtgttttccttgctctgtgctgatgctattctacaccttgcatggaataactcgttattacctacacaagcaatcctgtgtgaaaactgatacatgcagccactaaataatgtgcccacatttgcacaactaggaagcagaatggctagcaaggcgctgttaaaaataataataaaccatttttccttttccagttcttccccccagaatgacaactctgagactaaatattggctattaaatgcctagaccataagcgttggctcattccctaactacctggtaacttctctaacccatgtaaactattctgtctgtcacttggttagttacctctccttcacttggttagttacctctccttcacttggttagttacctctccttcacttggtgagttacctctccttcagtcctggccctctcgtctcctcagtgtgtcccttagcattgccctgagttcatctccttagccagctcccctctcatctccctcagctctccccagtctctcttttatctcttattatttcccagaatcctctctcttcctgccagtgtcccaccttctatttcctgcctcagctcattggccaatagcttgtttattgataggtgatcattataagagattctctctacaaggtagaatgtatgctcatttttcatttgttaattaactaatcaatccaattcactagttaattctgtggaagtgtgtggtgtgtgctcgccactgtacacatgtggcagtcaaaggacagcacatgagacgctgatcagttctctccttccacaatgtgagttttagggattaaaatcagatcccaggcttgtctgcaagtctccctaagcagagtatgtgatcttaaccatcatgcagaatagttatttcatttcattagttgaagattttaataaggagtcattgatctgatttgcatttttaaaggacctctctagccccattttgggacatggaccataaatggcgagagtagagaggctgatgtttagttactttgtgatgacaaaacaccataatcaaggaaactcattaaaaaaaaaaaaactatttttaccaggtggtggtgacagtagtgcacacaccttaatctcagcactcaggaggcagggacatgtagatcgctgtgagcttgaggccagcctgatctacaaagctagttccaagtcagccagggcttcacaaagaaatcttgtatgggaaaacaaaacaaacaaacaaaaaacaaaacatttacattaaagaaacctatgcttgctaaggctttcctacacagaagtaagaaatgcatttggctagtgttagtatccaggaaaagggttgggtggggagggaggaggggaacggaagaggggcaaggggagggggagagggagagagagaacagtgtgtcaggccagagcttctgatcatgtgcagcaccatgaattttgacacacttgaaacctggtcatcctgcctccatccatgcccacccccaccccacccccacccccacccccatagtgggcatgggctcattggctgggaagctctggggtttgccatatgaagggccaacgctgtaagcccagcagtgtgtgtgtgggtgtgggtggggggtgtctgcagtgactcctcccccattatctggaggtaagtacccatttatcacagccccacagccttccctgcaactcgtccttgctgctactcccagagctgctgccctagtgtgagcaccgagagagccacctggagtcttattctctagtccagataagccttgaactcagcaaaatccttcctccttagccacacaggcattagctaccccccacagccagattgtttgtagtcttttgtatatctggcttcctttgtacaacatagtttctttgaaattcactaacaatattacattacaatgagcctcgctttcatctctgtgtagtttgggttgtacttgctttcttttaaaccacagggtttagaaatgggtcagtggggtggttccctgagttaaggtttttgcagccatgcctgttggctgggatccacacaaggcttttagaagagaacttggcttcccggannnnnnnnnnnnnnnnnnnntcttagaacctccacaacacacacactggtaggtagatagatgggaagataggtagatggatagataaatagatacatgtaaatttttttaaatgtaaaacttatatttatgctaggtagcacatgccttttatcccagagacggatctctgattctgaggccagcatagtttaggaagctccaggctactctgtctccaaaagaaagaaaaagttacaagtacatatcttccagcattgaagtcagaaaaagtggttttcacactgtaaagttccgaaggaagcagaggggcaggctgtaactatgtaactactgcaatgttaaattagtttaaagttcacatccccgggattcttaaaaaagtcttgaaataagcagctctatttctcagctctaattaactagtgtctgtggtgctctggtgggggccggtcaaagataatggacagataatacaagtagaaaccagctccaactgtaaattatactttactgggcttctacgaactatttttatttttttaaaggtttatttatttattttatgtatgtgagtacacagtagctgtacagatggttgtgagcctttatgtgattgttgggaattgaatttttaggacctctgcttgctccggttggccccacttgctcagtccatgctcgctccagcccaaagatttatttattattatacataagtacactgtagctgacttcagatgtaccagaagagggcgtcagatctcattacaggtggttgtgagccaccatgtggtcgctgggatttgaactcaggacctttagaagaacattcagtgctcttacaggctgaaccatctcaccagccccaaactatctttttttttttttttaagtgcattctctgctgcgttctgcctctgccctaaatggaagtttaaaaaaaaaaaaaaaaaaaaaaaaagcaagctaggtgccaggtgtggtggcacaaacctttaatctcagtacttgggaggcagaggcaagtagacctttgaattccagtccagcctggtccacagagtgagttccaggacagcaagggctacacagagaaaccctgtctcaaaaaaaaaaaaaaaaaatctaccccctccaaaataaagcaaaaatcaatttgctttcaaatttcagcctcttaaaaaattaaaactatgacactaaaattagttttttctttatctttaaacttaaaatatcatctgaaaactgtcagcctttattaaacaggaattttcttagtacaacaaattatttttaatgaaggtggtgacaataaaataaaaattattgtgatggtaaagtagatgattagataaataaattcttgcttgataaattagaaaatatgttccttaataaaatataaacataaggtggagatgatacttggagcacattaagcgatattcatcacccagtcagggtggacaggctgagaatgatgtaagttaattggaatatttgggggagctgggagatggcttgtttggttggtttggttttggtttggtttggtttggtttggttttttcaagttgcaacaaaatgattctgtttcctataaccggcagggaaacttggatatgacaagtgctacataaaacccacagtgtttacctagcacaggaccatgagaaaaatgccttctgttgcaaaataagaggcaaaagaatttccattaaatcctttagttaaggccaggtggctattgtcaactattcaagaaaaatgcagaggggacttcccttaaaacttccttcccagcaggagtcctgggacaatgacttctgttagccgcttcctgtcgctgttgtggggacttgggaattgttcggtgtttatagcatgtgtgttacatgtgtgtacttgcgcaagcatttgtatgtggagactagaggtcaatgtccagttatctttctctgtcactctccaccttattttggggagcagagcctctccctgaacctggagattgtcattttgtctaggctgtcaaagtcatctgcctccccagggctctgcttttatgtggtgttgggcttagtttcctgcctatgcttgcaaggcaggcaggcgctgtacccactgagtcatcgcctaccctgtgcttagaggttctaaagctctggttttcatattatacctgcaagttcaagaatggacatttttcatgttcctgctggtttgtatgatacacatcagaagccaaccttttatttcaaggtgaaggtcatcccagatgcttcttgaatagacattccattcttgctcacattatttagctttgtttctgctgtggtagttccatgtgtgtgtttaattttaattcagtgaactataaacctgtctttacctatggagaaaaagcaaatcttaaaacagaaggactcaaccaaaatacttttgtttaagtgagtcttctctatagagatttttatttatgtttctgtgtctgtgcgtgtgcacacatgcccactcatgtctgtatatgtgcaagtccacatggaatccaaacgagggtataggattccctgaagctcaagctacaggcaattgtgagctacccagtgtgggttctgggaaccgaactccatcctctggaagcagcaagcacacttaactgctgagccatctctccagcccgtcttaatgtttcagaacagcatttcatgtatcctaggctggcctgcagcgtgttgtgtggctgaggataacctgaagctccatagcctcctggctcggcttcataaatcctgggattacacgtgggagccgctttgctcagcctctgtcactgatgctgggacatgcatcatgtaacctggggctacacacatgaggaatggcttccagtcgacaagattttctcccagcttgccaccacgacccttggaagcagctgtaatgtacatatgactcctctgaatgtatcctttccccacaggggaccagttacctaaatctttggaaggcttttttatctacgaagaagaaggatctggagtcccaggttctaacaggagaggaaacgacgccattgtggtggagcagtggacagtcattgaggtgagctgcagattccaacagtctgctttccttttgtgtgtgagttgatgaaagccccccatggccaggcgcatgctcagacacagatggtccactctcacagaaccctcaacaaagaaccgacagacttcctccatatgctgtacccatgttttcaaacatttcagcaaaatagcaaaagtaactgtcggcacctagacaaaagtaggttccccaagtctgcgagtctagccctagacaagatcccctggctcagaaatcctcactacaaaatgccttggcaactggaaaatgccttggcaactgactggaaagagtagtgtagccactcatccagcctttcaccgctgagcaaccaggatggcaggcttggttttaaccttatgaattgttttgttttgttttgttttgttttgagtaaaaacatccaaaggtttttctcttacataccaggccagatgtgtacacacagcactgtcatagtcagaggtgttgctgcggctggggttgcgcatttacaaattcagatgtcatcaactactgcccttgaagtagacagatccctttggacctctgttgaatgtacaaggtccttacagagaacgtctttcaaggaaacattttgactttctggccttacaaagaccataaaggacagaagtcattttcagagaaattgtaaagcccacggagggagctggggaaggtgggtggtgagtaaagctgcgagagaaaaccttcgccagcgcagcggagcaagaagagcggccactcggccagcctggcagcttccctcccacccccagcctcccatcccaggcccaaggccactgctgaacctacttagtaagcctcgtggatcggacgccctagggagcttttaaaatgcagatccccagctccgctcactttagaatctgagaaccgtggctttcccaggaccaaagaaaggccaatggccactgtccactcacttggttttaagaaggcaacagttgcagaaagtgacattttgggggccccatgggctccatgacactgttccactggacacaggcccccccccacacacacacacactacaacactcatcagcccctcatcctcgctactgtgtggccagctgtctttgctattagactgtaagctcttttgcttattcacacagggctgtgaaattaaaacagattacggccccctgctgcacaccctggctgagtttggatggcttctgacaagcgtgttgcctaccccgatattgagacatgacaggtaatgcccgtgcatccacctgcacagctcattctacaacctgctcatttgtgagtaaattaaccaatgctgacttaagcctacgagaaatgcttctagtgtggtttcatgggatttggaggtcagcaggtccagagggtgggtccctgtcattggtattgtcccaagggcctcaaatacacagacatttgagaaatctgcaggggcttctgaaaaacaagagttctctgtctgagccctgggtctacacacaccggtcgacacacccctcctcaacagcctgtgtgtctgtgccttcaaatcactttctggttgttctgcttgtgtttgagtcaaggtctctctctctctctctctctctctctctctctctctctctctctctgtagctctggctatcctggaacttactttgtagagcaggctggccttgaactcacagctatccacctgcctctgtgtcctgaatgctgggattaaaagtgtctgccacccccatgtccattttctccatctctttgatgttctcctaggtgcacttggcctgatacagctaggcacagaccttccgaagtgtggaaaccctgagtctctccttcctcttcccctgaggaaaagtatactccttccttgccattcatttggggatcccagctgggctcacttctaagtatttcccacagtgctctgaatgaatgggcaggacatctggcagccagcccacttctgctgagctccagtggtatttcctgtatccggtcaggaccagtttaggaatgacaggactaagcctaaggctggaactaaaatatattgtgatcccaaggataccttgaagtgggagtaggctgaaacatgaagccagactctggcattttgtgcccaaactgcatgagatcctaccctgcaaccagtgctctgaagactccctccaaacgctgtatgaggagtagctataaggttgctctaagacaaagagagggagaacggtgccaaaactttaccatcatacagatttctcctgcacccagatcctatgggcactatggaaccatggaagtgttcctcctaccgtctgagaggacttatctttatatgctatcagaatggcaaggggctcatggctcactaaatatgcattgggatggcccagtggttatgagtcctgctactcttccagagggcccaggtttgaatcctagtttccatatggtggctcagtttcagaggatctgacgccctcttctggcctccccaggtactgcattcatgcagtatatttaccttgcagacaaaacacccgtacacaaaaaataatttttaaatctttaacttgctaagggattttaaaggtaagttttaggacagtgttagagaataatactgtgtgtatcccaagtgtataggtgtcaaatgtgtctagcaacccttggaccagcttcacagtggttctaaaatatattcagttctggagactatatgctagggaaagggggagggggcttctttgcttctatccagtttcttattatttaatgttttataataaactgacactctccagagtgtcaaagaaaaagtctatctaccagtgaaaaacatctgtggcgtgcgtctgatgctgaagtcatttacaagagagagagtcgtgtttacatttcatgtggtgcaaacacatagccaggagcttgcattctggctggggccagccaagctcatgaattcagtaatttaatacagtaattaagcaacgaggaactttagtccataggttccaaggaagtattaaagaaaaaagatattatgactataaaaattaagcttgatgctctagtcctgaggagatcaaagagcagcttcactgttcagtaaatcctttcccaggagtctgctgctgcggctgctgctgggcagaagagagtaggaaacgttcccgagcagcagccgccctgtgcgggaaggcagacaatagctcctctcagatgccgggagctttggataacttgtttattttgttccttgggtccttctgagttgtcactgtgacaggacgcccaggaaggtgacttaaaggacagacttgctctgactcctcatcactgctctggtgtgaaggcagaaagaacactgctcaccagcaagccacgccctccttcctccagctatgcccctcctccctgagaacccattcagccatgaacttataagttgagggagttagaacccataagatccagtcagtctctgctggaccaccacctggagaagcgtcacatatgagccttttcgggagagacttcatatccaagacacaacaaatataaaacgaagatgaagtgtaatgctgttcactggtcaggaggatttttgagaaaaatcctcacctgaacacatttggctaataagtgaggggactctttgatatactaatatatgtgttataatataattataattatataataaataagaactattatctggggatctaaccctttagcagaaccaaattcctaagaggatgaaatcagttgtccaatcaggataggatggcctgttccaaatcaaaaggttccagaagagataaggtagacagtgccctgtgtgtaagatccgcactgagggtcttgagcgatagggcagcagaagtaagtagaatcataaagatgcatgtttacaaccagaaacacaagtgtcacactctttctttggaggccctgtgcccgaaaaatccatcactaagagccacagtctgttaacagtcccctccttggagacagtatttcaactgtctctgccaactgttgtctaagctgtacctgaatggctcacaggggatagtcccctcatgacaccacagcgtatgcacacactctcagcgctctctaggttgacgtcccgtttcctaggcagtggtacacccccaaggtttataacagaactctcaagaaagatcatgagatcacgcacatggtacagcacgaggctgtaagacgccatgcctataccctttcaaggttgttgcagccagcctgggaacaaggcagattcctttgttattgttggaataacactatcgtaccaggagcccaatcctttttctactagagaagtcaaggtgagagttaccaggaagttcttcaaaaaaaaataaacagttaaggaccacatccgctgagcttacagctaatattacagcctaaagtggggagggacctatagaaacagttcagtggttacgagcacttaatgcccctagagagaccctgggttcagttccaagaacccactgtaactccagctctaggggatccgatgccctttctgacctgcactgggaccaggtgtgcacgcggcacattcacataagtgcaggcagagaactcccaggagcctgtaatctcaagtgaaagtcatccccagctacatagggagttcaagaccagcctgggctccatggagccctgtctgaaaacaaagaaacagaaaacagcagcctggctctgctccaccctaacagctgtagcctccccaccggaccagtgaccacctcatccagaggcattcacttggtttacaggaccaggagtaaattcactattaatctgtgcccttaaaacaattgctgtgggtactggagaggactctgtggttaagagtactgaccactcttcaaggggaccagggttcagctcccagcacccacatggaggcatatgaccgccaaaacacccatacacataaagtagaatgaataacaaaatctcagaaaaaaaattgctgtgactacaacacataagaagtgcattaaacacaagtacatagactgcacctgtgcactcactccggccaacaagcggggttaggcatcgtggagcgcctcccgtgttgctccactgacgacttttgtctgtgtgtagcaatgtgggtgtgcatctgcctgctgtagtgtgctcaccctgtgatggtgctcctgaccagtccctcttagctcaagtagaaaccctggtgtgcacccactgggctttctgtaagtgcaagtgctaggctgggcatttgtttcacttggctacataaatgtgaagccaacccaaataggtggcttctggtttccttggaagcccagaggtagtggggtagggtattcctcttgctcaagcatgaattactgctgtactccaaaatggcaccattctgggaagtatgtagtgatctgtgtggttttcgggtgagttttgtttgttttgttttgtttgtgtttttagattgctgttgttgttgttgttgtgtttgtgtgtacacacctgaatatgcatctatgtgccatttgcatgcaggatcacctggaactgaagttaggcagttgtcacccaccgtctgggtgctgggagtcaaacccaagtgctctggatgagccacaagtgctcttaacgactgacccatctctccagcctcttttatttatagttttaattgggactgaagctaagaacattttcattccatggatcacctgggttctgtagtcaagtacctgttagaatcttttgctcacattaagtttatatttataaattatttaaagttagatgagagccttttatcagttatatattccaactttcaatatgtctgtaacttgtctttttttttttttttttttttttttggtttttggtttttgagacagggtttctctgtgtagccttggctgtcctggaactcattttgtagaccaggctggcctcgaactcagaaattcacctgcctctgcctcccaagtgctgggattaaaggcgtgcgccaccactgcccatcgtaacttgtcttttttctccctgctctctttatggtctgtcgctgtctgtgtctgtgtctgtgtctgtctctgtgtctgtctctgtctctgtctgactgtatctgtgtctgtctctgtctctgtctgtgtctgtgtctgtgtctgactgtgtctgtgtctgtatctgtctctgtctgactgtgtctgtgtctgtctgtgtctgtgtctgtgtctgactgtgtctgtgtctgtgtctgtgtctgtgtctgtctctgtctctgtctctgtctctgactgtatctgtgtctgtctctgtctgactgtgtctgtgtctgtctctgtctgtctgactgtgtctgtgtctgtctctgtgtctgtctctgtctgtctgactgtgtctgtgtctgtctctgtgtctgtctctgtctctgtctgactgtatctgtgtctgtgtctgtctctgtctctgtctgtgtctgtgtctgtgtctgactgtgtctgtgtctgtatctgtctctgtctgactgtgtctgtgtctgtgtctgtctgtgtctgtgtctgtgactgtctgtgtctgtgtctgtctgtgtctgtgtctgtgtctgtctgtgtctgtgtctgtctgtgtctgtgtctgtgtctgtctgtgtctgtgtctgtgtctgtgtctgtgtctgtgtctgtgtctgtgtctgtgtctgtgtcctgggccctcaggcatgcttaggaaagactgcagcacccagctccatgatatcccacaaaaataatttcaaattttaagtatccccgaaggcattatcaagctatatttaggacttttcagtttgaaagtttttgatggtaatgttattttgctttcttatgtttatattaaacatgctgtttacctttgtgcaaccctgaattcattggagtttgttttaagacatagcctttgctgtcctaaaactcactatgcagagcagactagccttgaactcacagaaatttgcctgcctctgcctcccaagtgctagggttaaggcttatgccagtttcactggaatttcagagcaaggctttagtggctcatttttgatatggtgtttaaatgccacaggtcatgaattttctttgcctcttctcctgacatactaacatcagaacctgtaagttcaagcatctaattgccttgtggtgacagggtagaaacttgtttttatcttcctcattattctccattacaatgtactctgcatattataaactaaaatcataactaaatgagaatacagactttttcaaaacagtctaaatgtattatgaagcattaggatcaaaaaggctctcacttctgcagccagagcctctctggggtcatccagccttggccagaagggttcgggtattggggaaagagttagaagtagaaggtcaacagactgttttcattctgacctgggttcagactggccccatcctctaattggttggagagaacccactgtgagcccacctacctgccttggccatgcttctcatccaggcctggttctctgctgtatttgtctacctacagcactgcccagaaatctttcttctttctcctatgaactctctctcccttgaattttctctctgaaagatattcttgattgatattttttctttttataaaagttattttgcactccaccctacattgtactaagtggatagagaactgagtgtttatctttctatctatttgttcatgttatgtatatgagtactttacctgcatatctgtctgcacaccagacctgcaaatcctctacagaaacaagaggttgtgagccaccatgtgggctctgggaattgaacccaggtcctctgcaagaacagcaggtactcttaagcactgagctacctctccagctccaagttacacacttgtatctcttttagtggctacacagaggaagactctggcttatctctcccaggtcttaaacagtgtcgagcataaagaccataggtgttggtgctgtaacagggcttggatttgaacccaggaactatgtggttcccaagtcaagtctttttccagtgtagcctgtgactcccaaacactgacccagtccagtctccatgctgatccctccttatagtccctcacaatttgtccccaaaagttacaccatgcaaagcattttgttctgacagaagatacgttcaaactgaaatgaaactggactctaagaagtcttttaacaataaaactgtagccatctctttctagcgtcctaggggaagatttctaatttccaagttagtggcacccatctgtttggaacgctctgctaaatgtcctgctgaccgctccctctccgtgtagggccagagcttcacccccattcagcttccagagacaaagcacagaatccactgcagcctatagggaaggggtttgtcgggcttctttgcatgataaaagttgttagtgagcagctttagctactacactcgccctaccctcccctcccannnnnnnnnnnnnnnnnnnnacagcgacaggaagcggctaacagaagtcattgtcccaggactcctgctgggaaggaagttttaagggaagtcccctctgcatttttcttgaatagttgacaatagccacttggctttaactaaaggatttaatggaaacacccaccccccacccaccccgcaagccctaggaggcagggaagctcttgagaggctctgccacccagatgacagctaaaaaaggcgaatactgagtggagtggccagtcacaaagccgcctgtcaatggaactggctggggctgaaccatccctctcagtggaaaatataagaaaagtccccatgtgtagctccccaaactgctccctagtttgataatgcataccaagaggcttacgtcatccttcctgacctaataatttcattcctgataattcatctcaaggaaataatccataagaggaagtatatatgcgtgtgtggacatattcttatctataaacataatagtgtgtgtgtgtgtgtgtgtgtgtacatacatataaaatagcatgatttagaactagtaaaaaacttattctctaaaacataagggaagacaataccttctggtgtcttcgttctctgaagatcctggacctgcattaaaactatcattacacacacaaggaataaaggaaatataaatacatggtggtcacaggtcacacaggaaaaaggctggctggtgctgagaaccagagaggaagcaaaaacataaagatcattttctgaaactggtttcatgaaattatattttttgatatattttgaggtttgggggtttcccggggggagttataataactatattgttttacaagagttttgaattaccttaaacttttttattatatttatgtgtacatatatgtctgtgtgaatgaatgccacatgtgtgcaggtgcccatggaggagagaagacgtcagacccctcaggctggaggcacaggtgattttttaggcagctgatatgggtgctgggagatgaactcaggtcctctgtgagacgacctcccctttttaaaaggtctttaggtttattttaagatgtgtgagtgtttcccctgcacatatgtgtatcatgtacatgtatgccctcagagcccagaagggggcatcagatcctctagaactgaagctacaggcagttgtaagatgtcatgtctgggttgggaattgaaccccatcctctggaagagcaaccgctgcttctaactgctccgcccctctctgtccgcagcagtatccacgcttaatctttgagttaaccctccaacttgttgtttagttcatttttgtatgaactatgtctggatatttagcctgcatacttgtctgtgcaccgtgtgagtgcctgatgccaatgggaaccaaaagatggcattggacccctggaactggagttacagccacagtgagccaccatgtgggtgccgagaatcaaacccaggtcctctagaagaaccacaagtgctctaaaccactgagtgatctctccaacgccccttccccacacccattattttttaataagctttgtttgtttgtttgtttgtttgtttgtttgtttgagacagggtttctctgtgtagccctggctgtcctggaactcactttgtagaccaggctggcctcaaactcagaaatctgcctgcctctgcctcccaagtgctgggattaaagacgtgcgccaccatgcccggcattttaataagctttcttgtttttgatttttccaatgtaatttatagagctgtatttcataattattttgggatcagaagattaccccacaaaggatatatgtgggccaacctagttaaatatggaaaaaattacaaattcactgggacaaagtataatgacgcatgtacatgaaaatgctataatgaaatccatttgctgctatcctaactttagaaagtaattaaaatttctgtaggattaaaagaacattcctaattcacaaatactaatgtcactattttaactttcagtgaagggaatttggctaccaagcaagtcgtatttctccaaaggccggttacgtggaactcagctgctcaaaccccagaagtgagtacaaatcaccaatgttcactttctgaataagacacgatagtaaagcatttaaccctcacactctctccagcggtctaaaagtgagttcaggtcaggacactcagactcagcgtggaaacagtctcctgcagaaggatgcaaaaaagaagttgactggttcccccaaaacccattgcaagaggaggaaactgaccccctaaattgtcttctggcccacacacatgtcactggcctgcgtgaacccgcactctcacacacacatactacatacaccaattagtaataaaataaaaattgtaatcgttttttaaaagaaaggatgacacagttccaaagactattaaaatatgccgtcccaacacacagtacgttgacataaggaccattttgagcttcaggcaactaagaaagaacagacccaggaagtttctgcccctttccaacaaagaatggcctctatgccaccatgtagaggtagcaggttcccagtccacttaagcatctgctctccctggcggaaagagactgacaattggaaaggattttctctgacttgaatctgcaaagacaaaccttagtgaaattgcctgctcgtcatcccctggaggctctgacgctgccttccttgccagtcccttgctcccagcctctcagcctctcacacggctgtgccgagttcagatttccacaccgcgccatctccttgactttttcttcttttctacaaagtctctgtgtgcatacaaaataaatctgtgctgctcacctgtcctctgccactctagtccccagcctcagctaccgatcctacggtagagggaaaggggcgtcctccattattcttctaagttttgtgagtcccaagtttctgagtttttaaaaatacatacatttttggttatcttgacctctgacaacatgcaacacatcgatattatctcagtacagtcgcaagctgacactgaccaggctttttttgtttgtttaatggggaagggagttggacagggtgtttctgtgtagccctgtagccatggctgtcctgggactcactttgtagaccgtgccagacttgaactcatggagactgacctgcctgtgcgtcccgagttctgggattaaaggcgtgcgctctcatgcctgcatgtctgctttttactgaaggggacactgagcatggggctccttactcgaggttttgaagctagaacaaggttcttggactggaggaaaactgtattgataaccatagggccctcacacacccatagtgtacgcaatttagctgtgctatgttaattctggagttgactggctgcatacataagtagattgagaggtagggacgtggaccagaaggtaggaggtaggggaggagtgtcatcacttgtgagcagtgtgcccctcacctcacggaggacgaccctggctcgtgagtttattatggagtattctgtcaagaattttaacattctccaaatggtcctcaagtttttcggaagggccatgctcatttgctccccagaatggtcaagctgtcagtctcaaacctagaaatgttcgcccttctgtccctcctgcgggaatgctgggagcacctgcctctgcagccacacacatctgtgaagtgagctgcaccccagccccattttctttaaggcatcaaaaatcatttatattagtaaaactagaagatgtttaggatagacattaggggggactgtccatgaagttaggaccgatctcagatataatagcaaaaccatgatctattagaagtcgataagttagccaggcggtggtggtacacatctttaatccaatgcactcaggagctagcagcaagcagatctctgtgagtttgaggacagcttggtatacagaaagtgagttccaggacagccagagctacagagagaaaccctgtctccgaaaaaacaaagttggtaaattagatttcatcaaaattaaaagcctgtgccacatgacttacaccactaaaagaatgaaaagataagccacagagcacagaaaccttagctatcacatcagtaacaatggactgtatcgggaatacatcaagaatctcaaatatcaacagtaagaaaataacacagatatcaatgaggatatgttcacaagaaataaatacacaaaaagatgctttaattattagttatggcgagatgccaccatgcacatattacaaaagtaaactcttaaatcagacagtaaccaagagctggcaagcaaagcagtcatctctgggagggatgtgagcaaccagcagtctagaagatgctcaggccacttcttaggactgtaactgcacacgcatggctcagcaatccctcctgggtgtttatgttaggaaaacacacatgtgtgtgcacaaatgtgtgcgcacacagtgtatacacaaatatttatagttatcctagtcataattgtccaacgcagaagaaagccgatgtcttcaatatgtggatggataaacaatgatggcacagtcttgcaattaagtactactcagaataagaaatgagctgcagatgtgaacagtaacttagatggatctcatctgttaggctgagttaaaggagccagtatccaaaggctacactgtatcattccatttacatcacagcctgcattaggtgaaccctgcaacaggaggatgtacaggaaagactgggagacgacagaactgctgtagtgtttgttaagtctatgttagttaaagcccataaaagcgtatacccaaatgtcagttttacagttcaggcactttaaaacaaaatcccaggcctagtgaaatgggaagtaaaggtgcttgcttccaagcctgacagaccatctgtgtttgatttcccaggacacacatggcctgagaaggaaactgactcccaaaagctgtcctctgacctttactcaactgctgtggcatacacgcaagggtgcacgtatatgtatgcaacggtgcacacacacacacacacacacacacacacacacacacgaggaaaatgaaattccacactgggcattgtggcacgtgcctatagtcctagtgtcctgctttgctttctgtttctgtggggaaagactactaaccaaaaccaacttagaggaggaaagtgtttatttggcttacacttccataacagcccattgctgggagaacttcctgctggagctcaaagaggagctaggaactagggtctgaagtagagatcacagacaaacactggctggctccctctggcttgctcagctgccttccttatatgatgcatgccctcatgcccagtaatggcacctcccacatggactggtcctcccacattaattaacaactaaggaaattccctctcagaccacctacagaccaaccccatgaaggcaattcctcagttgagggtctctcttcccagttgtctcaagttgacaattgaagctacccatgacacccaactccttgtcaattttgacacacaaacatgtcactttaaaccataacctttcccttcttgtttgtcctccagatcatgttaatagtaatatcacaatataaaatacaacacaactttgaaaatcccacagtataagaaaatcccaccatttagccaggtgtgatggcatacatacgcctttaatcccagcactcaggatgcagatgggtaagtctctgagcttgattgaggccagcctgggctacaaattgaatttcaggacagtcaaggctacatagtgagaccttgtcttgaaacaaataaacaaaaacaaaaagcaaatgatctaacttaaaaagttcaatgtttctggggctagagaggtggctcagcacctaagagcacttgctgttcttccagaggacccaggttcaattcccagcgcccacatggttgttagtcatttgtaactccagtactagggagtcggactctctcttctgactcctcaggccccaggtctgcacatgatacacagacatacaaaacacctacacacataaaataaaataatatctctctctctctctctcctctctctctctcttgtagaaactcactccatagtactggctgtccacagaatcactatgtagaccaggctgacctcaaactcagagatccacctgcctctgcttcctgagaactgggactgaaggcctacaccacacatctggcttcactgcctctttaaaatatccagtctcttaacttgaactccagtaacataaaattgagttaaatacttttagtccaaaaaagaaccagggcacagttactatcagatcagagcaaaaacaaaacccaacataataaggttcaacatctcccagctactccaagagatggagacaggagaatcattttgagcctgggagcttgagactagcctaagaaacagaatgagatccccatctttaataaataagagaggggctagagagatggttagaagggtaagaatgctagctgctcttagagaggacctgggttcaattccagttcccagcacccacgtggcagctcacatctgtaactcctgtctcaggggaatttgacgccatcttctggcctccctgggtactgcacacacatagtaaacacacacatgcaggcaacacacacacatatataagtttaaaaaatttaagtaaaagaaagaagatttcagaacgtttgctttataaattgcacagattacatttcccatgctgtattcttcatgaagcctttctttgggcgtgggcttcttggtgcaatgactccactaagctcagttcttctttctgtttctcaatcctattcttattgtcatgttttggacagatgcctccaaataggttccaggaagtgatagctctgctggaggcggggagggattctgatcaaaagctggagggcagacctatagtcctagaccttggagggtggaggcaggaggatcaggatttcaaggctgctcaaaaccccagctcaaaagcaaaacaaaataagacaaacaaacaaaaaaggatttttgacctccatcagctaaattttccattaatgttttttgtaaaatttttcttcttaaatttttgtttcttttgaaaagttaaataaaactcatagggttttaattatctaaaaatgtctatttcaattttttaaaaattctgcccatatcatttataagaaacaaagggccacttaaaagtatttgccttctgggcctaaggagatgcctctatggttcagagcactggctgagaactccagagaactcgggttcaggctccagctcatgaccctgtcacctccatgtctgcaacatggactctgcaacgcctgcacgcagatgcgcagaaacatagttctaacataatggtttttaaggcagatttattgagaagctgctctcaggcaagttcattggccccaaggatagaggccagggaagtcactgtggggactgggggttgggagagaatgagataaagggcatgctagaagagagagaaggaggggatgaaggagagggagagagaagggagaagaggggagaaagagagaaagagacagagagacagagagcactctggattatatagggaagagtcctaaaataatttttaaaaactctttaaaagcatttgtctccacaagctcagagagcatgggaccccgttcatagaaggctcagaggttgacagcaaactggaaaggactctgaggggcttgaagcaggagcgacacagagagcgcctggggcccctccaggaccccatccctttataaaatatagatattagcgcaggccacagggccctcaggctttgctttgagaacctatctaaacgtgtctggcactgtgtctggcagtatgagaggttgtaatcactttcacagaatgctcttctttcaacagcagattctgctaactatataaagaggcagaagaaaagcccaggaacaccaagtggtccagtcctgtatctcctctaactaaaacgaccatcagctgtaatacagaaatgtggtttgctgatgttccagagcatacacacacctagggagaaacgattatctaattaagtggagggcatcgagcacctatttgcttttaaattttctacatgtttggaacttttcataattataaagttgggggaaattaagtgaaaagcattagctatcaagaacatttttttcatgccgactagttagtaaataactacttactaagctgttccaacgacagtctagatggccagcaaggtggcttagaggtaaaggcgtttgctgccaaatctgtcagcttgagctctgtccctgaaatccgtggagtaaagagaaagggccacgcctacatgtcttccacatggacgccatggcacacacaacataaataaacaaaccgacccccgtaagcatcgaaatccacataggagatgactcccgtaatacttaaaggtgggcaggcactcaggatggggtgggggtggggccatgggctctcccctcaggagcctaagctcctcagccagttggtgcaatgtagaggaaattggaattcccagtttgtgcctcgggcaatgactttctcccgaagtcacatcttctgtggctttgacctgaactgctctatctgtccacatccacttccaaaggaggctggagatgtggtctgtgtcaataccacgtgcttgaacactgccggaagttggcaggagaaagttctgtggtggtgcgtgcctttaatcccagcactcgggaggcagaggcaggtggatttctgagttccaggccagcctggtctacaaagtgagttccaggacagccagggctatacagagaaaccctgtctcgaaaaaccaaaaaaaaaaaaaaaaaaaaaaaaagaaaagaaaagaaaagaaaaacaaagagattgtcccctggaagacaggcagtgttttggtttggtttggtatttgcagtgtggatagatttttatttgaattagtttttaagaggtacatacaatttttaaagatttatttatttatttattttatgtgtgtgagtgttttgcttgcatgtatgtatgtgcacgcctcatgccaggaaagccagcagaggacatccttggaactagagttacagacatttgtgtgccaccacatgggaccaaccacataggaaccaaaccctggtcctcgtgtgtgtgtgtacagtgtgtacagtgtgatgtttcaatgcacatatacatcatataatttttaaatcaagttagcatgcctaccttttcaaatatttatcacttatttatggtgaaaacgttgaaatctagtatacacagtcacccaacaaggccacagcagaccagaacttcctaccctaacttagcttgtgtcaaacctcccccatcctttccccaccccaccccaccccacccccactctctcaagcttctggtagacactgttcttcctgtaattcctatgagatgaactccccatggtctatgtgtcctgtcgttttgagcctggctcgtttccctgagcacagtggcaggtggaagagtgtcgtctcctgagtggataactcagcaggtgatatttctactcagagcatggagtgcagatactcattaacttcattcctccagccctacccaggagtgcgatggctggttcacagggtagctgtctttcagtgttgcatattattttccatgatggccacactagctgtggtggtttgaataagaatgtagactccccacaccccatagagtcatgttaaacgcttatggagtagcactaggaggtgtggccttgttggaggaagtgtgtcattgggggtgggctttgggggtttcaattgcttaggccaggcccagtgtctgtctctctctgttgcctgtcaatctggatgtagaactctcaactacatctccagccaccatgtgtacctgagtgccaccatgcttcccaccatgaggataatggactaaacctctgaactgtaagccagccccaagtaaatgttgtcctttataagaattattgtgatcatggtgtctctttacagcaatggaaaccctgactaagacactaacctacattcctaacgtaattcttttgtttatattaaaacactggcaatggaaagggatgtcctaaagtcaacaggcctgtcacttgagctgcctatgtatcttaatgggtgcagcatgatttagaataatccaggaggcaagcttccagacatgcctgtgagaaattagctagattaggttacctctgggcgtgcccatgagaaatcacctacattagattaactggggtgggaagacagactgtggtttcaaaggtatgacccccatagactcacgtgtttgaatgcttggcccataggcatggcactagaaggaggtggggccttggagttggtgtggtcttgttggaggaagtgtgtcactgtggaggcaggctttgaggtcatatatgctcaagctgtgcctagtgtggacatagtctccttctgctgcttgtgggtcaaggtgtagaactctctgctcctctagcacctgcatgctgtcgtgtttcctaccatcatggactgagcctctgaaacagtaaacagccccagttaaatgctttcttttataagagtggccatagtcatggtgtctgttcacagcagggaaaccctaaggcacagccccaccctgaaagtgggtcctgaactgaagagaaggcagaaagagagctgaccacagcattcatgattctgcttcccaactgtggactctgatcttttcctcatcatgacaaactgtaccctcaaacgcgagacaaaagaaaccaggccggagctgcttttgtctggtattttgacactgcatcaagaaagacactaggggctggtgagatggctcagcggttaagagtaccgactgctcttccaaaggccctgagttcaaatcccagcaaccacatggtggcacacaaccatctgtaacgaaatctcatgccctcttctggagtgtctgaagacagctacagtagtgtacttatatgtaataaataaataaattataaaaaaaaaaagacactaataggatggaccagtcccttttcttttaaacaagagtgacacattaggtatttgttagggtggcactgggtctgcatccaagccagcatcattccctcccaccttgtagagaaagtgtcagaaagaagcagggattaactctagctgcatatgtatcaaaagatggcctagtcggccatcactgcaaagagaggcccattggacacgcaaactttatatgccccagtacaggggaacgccagggccaaaaagggggagtgggtgggtaggggagtgggggtgggtgggtatgggggacttttggtatagcattggaaatgtaaatgagctaaatacctaataaaaatggaaaaaaaaaggcagggttataaataaaatgccatgagctaattccattaggataagaaagcagggttggaacaaatttataatcaaggaaaatatcccttctatgttaactctgagaccactatctggtaattaaaggtcataaacttggaatggactatttattgtagatacaaagacaaaaatacaatattgattaatttatctatacaaaactactaagtaggcagatcatttgtctcttgacaaagccatgctaacttgtgaattaaaaattattgctttaaacttatagtgaaattatggttctaggaacagataatgaatgtttagtcaaacactagtcttaatggaaagaaatgtaaacaattctgctgttattccttacatcttactgatctgtgactttaattattgccttaaaattattattaacttattggaatgtaaaagtatttagaaaatcatgtaatcaattatcctgctgtgacgactttatctgatagttgtataattttttagagacagtatatatactgaaaacaaaaaataaaggttgttggaacttaaaaaaaaaaaaaaagaagaagaagcagggaaggccatgggtgggcctgggaagtcacagggaactgcagggtagggctaggtgggaaatgagccacacacaaacgtgggctgtgctttgtgagccacttgtatgcagaaagagagaaagacagagagggggaggaagggagggaaggggagggagggagggagagtggggggaggagacaaaatatgtcaaagttccaacagtagcgttttgtggaggtgggatgggctttctttttttctttgttctaccaggctctctagagtgtgtgtgcatgtgtgtgtgtgtgtgtgtgtgtgtgtgtgtgtgtgtgtgtgtactattctgtaacagaaagagttttatttaggaaacacacgccttgcttcactgatctactcttgtttttgtaaatgcaatgagtgtactgtgaaaagcacaagacagatggcaccagtgcccatggggcaggacactccgtggcctctccccttcacggggacccctgaagaatgggggactaaagtgaatggtcttccaggattggatgggcttcagactccaacgttttgaggaaatcacaagttggctgtaaattgattgtaaaaaacatttcacatgggtgaggttgtgtgagaagcaatatcattgcgaaagcgtattatcaaacccctagtcttctgacaagcaaaggtgcgtgttctgaagtgcgttaggatacagtgctggctgttttatcaggtagctgtaaagtttaactttacaactgatagccatttacttattaacagttatctaaaagtaaattactatgaatagcatatattaaagaatattctgtttgtttttttaaaggaaattctcatggccgtgagagctggcctctgttatctgacacacaatagtgtattgcaaaagtcacctttgtccctgttgctactgagggctccagggctccctgtgtgagtcagactggaaggttgaggacaagctcaggggatctttgtgcccatgggaaaggctcccactagccaggcttgaggaagtctgcccagtagtgctgtccagacctgtcactgaccagggcatcgctctcaagcctggcacctatctgagagggcctctcaggccccactttgagaaatcagctcaatgcatttttagctggaataaaggacaagggtcaaaggtccagtttttacatttggtgcagcaagggtgtgccaaatggagatgggagcaagaaacttttgccaacaagagtagtattttctaagagtttcataacttcagctttgtcccacagtaaagtgtaatcttagttcctgactaacactaaagtgaatgtgggtaatttgaaagaattctgtaactattagtttggtttttgaatccttgctcagccttacagagctgaggttctgtgattggatcccgagacacactggcagtgatagttcagcaatcccgcagcagcctggatgcccacatgctggccttgaggcctcctcgagggtccagtcccttctgtcacttagagatctttagacctaagtttacatggcagagacatgtactgtacaggaactgtgctgtcatagtcactggtctattgctgtgaagagacaacgtgtaaaaaagaacattaaattggggcttgctcacagtctcagagccttagttcattatcaacttggggaacagagagacagggcaagggagagagagagaggaacaacagggaagaagggagagagcctgggcctggcatgggcttttgaaacctcacccatagtgacacacgttctccaacaaggccacacctcctaatccttctaatcttttcaaagagttctactactaagaattcaaatatatgagcctatgggcgccgttcttactcaaaaaccacatgaaccaaggacactgctagccagcctttgaatctttatcagcaggacacccacagcttcttgtggcacagatgtggatgagctgggaaaggctacagaacaggaatcctgtttgtagcagcacaaggaagggggtctgctgtgacccttagttcctctgttatggtgtctcccaaccataaaattattttcatttctacttcatagctataatttggctatcattttgaatgcaaatggacgtatctgtgttttctgatggtcttgggcgacccctgtgaaaggaccggaagagttaccaacccacaggttgagagctgctgtcctacagaaacacttataatgtgttttctctaggacacactggtgcctcatgacacagacaagaaacccactaaagtagattttctacagtttagtcaccattacaccaccaccaacaacaaaatgcactcccttgattctctctcactttgtttcccaagtacaattgaattcatttctctcctgagaaatgtccacacaacccacgtaccactgagaagggcaagccaagagcagattttaaagccaggcagagaggagcaggtccctggtgctggggaaggtccggctctgagggtggctcggctctgagggaggctcggctctgagggtggctcggctctgagggtggctcggctctgagggaggctcggctctgagggaggctcggctctgagggaggctcggctctgagggtggctcggctctgagggaggctcggctctgagggaggctcctctctgaggatggaccagctctgagctacaccccagctcctatagtcaggagtgggaaagaaagacaagtttcaggttgagaagcggtgagcagagcagaggtgcgcatgctccacgccctgattgacaatctcctgtgtttcagaggaaaggcagccggctgctgaagggtgaagacagaaacaaggtcagcagcaggagcctaggcctggacacaaatgcatcccaagccgcaggaggccgagcccctcttgaggagggctccctctctccgtccagggagtgctggaccaaggaagagcggcccgcacagagcgacagcttctctgggttcagtagcagtgacagtgtcctccgggaactcgatgacggacagtttgaccaggaagagggcgtgacacaggtcacttgcatgtgagttgccaggtgaccccatcagaggccttgtaaatagtaattaaatgactgccatctgactttattttgctactactatcttcatttatgtaatgtttttaatttccaggctcagccttcccctaatctatgtaaactttggcttaacctctgagacaaggaagaataaccagctatttatcagtttaaaagcattcttacatttcactcaactaatacatctgtataaacagatgtctcctctggtcattaagcaacaacctggctcacttccccacaaagggacaaatatcagtatttctcatcaggcctattgaaaaggccgactgtccaaatcatttcaaccaattagcgccttctcaggaagctacagcctcgattaaactgagtaatattctttcctccctatctctgtccctctctcccatggacacagactcatgaaaatatccattccctgcctatagcagttaatctaatttttgtctcttactgttgtatgtccatacaaagcaagccccatttgtcaaaagtctttaaaaaaaattttttttttctttcctatgtcttttctttcaataggccaccaggtggccagtccttcagtaaaccattaactttggcatgattggtcccgatggcctgcctaccagtggcgttaaacagactctcttacgtcagttaaggctgacaggtaaaggcgctcgccacaggagccttgtgacctgagtccagtctctggaacccatagaaatgtagagggaaccagttctacaaagttgtgctctgaccgccacaagcaagtacttgttcctctatgcccttgtgcacatgtgtaccctcgcagtaaaactaatattttttaaagtccctgaagaggggtcactatggagggcactgcatggctgtgcataaccacctgccccactccaatctaggaagaattcaactggctgaaccttcataccctgactgagaacgagtgtccaataaaaggtgactgactggttcatgagaaaaaaaaaagtcattaaaaggagagcccacaatctcaatgtataaaagccatggtctatgaaaacatttcatctatgccaagcaagctggcacacctctaagtatttggcaggcagatgtaggtagatctctgtgagttctaggtcagccagggctacacagtgagaccatgtctcaaacaacaaccaacaaaatctaactttcttttaaatttttaaacaccattgaagagaacaaatatcgatctcaaatggaagtgtgctggctaccactgttaggttcaaatcctgttagacatgttaagcctggaaaaatggtacagcccagacgtcccagtcctgcagaagtggagggggctcacagcccatgtgatgtctataacactggcccactccacatacctcctgctgccaggagccttccatcttgccagcttctacccgggaaagactcgtcttgtacagaacaggggccttcatttaggtatgaaagactgacctccaaaagaactacagtagactgccattaagtaattcacatatttcatatattttattggcttgtcgttgacattgtgagtcatttgaataataaactcttatttgttgttaggctactgtctgactgaacacaaatatgcccatgttttgttttctatacctggttctgttttcttttttttttatttttaaagatttattttttttttttaatgtatatgggtacactgtagccgtacagatggttgtgagccatcatgtggttgctgggaattgaactctggacctctgctcactccagtcccacttgctctggccctgctctctctggccccaagatttatttattatacataagtacactgtcactgtcttcagacataccagaagagggtgtcagatctcattacggatggttgtgagccaccatgtggttgctaggatttgaactcaggacccctggaagagcagtcaattctcttaactgctgagccatctctccagcccttgttcttttcttttctcttttcttttctttccttttcttttcttttcttttcttttcttttcttttcttttctttccttgttttgttttagttagttagttagttagttagttagttagtttgtctgtttgtttgtttgtttgtttgtttgttttttggaaggtgttggttggttggttgattggctgcttggttggttttttgaaacagggtttccctgtgaagccctggcttgccgcaagctggctcagccagagtcccttaacccgagggagaaatcagggtcctggaactcaggtgggcaaggagtcagcgagtgacaaacagacatgaacacaagggtgtgttggaactgaatgtaatttctcaaagcgagcatcagacttataatacagaggaaaaacaaggaagttaggtggtacattagccaaggtacattgaggttatctgttgtataagcactctttacagagaaatccatgcataaaagctgacaggaaccaggcagtgtttacaactgagataagatcagccctatctaaagttagctattcacaggagccaggtgaagaggctaacacacccaggtgtaattttagtctattgtttaacccaccaccaggggtcccttagtaaatacctaattatgctattcctctgggcctagtgaaaaacatgcaccaggagcgttctgttctactaaccctttcatgaataatacaatactccaattcctcctaaaatcacaactcaccttatttctactattatacaatgtagtttgccatacatgactgtaatgagaattttaagtttactttgttgaacttaccctgagatttctagctcttacccagtaaactgcaatgcctgatttctttcactatatctctggaggcatttcgtatgaataagtaacattcttacgaaattccaagcccagggttggctcagcaactgcctaggacattgggatactggtgaaggccaggaagcaatgttcaatctaacttggctatttgtcaaatcattccttgtgggcacctattataaagcaatactgaaagaaagcatgcaagaccctccacactatctcaaggacaaatctggaccacttttgtgctacgggatgccagagactctccaggagaccagtttctgtgaaactttatgcctcaggactgcggccaagcttttggacttgtcatgcagactccactggagtgggtgtggcactggctggcctcaaactcagaaatctgcctgcctctgcctccccactcctcctgactcttccccacccttccctacccctctctgcccccaagtgctgagtgtgccaccaccacctggcccttcattttgtcttttgagacaaggtcttgctacagatagctctgaaactcttagcaatcctcctgcctcagtttctagagtgctgggagtacaggtgctatgctaccatctatctggctttgatatgttctatatgtatcctgtgttatcaaatacttaaatgtacccaaactaagccactttccacgagtttctggtaaagacacaaggaagcccttgcctgctacgctgaagcctcgctgtacatgcagcatgctgctctatcagtgctggtaggcaggatggggggggggggtttctagaagaacctgggttatatattcaagtaggtaggtaggtaggtagggcatagtgatacacacctgcaaccccaggactcatgaagctgacacagcacaaagtctgaggctagcctatgctctaataaacaattggtggactcctgaggaaaacggaaaattactttaaaactctgcaacatgtcctgaagctctgaaaaaaaacatggggacatgctcaggaaagtggggcagttccgctgacaggggtgagaaggtgggggaaagaggcttttatacttctgttgttgcacagggagaatctgaaccattaagaacagagtgtggagggagcagtgtgagccagaaggacgggggaggggagggggaggccaaaacgagatggagggtgtggatggacagatagatggatgtatggcagacagagatagacagacacacatacagagagagagaaagagagggagaggaggagggggagtggagagggatggaggatagagaggcggctcagcaattaagagcaacctctgctcttgtggggaccagtgttctattccagcacccacatcaggtggctcccaagcacctgtaactcagggcagggaagggaatcaggcccctctgactgtacatgcatacaccctgacccagacacatcctaaaaaggtgttgtaactttaagtagagggctggggatgtgctcagtcggcagagtgcttacctagcatgcataaagacctggatccaatcctggcaccacgtagaagaagaagtaggcgttcctacagcagaattctagatttaaggccattcttggctacatagcaagttagatgacagcctaagccacatggaactctgtctcaaaaagaaaaatggaggcccagatgtggtggtacgtgtctataattccagctctccagcggcagaaacagagtccaagggtatctttaacaagttactaaatttgaggttggccaccctgggctacatgaggtcttgtctttaaaaaaaattacatgagaaaagaataaataaaaaggggacagagatagaaatttacaagtaactgacagaaagcttaggaaaatatcaattacttttaatttttttttaaatgtgtacagcatggtggctcacgcattcagtcccagtcctcatgaagccaaggcaaggagatctttgagttagtggttagcctggtctacctgagaccctatctcaaaacaaaacaaacaaacaaaaaaccaatgcaagcacaatttttgttgttgttgtttttaaattaaactcagggtcttgcttcatagcttaggctggccttaaacttacaattctcaggccttaacctctggagttctggcactacaggagtgttccatcccaccaaacctgcatacttatgacttgtttctagggccagcaagatggctcaacaagtaaaggtgcttgctggaacactgggcagcctgagctcagctcacaggacccagtgggcggaagcagagaactgactctttgtaagctattctccgacttccatacatgtgctgtgacgtgtgtgtgtgcacacaaacacatgaaataaataaaaagtataaaaacattgcttttaatttaaggatgattccaagcacctatagaattttcagggtgccccagatagttttttagacatggaaaaatacttctgttggctttaaaatatgatgaccgtaaagtaaacacttcatttatagagcttcaaaacatacagctttagtcagacagtggtggcacacgcctttagtctcagggcttaggagacagaggcaaacaaattaataaaaacatacagctttaaaactagacatagtggttcacacctgtcattccagcactcaggacaccaaggcaggaggatcagcatgagtttaacaccagcatgggctacatagtaagttctaggctaacctggactatcgagactctacctaaataaataaataaacaagtaagctgggcacgatgactcatacctgctatccaagaaatctgacaatagaagcagaaggataggagttcttttcttgaccttcaatacgcagagagttcgaggccagactctgctacttggcttgctctctgacaaaactagacagaagtccaccatgtgtcaagtgttcttgaactggacatagtggcacagggctgtaatcccagctcaaaggagacagaaacagaggaataatgaattgcagggtagtctgggctacaaagtaaaacctcaatttaaaaattaaataaatctgccatatccattagactgccataaattttgaaaacaatttgtttagcttttctcattccaaaggaacttcaaagaatatatgataatcggtatctgtaaatggagtccaattcttgtgtttgttttgggtttttgtcctgttttgacatggggtctcactatgtagccctgggtggcctagaactcactgtgtggatgaggcaagcatccaatgcacacagacctgcctgcctctgcctgttgaatgctgggattaaagatgcgagccgccacatctcctaggagtccaaaccttaaaactgaatttcaaagaaaggtttactttaagaaaggtggacattgttgaagcccgctcccccggcatagcttgactcagagcagggtcatgttgaccactgatatgttctgtatattctgaggtttgctaatcttaagaaattctacaaccataagcagccaggaccaatcacataaaggtcagtccgaactgttctgtgcaggtgtccagaatggcttgagtcagagctgaccaccgggcagcacttcctgcacctgcatgagctcactgtgggctttgcctgtgtagactggccctggggaacatttgaagacaaagtctagctgtgtccctaattgatcagtcttgggggtgtgtgatcaataaaccagctctgcttaactgagattggtgtctgagaggtttgtgtggtgattgctaggataaagaaatatactttaacgtgaactgggctacatttttacatggctgctctggagaagaacctggggcctacaaatgtcttaagatcatctgattcggggccagtgaaatggttcggtgcttgccaccaagtctgatcacatggtgaaaataaaaaactgacctacacacacacacacacacctaaatgtaaaagaaaaagattttggttttttttttttttaaatgattgtgtcagcactcaggagacagatggatctctgagtttgagcccagcctacactacacagtgagttctaggacagctagggctacacagggaaaccctgttgtgatgttttgtatatactcgatccagggactggcaggactagaaggtgtggccctgttggagtaggtgtgtcactgtgggtgtgggttataagaccctcatcctagctgcctgaaagtgagtcttctcttagcagccttcagatgaaggtagagaactctgtttctcctggaaccgtgcctgcctgggcgctgccatgttcccaccttgatgataatggactgaacctctgaacctgtaagccaaccccaattaaatgttgtccttataagagatgctttggtcatggtgtctgttcatagaagtaaaaccctaagacacctgtctcaaaaaaaaaaaaaaatgtgtaatctaaagcgttgggaagcttaggggagagggtctcagacacctggtggtggagacctgagactggaggacggatggcttctttcagatacgggagagttgccagcactgaagagaacaggtaactgggaacttggaaagcaagttcttctgcctgctgagaaacgttgtgtaagaagaacccatcccccactgctgtccttggcgctcacttcactaaaccgcagagccccatgaattcctgagtcacccagtcccatgctgtttctacccaaggaatgctttcctggtccagatagcacatccaaggcccttgcacccatgcagcctgagggctggtgagggctctgatgctttgagcttagagggcctgaagataggctctcctgacacctgatgtcacaggctgtggcctctccaaaggtctcagaaagtgacaaaagtctcatcccacttagggccatcctgctgtgctccagactgctagccagctccttgcctcagtgtttctccatatctgacaactggtgtttagttaaaataataaggacttagtctctatctgccctaaaagttgacattttattcagaaacagtaaaccctgtaaattctatgaaaaatcccagaccagtaacaactgcattccccataccccaaagcaatgcttgaaaaacctcttcactctggtggtgaggcaggaagctctctgacattcaaagctagcctcgactacatgccaaaaacgctgcctcagaaaaaagaaggaaaaaaaggggggggggagaaagagaagaaacaaaggaaaaaaaaatccctcctcctgattcctccaatcctgcccactgcttggaatcatattatactaatatacttaactatgttcagttatgcaaaatagccacacataaatacaatgttaagccaagtgtggtagtgctagcctctaatcccagtatttaagaggtcaagcgagattgtctcaaattcaaggctagcctgggctgcactgggagactgtcttaaacaaacacacacacacacacacacacacacacacacacacacacacacacacacccaagtcaggcatggctggcacacactttttatcccaacactcagagggagaagcaagcggatctttgagtttaaggccagcctgctctgcacattgagttccaggacagccagggttacctagtaaccttgccaaaaaccaaacaacaacaaaaaaactatttaaaagaaagtcctcattgacttctcaatagccaggttgtaaatgcatccatggaaaaccttacgtttgagtctgtctcactgtgtggctggcttaactaatcccctccatggctcagcctcctgaggagcaagagctacagacagcacaggcagaagcagcgccatgcttgaaacccgttgttttccttataaggacagggtctcactatttagcccaggctgggttcagacacaatcctcttgctaggattccaacaagggctttttgtggagcaaagggtcacacccagggtgttgtctgtgccaggtaaacacggctttgagatagccccagccctgaaaaggctttaatatagattattgccaagggttacagcctttttatctcgtagcataagagagcaacataagctataatgcatggtactgtaaaacacaatttacaaaagccgggcgtggtggcgcacgcctttaatcccagcacttgggaggcagaggcaggcggatttctgagttcaagaccagcctggtctacaaagtgaattccaggacagccagggctacacagagaaaccctgcctcgaaactgccccccccccaaaaaaaaagaaaaaaaaaaccccacaacttacatgctattcaatgaaacttcctaacttttgagacaaaaatgactgatgtgatagatcaaaactttcaatcagcgagagtttcaaaaaagaaaggagggagagaaggaaggaaaggagagagggagagggagaggaagagagggaggggaggagggagggaaggagggagggtgaaagtagtaagtcggagccagtgataaggtaggtaaggcacgaggccccttggcctgggttcacttcccaggacccacatggtggaaggagagaatcaactctgcatgttagcctctgaccttcacgcgtgcccacagcatgtgtatgccctttctccacatacaataaacaaatccatattcttcttggagtttttatgatttattttttaattatgtgcacatggtgggtgagtggcatatgtgtacaggcccccaaagagtccagaagagggcgccagagccctgaagctggggttgtgggaagccgtgagccacataacgtggttctgggaatcttcctctggaagacagcaagtattctcaacatccctgacccacttctctagccccttccttcttggtttttaataactcaatgccaggcatggcggtgcacatctttaatcccagcactcgggaggccatgaacttgaacacctgcctttgttctcaaacactgggataacgggcgctcactgttatacctgacccctacgttacccttttgaagccacaaatgtcatattctgtttctcccccataagtcaatgctgtagtctcaagactgctaccattggcatagctgttacctgaaacttattttcagatttgcttctgaaatcataaatcgtttttaagatgcctgcttggctcactcacctatcctggtggatgttcccgatcaggggaaagctcctgtcctgggaaatcactcacaggacacagtgctcccacactgaatctacaatggcgttattcacttactcactcattggatctggattatgacagatgatttcttctgggcagtgagctaaggtttcatcttcatattaaatcactcaaggcataaacaggccaaggccaagcgatgagcggcatccatgccaactgtgactcacggaggctcatttgggttcaacttatggaatcaccaaattagtgcttgcctgtgtaggaggttctgagaagaatggctacattgtgaggttcctggcacacttagaaactagccagtgtgagttaaaggcagatgggactacagccaggcctatttttaatttagaattgtaagcaaagaaaggggctgtttatgatcagccaaaatcacagtctgattcagatagggcctggaagtcctggataccccagcacaattcactctgccggacagaccactgccaaactctaacctcctcctgactcagtgactgaatgttacaatttggcctcaagaaacatgtaggattcacattcagccggtggttcggggagacgtaccttccaccttagaccatggccaagctcatccgtaacttcgcagagacggcaccatcgatggtggctgctgccgtgacttactcgaagcctcgattggccacattttggcactacgccaaggttgagctggttccctcaacccctggtgaaatccctacagctattcagagcgtgaaaaaaatcattcaaagtgctaaaactggtagcttcaaacaccttacagtgaaggaagctgtgctgaatggtttggtggccactgaggtgtggatgtggttttatatcggagagatcataggcaaacgtggcattgttggctatgaggtttgaagaccaatctttaacttccgatttgagttcttatttgaatgttcttggaccatgtgtaacgggactgctatctgaataaaatactaggtgttgaaaaaagaaacatgtaggattcaaaagaggatcatattgttttctgctgggattgattgcagcatcttgcaaaaatgcaacttacctggagctatttaaaatctgagatcacttctgcttcacctttgtgcaatggagagaggggtctgggcactgctttctctcgcggtcctgtccatgcctcccagggacctgcagattcagctctgttgcctgtgcaggacaacctggtctacacggtgagtttcaggccagccagggctacactatgggaccctgtctcaaataaatggtttttcatgaagatgagaagaggtggggctaaaggggctgaggacatagctcagttccagagtgctcacctaacaggcacaaaaccctgggtttaatcccagcaccatggaaactcagcagaaggatcagaagttcaaagtcactttcatctatgacagcctaggccataggagacactatctcggaaaaatta

SEQ ID NO: 580 - DNA, 2539 bp, Mus musculus
tcggtagaagccgggaagcacaggactgaccagaagaaacagaaagaaccgcatcactttgactgactttatcttctatccgtagataatcacaccagagttgcacttttgtctttaattccgtttctggacacctcttttccattcagccaactgggtgagacaaagcccgtcggtgccctgagccgcagaactctggtcgggggctggctggctgtaaattgacgtggcatggaaattctccactaagttgcagcagctcacgagctcctcaaagatcgagcccagcctccgggagctggagctaaggctcagtaacagtaacgttaaagaagaatggataaaagtccccagctcctcgccttggacccgccgctttctttctggctatctgtcatttcgctgaaaaccaaatcaaagcagttagtctgtaactttgttttcgcagcttaaacaacaaaattgaccgcgcttgctcctccggctctcccctgcaatcttaactccttgcagactttgccatggggtgcggacttaggaagctggaagaccctgatgaaagcagccctggaaaaatattttctaccctgaagagaccgcaagtggaaacaaagacagaatttgcttatgaatacgccctgctggactttactttacaagcttcaacaaatccagacgtcatcaagataaattcagtcctggatatagttgccaaagtggaagactattatcttaagggctatgttgttggggccattcacccagttatacaacctgtggggcagcggaagcaccttccagcaagtcacctgtacagggcggtgctgtcccggctgaagctaagccccaagcattctgcagcaggcggacaaaggcgcgcaaggcttgtgatggaggagtgtccactaacttgtgaggcacaagcaaacgacgctgcaaaggaactcatggacaagattaatgccgctgctaaaagagggatgaagtttgttgggctggtctcccagtgctacttgccatctatgcactgtaatggagccagccacgatggagttgcagagtcggggctacacgtgagacaagattcacaagacaactgcaaaggctggaatgaaggagcccttggtggacacttgtctgaaagtggagtggaggaggaacctcagcatgaaagtggacagcatcagacagagaggaacagcagccccagctacgctaacccaaagcggggagaagccccagatggtaagctgtacatggtcttcaatgcttttgaggaagatgcggccagctgggcctatcaggaaggtgtcctgtccatgaaagtgacgcggaagggagctgtcatcagcgctctggacgccaactggctagaactaacgacattttactataagcaaggcttctctttaattgactcttttgtgtgctgggagacacctaaaggggaccagttacctaaatctttggaaggcttttttatctacgaagaagaaggatctggagtcccaggttctaacaggagaggaaacgacgccattgtggtggagcagtggacagtcattgagaggaaaggcagccggctgctgaagggtgaagacagaaacaaggtcagcagcaggagcctaggcctggacacaaatgcatcccaagccgcaggaggccgagcccctcttgaggagggctccctctctccgtccagggagtgctggaccaaggaagagcggcccgcacagagcgacagcttctctgggttcagtagcagtgacagtgtcctccgggaactcgatgacggacagtttgaccaggaagagggcgtgacacaggaagaattcaactggctgaaccttcataccctgactgagaacgagtgtccaataaaaggtgactgactggttcatgagaaaaaaaaaagtcattaaaaggagagcccacaatctcaatgtataaaagccatggtctatgaaaacatttcatctatgccaagcaagctggcacacctctaagtatttggcaggcagatgtaggtagatctctgtgagttctaggtcagccagggctacacagtgagaccatgtctcaaacaacaaccaacaaaatctaactttcttttaaatttttaaacaccattgaagagaacaaatatcgatctcaaatggaagtgtgctggctaccactgttaggttcaaatcctgttagacatgttaagcctggaaaaatggtacagcccagacgtcccagtcctgcagaagtggagggggctcacagcccatgtgatgtctataacactggcccactccacatacctcctgctgccaggagccttccatcttgccagcttctacccgggaaagactcgtcttgtacagaacaggggccttcatttaggtatgaaagactgacctccaaaagaactacagtagactgccattaagtaattcacatatttcatatattttattggcttgtcgttgacattgtgagtcatttgaataataaactcttatttgttgttaggctactgtctgactgaacacaa

SEQ ID NO: 581 - protein, 462 aa, Mus musculus
LLADFAMGCGLRKLEDPDESSPGKIFSTLKRPQVETKTEFAYEYALLDFTLQASTNPDVIKINSVLDIVAKVEDYYLKGYVVGAIHPVIQPVGQRKHLPASHLYRAVLSRLKLSPKHSAAGGQRRARLVMEECPLTCEAQANDAAKELMDKINAAAKRGMKFVGLVSQCYLPSMHCNGASHDGVAESGLHVRQDSQDNCKGWNEGALGGHLSESGVEEEPQHESGQHQTERNSSPSYANPKRGEAPDGKLYMVFNAFEEDAASWAYQEGVLSMKVTRKGAVISALDANWLELTTFYYKQGFSLIDSFVCWETPKGDQLPKSLEGFFIYEEEGSGVPGSNRRGNDAIVVEQWTVIERKGSRLLKGEDRNKVSSRSLGLDTNASQAAGGRAPLEEGSLSPSRECWTKEERPAQSDSFSGFSSSDSVLRELDDGQFDQEEGVTQEEFNWLNLHTLTENECPIKGD

SEQ ID NO: 582 - DNA, 70708 bp, Homo sapiens
tgggaacgaggccatatttttggaatatattcaaatccctaccatgatcttcccagagattttttaaaccaacaatgacttatctttaagggcaacttcatttgaaactatcttctcagagctggaccatcaacaaatgggcaaatcaccgatgtctatttgcgtgtttacttgcaccaggccctgggctcatgttttacagttattttcacaataactctatgaagttaatattattctttattcttgtttcagaaaggaaaggtaacttgttctagatcacatgcttagtaaatggcataatcaggattcaaacccaggtgaattgcttccagagcctaatgctcttaaagagaatagtgtactgcctctctttctacataagaggacctcattacaaagcaaccaatggttgtagagcacttactgtgtgccagacactctctaggaaccaagattaatttattaatcctcctaacaaccatataaggaggattctgattattcccattttgcagatgaggaaactacggcacacagaagggaaataccttactaggtgtggcagagctaggatttggatcccggaagtctggtgctggagtctatggcctaaaccactgctccatgagtaccctggagctctgtttgtgaaatatattaatagtacgcccaagttttctttcagtgggtcttttaataagtatttttaggtacttaccgtaatgtcatctctgtgctgggtgctacagttttatcaaaagacattgacctccagataggagaacatgcacatttgaaacagttgaatattaatgtaaagcagtgggcccaaaacaaatatgagttgttttgtttttttttgagacggagtctcactctgttcccaggctggagtgcagtggtgtggtatcggctcacttcaacctccacctcctaggttcaagcgattctcctgcctcagccttctgagtagctgggactacaggcacacaccaccatgcctggctaatttttgtatttttagtagagacagggtttcaccatgttggccaggatggtctcgatctcttgacctcgtgatctgcctgcctcggcctcccaaagtgctgggattacaggcgtgagccaccaagcctggccccatgatctttacataagcttatgttcaaatatgtttattagcactgatgtacaacatttgttctccctttctaacttttctggatttctcagtttgtaattcctcctgaaacttttatgtgtgtgtgtgtgtttcttgcattaacatttctactatggtaagacttaagacaatatccttactttattgagagtgcaagaagatgtggattagaccagaaaagcagaacttattccaatgatgcaaaatttttctgacatcaccagaaacgaggtatttcttgggaacacattctgcacctaaacaggaacctctttaagcatcaattttattctattatagctatcttctttgtgattattttaacatgttgtataattctgcttttaaaaactgttctgaaacaacagaatgaaagggggatgacttcattattgttattggtttaaactaatgacatatgtaaagccctttaagtggccccagactaatgtttgtatagttttttgtttttttgttggtttgcttgtttgtttgtttgttttttgagacagagtcttgctctgtggccaggctggagtgcagttgccccatcttggctcactgcaacctccgtctcctgagttcaagcaattctcatatctcagcctccagagtaagtgggattacaggcatgcaccaccactccaggctaattttatatttttagtagagttgacgtttcaccatgctggccaggctggtctctaactcctgacctcaagtgatcctcccaccgcggcctcccaaagtgctgggattacaggcatgagccaccatgcccagcctatatttgtatagttattttatccagttttgtaattcattttattccctctggtgtcatctgtctcttttgctattatcattgtgtccttgctacttctaacccagtgggtctccaagcttccaccaaaaggcactggacatgagatgctcttcggctgtatatacagacacagaattaaacattggatcacttaaacagaagagtatgcccttttccatcttatttaagccttcccatcagtttggagttaatatgtctttaacacccctctaatggctaatttttctccttttttgtttttgatttttttgtttgttttaagacagaggctcactttattgtccaggctggagtgcagtggtgctatcatggcttactcaagaagttgcagcctcaaactcctgggcttaagcgatcctcccacctcagcccccaagtagctgggacttacaggcatgtgcaatcacgctcagctaatatttaaattttctgtagagacagtgtctcattatagcccaggttcgtctcaaactcctggcctcaagtgatccgcccacctcagcctcccaaagtgatggaattgcagacatgagccaccatgcccagcctaattttccttggccaggcctgtggctcagtctttggcaaataacattatctagctagaatgtaataagttttcttttcattgtatttatttgtatgacagctttctacttaagataaatgatcctggttttatgttatatgagtgatataaattctttttgaaataaatttattttgcttaaaaattaaaattagaagaaaattttaaggatatgaccaaaattgtgaaagtgtacttagacaactaaagtttgggaaacaccaccccagttcaatgagcagttggttgagagagttgttaaggggaggtggctccatgcctttcttatggaaaaagtggatggactttttcagaacttttttttggtaaattgaggttatttctactgttctgttattgcaaaagtaattgctttgccattgaaagcaatggcaaacaccataattatttttgcaccaacccaatagatttttgaagttgctggcagtctgctttctagtaaagttgaacaaaaatctctttcacctctattgttttagcctttttttttttttaactaaccagatagatattttttaatgagcatgtcagagtctcactctgccctgccacatgcagtttgggggagtattcccatgggtaactgagtcttccattgcttagtcagtgttctacctgccagcctcttctgtgtgacagcccttcagatatatccagatggtgccctgttcctcacatattattttgcacagttgaaagacacccgtcagggtctccagacccctcattatcctgagcactttcttttgaatgtactccagcttgttactgaatgtctctaatttcacccctaaattgaaaacagtttacttatccattcaacagatattaattgaacatctgtctgctaggcaatactctaagtatagagatacggcactgaacaaagcatgaatatccctgccctcacagagctttcatcctgcccttgtgggggaggcagatattaataatataattaggtaaatagtatattctggttattattatttggatagttattaatgctaaagcaaggaatatactaatgagatggtctgctcaataaagaacttagtgagcctcctgcctttggaggtaatttttttccagatagccaacgatcacattagattaactcttggcttataattagtttgcagtcagctacagaccacaggatttcccctgcccccttcagtgaaaatatattaaatcagaattctgtcactctgtgttttgaacttagactttatccctgttagatttttttgtttgggagacctttgtaccaccaaacaaagagctcttcaaatcttcattctcttagctaatatatacaccatcccttctttgctatataattaactctaagacaccattgattataaaacacactattattttatgtaccattaagaaagaaaaatgcaccaattaaactataactattttctttcagtaattttagtttttacccatggcaaaagctcttttagacattttaaacataagtatttcattatatatctctcttacatacataagaaaaggaaattaagtgaaatgaagatatttctaaaagttcctcacacttaagacctgactcttctgaatcacttttagaacttagagccctcatttccccatttttccacgtaatcttcctatgagcggtcaagagtattggtaatgctgcatttcttaagcaagtgctagggttttctttcaagtagctgacacccattctgctaagtttgagactggggctttcctcatattgccagaggctaccaatggaaagttttcaagcagccaccaggactcatattcttttcttaagtgatccttgaacagtttgttgactgaaacttcaagcactctgggttgtccagccatgccacatggaaaaacaatcaactttgcacaggtattgacaagcacatcataattaccacccggcctacagtattgaaagataccaagaggatttccaagacctattattgggttcaattttataatttataaagacacaccttcacaaaaatgaaatgctcacctctacttatatttgtaatcaaccacaatctatggacttttgtgtttcactttagtcatgtaaatattattttttaaataagccttaaaattccttacaccatcattgctttttaggttttcattttgcaacctacgttgctggataatcaagtaaaactgccaggaaagtatcaaagttctttatttttcttgcatcatttttgaggaagaaagtatatgcctttttaaccaaaaaatagatgccattgtactttttaaaaattgttgacttaaacataagaaataaacctataaaactcctagaagaaaacagaagaaaagcttcatgacactgtacttggcaatgatttttctttttttttgttgtttttgtttttgtttttttgagatggagtttcactcttatcacccaggctggaatgcagtgacacgatagctcacttcaacctccgccttccgggttcaagcgattctcctgcctcagcctcccaagtagctgggattacaggcatctgccaccatgcctggctaatttttgtatttttagtagagaaagagtttcaccatgttggccaggctggtctcaaactcctgatctcaggtgatccacccgctctggccattgaaattgctgggattacgggcgtgagccactgcgcctggcctgacaatgatttcttggatatgacaccaaagcacaggcaaaaaaagtaaaaatagataaatgggactatatcaaacttaaaagctttggtgcatcaaaggacagtcaacagagtgaaaagtcaatatgtggaatgggagaaaataatttcaaatcatatacctgataaagggttaatatccagaatatataaataactcctacaactcaacaacaaagaaacaacccaatttttaaatgagcaaagggtttgaacagacagttctccaaatggccaataagatgtgaaaagattctcaatatcactaataattaggggaatacaaatcaaaaccacaataagttatcaccttatacctgttagaatagctactatcaaagaaacaagtgttagtgaggatgcagacaattagaacacttgtgtactgttggtgggaatgtaaaatagttcagccatcatagaaaacaatatggagtttcctcaaaaacttataaatagaattaccatatgatccagcaatcccacttctgggcatgtatttaaaataatcaaaagcaggatctcaaagatatatttacacacccatattaatagcaacattattcacaatagtcaagaggtggaaacaacccacatgttcatagacagatggataaacaaaatgtggtatatatattcaatggaatattattcaatcttaaaaaggaaggaaatcttgtaacatgctacagcgtggatgaaccttgaggacattacactaagtgaaataagccagtcacaaaaaggcctacagtgttgtaaagatacgaggaagattcccaagccaaggcacatcccttattcttagattgaattttacaattttcaaaggacacactttcacaaaaatgaagtgctcacctctattcatatttttaaagttatcaaccacaatctatggacttttgtgtccatatgattttgtgtcaatatgattcctcttatatgaggtatctaatgtagtcaaattcatagcaaaagaaagtggaatgatggttaccagggtctgacaggaagtaatggggagttgtttaatgggtatagggttttattttttcaagctgaaaaagttctggagatttgtttcacaataatgcgtgtatacttaacactactgaactgtacactaaaaaatggttaaaatggcaaatttttgtttttcctacaatttttatacattttaatatatattatatatctttttattgtagtaaaacatacatgacatgaaatttaccattttagctattagtaagtgtacagttcagtgacattaagtacattcatattgttgtgcagccattactacaatccaactccaaatgacatttaattgggtagtgaagggggtattatggagctaaaataaaattaattactaactgctgagtatctggtaaaaatacagaaccattgaaatactttcaaataatctatatgtagtagcaacttaagtgcctctttgaacttcgtaggtgccttttttgtgtgggcttctgccgttcttcactatctgggatgacagtaagattgcaaagaacagagtgttgagctgcctaaatttccctgaagtctaacccaaagctctgggagggtggacttttctcaaccctgagttcttgatttctggggtttccttccaatcagtggtgctaaggtagacgaggtaggcaacatgaggcaacatgtgccctgacagtgactccaaccaagtcagcaagagcagcaaggccagcagtatccagaagtactcccaagcccacaagctcatgtgaacttttctgaataaaagccacattcttccccttcattaaatcattatttgtggtacaatcttctcccagatttctttctggatttcattcaaagatggagctaattaaatcccattagctccacctctaagtattttttcttcatttgcaacatggctttttctcattgtaatatcattaaaatgaggaacatgtggtgaagccttatgctagagactcctgaagtaaatatgacctttacctctatttatttggattctcagtatgttcttaaccatccccacttccatgatcaaaagaatttttacaaattccacgtcactgcctatgtttttctctgttttgtctctcttctccaaggcctagatagtgtgaacaattgttcctgaaattgctaacctaactttttttatttccactagctaatcttgattgcttgccttttttatgcaataacttcatttcttaattccccttatgagcagtatttccaatttaacatagtgacctaaggaacatgctagacatagaaagacatgaatacagtaggttcctttcccttaaggaattctcagtctaacagccaagacatataaacaaataactataatacaatctgataagcacactaatagaaggacatgcagcccagaggaaggaataattaactcaggctgggagaacagggaaggaaatgaaggcctggtggcatgaaacagagtggcaggttcagaaacaccaagtccttccagcatcccaaagcaagacacgtaagagaaagactaacacgcgtggaggctgaatcaagaggcagaggccagactatgaagattcttttgtattacactaagacatttccacttcctgcagtaaacaattttctttaaatttttttaagattagtatatagttctaaaaataagtttaggttatgtttcattccttagtgttaagagttgcttccattttgttatagtttttcagttcctttgtttagaaatcagagttggtagtcaaaatactaaagagcaaaaccaaatgaatcacagaattgccacaccaacaagcagagctgggctgtttacaaggaagcccagctgtttcttcaaagtccaagatcattctctttgttttcattcctattcataatgatgaagaagatatattgtaaataaaatattaatttaaatccaaaagagggtgaaaattggaggaagtggacccttcctggtttatataacttttctgttgagcgcttattttagtttttgaagttggcgtgaatacccactgatggtggatttgtctcatcatgtggatactgatgtaaggggaggaggggatttcctctggcccttcctcctcatctgcttcttaacctccttcctgtgctcaggcaatcagccgcagttctttgccagacaccactcaccacactgacagaggtcaacagccaactaggctcatatctggaattaatttcatatgtcttgttacttaagagataatcaaaatgcaggtctatttctaggtattacttcttgattgtttttcatacaatgagaaatattgttgtagcaaataaagttgttatttaaattaatactgctggatcattaagaacattttctcaaataacacactcttttccttttactactctaaagtctgtacagatagtgctattctatagtttctacagatttgctatccttcaaggaatggtttaattgcaaatcaattttgcatttaaatttccactacgtttagaatttttatttattaaagagactactggatatctgtactttttcattcacctttactcaagcatttacataagcaccatgagaaattatatgtttagcttcccagataaacttaaaacacagtgctttgaaagagtaattagaaataagaaagccttgacaagtgctgcctaataaatgccatttctcccatttttagttattagattggtatgaattttatttttaagaaattatgcatctcggctgggagcgctggctcacacctataatcccaacactttgggaagccaaggcagcaggcttgcttgagctcaggagtttgagatcagcctgggcaacatggcaaaacctcgcctctacaaaaaatacaaaactcagccgggtgtggtggcatgcacctatagtcccagctacgtggaaggattgtgtgagcccgggaggtgggggctacagagagccacgattgtgccactgcactccagcctgggggacagagtgagaccctctctcaaaaaagaaaaaaagaaaagaaaagaaattatgcatctcatcttgtttagtcataaaaatgactggctcttcaaattattgtatctcctatgtatgtcttcaatatctattaatggaaatatagtcactcaaatgaaatcctaaaaaatgaaactgacctaattgaaaaaactcataagacattgtatttctgctttagacatatgggtgatattatgtatctactaatttgtaaggtcacttttccttttttctgaaatgactttaaaaatgtataaatacatgttaatgtaactttatctgagattaagccattggagttttttttttttttttttttttttgtagagacaatgtcctactatgttcctgttatgttgcccaggctggtctcaaactcctgggctcaaacaatccccctgcctcagccttccaaagtgctgggattacacgcatgtgccattgcacccggccaagatcttttcctattcattagtattatcacccataggtagaaataatgtataattcaatcttaagaatatgcaaatttctctttgcttttgatatttcagcttcatcaaacccagaagtcatcaagataaattcaattctggatatagtaacaaaagtggaaaactattatcttaaaggatatattgtcggggctattcatcctgttatacaacctgtggggcagcgaaaacacctacctgcaagttacctatacagagtggtgctattgcgcttgaaattaaggtaagcacactattcaagaaagaggcaggtgagggtgacagttctctttgtctaaaagaaaaaaaaatttgaatcaagtggcagagaataaaggacacatgggggttttagtttaaagcacattttccagcagtggaacctggattgaagcaaggaaatgttacacctccttccttaaaactcctgattgatttttgcttcttgcagacaaatgtgtcctaagtgaggatgtcagtgaacaaagggaaagcaaaatagattccagaggcacctagaagctcctgtagccacttcagcagatgcaggagaagcagtgagctacagatactatcactaggctaaagagctgaccagacctaccaagtccactttcactgagctttctgactgtcctacattgttttattaatagtggcaacagaaactatctctacattctaaaactttttttttttcaagacagagttttgctctggttgcccaagctggagtgcaatggcaccaactcagctcactgtaacctctgcctcccgggttcaagcgattcttctgcctcagcctcccaagtagctgggattacaggctcctgccaccacagccagctaattttttgtatttttagtacagatggggtttcaccatgttgaccaggctggtctcgaactcctgaccgcaggtgatccacccaccttggcctcccaaagtactggggttacaggcatgagccactgcacccagcccattctaaaacttttaacgacagaaagacctactatgacaagttctaacaaattagatagacctcttgttaacctttttccaaaatctaatttaaaagctaaccattgtagtgttttttattttaatagctacttttccaaacaatactgcaaccatttttgccagcctagattgtaaatttgatagttttcatggtaaaatactgttgttctttccaattaagaataaaaataaccagacaaatatcttagattaacacattaaatttttttacacaaccctttaattaatatgttgcttaatgacagggatgcattctaagaagtgtgtccttaggctgctttgtcattgtgtgaacatcatagagtgtacttacacaaacctagatggtatagcctactatacacctaggctatatggtatagcccattgctctgagactccaaacctgtacagtctgttaccgactgaatactgtaggcaatggtatcacaataataagtatttgtgtagctaaacatacctaaagatggaaaaggtacagtaaaaatacgttactctataatcttacgggaccaccgctgtatatgcagtccattgttgacagaaacatcattatgcagtgcatgactgtatatcaaaaccatcctaaagaccagggaaaaaactgcattttctctttacagtgatggatcaacaacaatcactttaagagagggctaagcagagaaggaaaaatgaaagtagaggaaaactaagaaaataggaaaatttcaaaaaacaagaaagagacttaaaaaaattccaggtgtgattttaagaaacactatctcccatggagtaattgcctactttaacatgtctggcagggtgtgtacaggcttcagctttcactagaatatgaagcctcatcagatatttactagtttaagcattactaagcaaacatgacatttttgcatagtaggattgcttatgtcctaattacaaatcttatcaaccatgtgtgaattatcttttctgcttttaggattacttcagacagatttagcagtaccctggcaagccgaagaataagcaaagaaaaaagatcagaaaagaagaaaaagggaaaagggcaatatttatttgcatttaaatggaatttttacttctgcttttgttcgataagatataacaacaatctaaaattatttcttataagtttattaaaactacagacatgaagcttttctttctttctaactgacaaattaaattaatagcagtttaaattaaggaaatttgaattaatagaagttattgtgcttttctggtatttttatataagaagatagccatcaggtttgaaataataaaaaatgattaccttgaccctgtttgtgagttgctcactcattttcacatgagcatattagctgaaaagcagcaattggcctccaaccataaacatattccctctgttacagcccaaagaattcggcagcacccagtggacaaagacgcccaaggctcgtgattgaggaatgtcccctaacttctgaggcacaaacaaatgacgcagcaaaagaactgatagaaaaggtactaaatttatgcactttttcatgggatattgacaaacatttggtatttcatcttcatcaattcccttttttaccctaaaaagaataaggaaatgacaggtaacttttctaccagaatttaaaacatatcgaagtacttgtgccaaatggtaaagcgtttaaaacagaaatacaagccagtgaaacaaaatggacaaccagaactaaatttaaacaaatataagaagtttaatgacaaacctgatgaaataaaatggaggaacaaccattatttaatgaatgctgttgggaaagtaggcaattgttctgcagagaataaattccacatttcagatgagataaagaggtaattttttaatataaaaaaacaaaagaaaatggaagagtaaatatagtcaatgaatagattaaggagtttgagtatataaatataacttaactgtactaggaaaactaagcttaaaaaagaagaatcaaagagaaatctgcaacagacatgtcctataggaggttcgttttcaaaatatacattacaggaaaggaatacaaattcatgaaagtaatatgccgtcttaaatggacagagagagacaatggacagcaaatataaaagaaagaaacgtcaataattaggagacagttggtaacaggttcaacctaataatgtttaatgtaaataaaaactgagaactaatacctcaccagtattaaaccaggaaatttaattaaaatccagtattagcaaagctttaagacaagttaaggccaggtgtggtggctcacacctgtaatcccaacacttttggaggccgaggcaggaggatcacttgaggccaggagttccaagaccagcctaagcaacatagcaagacccccaactctacaaaacctgaaagaaaaaaaaatcagcaggacgtggtggcacatgcctgtagtaccatgtactcaggagggtaagacaggaggatcacctgagcctagaagtgagcctgcagtgagctgtgatcaagccactacactccagcctgggtgacagagcaagactctatctctaataataataacaataataaaaacaaagaaaagctaacattcataatacaactggcattgtaattaatgcagtattcctgaatatctatttagtaagaagaatcataaatcccattttgtctttttttgttgttgttgttaaagaaaataggctggagtatagtggcacaatcatagctcgctgcagtctcgaactcttgaactcaagcaattctcctgccttagccaccctggtagctgggattgtaggcatgggacaccacgcccagccaatttttttattttgtaaagacaggagtctgtattgcccaggctagtcttaaattcctgggctcaatcgatcctactgccatggcctcccaaagtgctgggatcacaggtgtgagccaccatgcctggccataaatcccattttattttttaatcccctccttaggaattgattttaagaaaataattgaaaaggggaagaaataatttttatacaaagatatttaaccaacagtgaataagggtccaaattctcaataactggaagactttgaaaaagacaatgatggattaatataatagaatattttataggcattaaacatgacaactatattgactgtcaagagagaaaagtctatacaatataacttaattgaaacttaaatgaaaagttaaatgttgtatatgtattgattaaaacaaaaaagttgtacattcataaatattctaaattgatgggattttatggtgaaaggtgtttcttttccactgcattgacatatttataaggttttactttttatttaaatacatacagctaaaatctaaagcatttcctttcaggtaagaaactgaaatgtgttcacttgtttctctagttgtttccaagcgttaaatactatgtatgtaagattatctgtggtttggggatagtcagttatagttgctaatgattatttcccatttaggcacaaagtcactattcaataagggtttttagtctttgagactaaattttataaacaaactacgcatattgtttattagcactattctgggaaattttttttctggtaataaatccactccagcaaatttcatttgaaaacaaaaatgtagctactaatttagtcttaatagatcaccgtcagagcccttgttttgcatttgacttcctggacacagttaaagatctatttaaacaggaaagtactgttatttcagcaattagagcaacagggttatttcattaagagaaaagcttcaggaaacatagcacatgaaatatttgagcattgctccgggtatgaacaagagccatagatgaattgccaaatattatttttgagcggctgccttgtgtaaagagttggttgttgaacagctaacttttaagtcaagttctaacattataccagtgttcactctaattttaaaattcagtttgtaagtatttttctcagaattttaaactaaaaataacattttaaaaatatcaatcctccaacttaaaaatggaaaaaaaattaatactttatttgttaccagtcctttccagataaaagttcctagtaatagaaaaaagtttttctgcatcttttcactcaaatcaactaacaagacctagaggaagcactgacggtaaatgcacccatttctacctgcagaatatgccatatctctatccctccctcttcttctctcccaggacaactgatataaaggaaaatttgtggttgttttaaatggttacaatctcaatatgttaattcataggaacaaatgctgtttcaccagctccagtcccttgtcctagctccacacacccacactctctccccgctctcagaattctcctgcctcacaagctggagctgagtgaattaagttgcccccattgactgggcattgctctctgttctgccccagttcttcctggcttttctcactccatttcattctgactctaaatgtttgcatttgcaacctccatcataattctttttctttcttctcctcccaggtaacatttacaacatttaatttaaatgtttaaaacagtagccatataaaagacattgctatttcttcatttaactaatttaacaagtacttatagagcacctatgagtagaaaacactgcaatacaaagaaggataagacacagtcccctacgtcagccttcaaaggagctgccagttgaacacatgaagaaaatagaacaaagaaacgaagtaaaagcagagaggaacaggccttaggtttttggctgttacatttcaacaaaagctaactcttaccgatatgtcaatgggaaaagtgctgagtgtaaaaataagcattcctgggggaggagccaagatggccgaataggaacagctccggtctacagctcccggcgtgagcgacgcagaagacgggtgatttctgcatttccatctgaggtaccgggttcatctcactagggagtgccagacagtgggcgcaggtcagtgggtgcgcgcaccgtgcgcgagccgaagcagggcgaggcattgcctcacttgggaagcgcaaggggtcagggagttccctttccgagtcaaagaaaggggtgacggactcacctggaaaatcgggtcactcccacccgaatattgcgcttttcggaccggcttaaaaaacggcgcaccacgagattatatccggcacctggctcggagggtcctacgcccacggagtctcgctgattgctagcacagcagtctgagatcaaactgcaaggcggcagtgaggctgggggaggggcgcccgccattgcccaggcttccttaggtaaacaaagcagccaggaagctccaactgggtggagcccaccacagctcaaggaggcctgcctgcctctgtaggctccacctctgggggcagggcacagacaaaaagacagcagtaacctctgcagacttaaatgtccttgtctgacagctttgaagagagcagtggttctcccagcacgcagctggagatctgagaacgggcagactccctcctcaagtgggtccctgacccctgacccctgagcagcctaactgggaggcacccccagcaggggcacactgacatctcacacggcagggtattccaacagacctgcatctgagggtcctgtctgttagaaggaaaactaacaaacagaaaggacatccacaccaaaaacccatctgtacatcaccatcatcaaagaccaaaagtagataaaaccacaaagatggggaaaaaacagaacagaaaaactggaaactctaaaacgcagagcgcctctcctcctccaaaggaacgcagttcctcaccagcaacagaacaaagctggatggagaatgactttgacgagctgagagaagaaggcttcagacgatcaaattactctgagctacgggaggacattcaaaccaaaggcaaagaagttgaaaactttgaaaaaaatttagaagaatgtataactagaataaccaatacagagaagtgcttaaaggagctgatggagctgaaaaccaaggctcgagaactacgtgaagaatgcagaagcctcaggagccaatgcgatcaactggaagaaagggtatcagcaatggaagatgaaatgaatgaaatgaagtgagaagggaagtttagagaaaaaagaataaaaagaaatgagcaaagcctccaagaaatatgggactatgtgaaaagaccaaatctacgtctggctggtgtacctgaaagtgatgcggagaatggaaccaagttggaaaacactctgcaggatattatccaggagaacttccccaatctagcaaggcaggccaacgttcagattcaggaaatacagagaacgccacaaagatactcctcgagaagagcaactccaagacacataattgtcagattcaccaaagttgaaatgaaggaaaaaatgttaagggcagccagagagaaaggtcaggttaccctcaaagggaagcccatcagactaacagcggatctctcggcagaaaccctacaagccagaagagagtgggggccaatattcaacattcttaaagaaaagaattttcaacccagaatttcatatccagccaaactaagcttcataagtgaaggagaaataaaatactttacagacaagcaaatgttgacagattttgtcatgaccaggcctgcccaaaaagagctcctgaaggaagcactaaacatggaaaggaacaaccggtaccagccgctgcaaaatcatgccaaaatgtaaagaccatcgagactaggaagaaactgcatcaactaacgagcaaaataaccagctaacatcataatgacaggatcaaattcacacataacaatattaactttaaatgtaaatggactaaatgctccaattaaaagacacagactggcaaattggataaagagtcaagacccatcagtgtgctgtattcaggaaacacatctcacgtgcagaaacacacataggctcaaaataaaaggatggaggaagatctaccaagcaaatggaaaacaaaaaaaggcaagggttgcaatcctagtctctgataaaacagactttaaaccaacaaagatcaaaagagacaaagaaggccattacataatggtaaagggatcaattcaacaagaagagctaactatcctaaatatatatgcacccaatacaggagcacccagattcataaagcaagtcctgagtgacctacaaagagacttagactcccacacaataataatgggagactttaacaccccactgtcaacattagacagatcaacgagacagaaagtcaacaaggatacccaggaattgaactcagctctgcaccaagcggatctaatagacatctacagaactctccaccccaaatcaacagaatatacatttttttcagcaccacaccacacctattccaaaattgaccacatagttggaagtaaagctctcctcagcaaatgtaaaagaacagaaattataacaaactatctctcagaccacagtgcaaacaaagtagaactcagaattaagaatttcactcaaagccgctcaactacatggaaactgaacaacctgctcctgaatgactactggatacataacgaaatggaggcagaaataaagatgttctttgaaaccaacgagaacaaagacacaacataccagaatctctgggatgcattcaaagcagtgtgtagagggaaatttacagcactaaatgcccacaagagaaagcaggaaagatacaaaattgacaccctaacatcacaattaaaagaactagaaaagcaagagcaaacacattcaaaagctagcagaaggcaagaaataactaaaatcagagcagaactgaaggaaatagagacacaaaaaacccttcaaaaaattaatgaatccaggagctggttttttgaaaggatcaacaaaattgatagaccgctagcaagactaataaagaaaaagagagaagaatcaaatagacacaataaaaaatgataaaggggatatcaccaccaatcccacagaaatacaaactaccatcagagaatactacaaacacctctatgcaaataaactagaaaatctagaggaaatggataaattcctcaacacatacactctcccaagactaaaccaggaagaagttgaatctctgaatagaccaataacaggagctgaaattgtggcaataatcaatagcttaccaaccaaaaagagtccaggaccagatggattcacagccgaattctaccagaggtacaaggaacaactggtaccattccttctgaaactattccaatcaatagaaaaagagggaatcctccctaactcattttatgaggctagcatcattctgataccaaagccgggcagagacacaaccaaaaaagagaattttagaccaatatccttgatgaacattgatgcaaaaatcctcaataaaatactggcaaaacgaatccagcagcacatcaaaaagcttatccaccatgatcaagtgggcttcatccctgggatgcaaggctggttcaatatacacaaatcaataaatgtaatccagcatataaacagagccaaagacaaaaaccacatgattatctcaatagatgcagaaaaggcctttgacaaaatttaacaacacttcatgctaaaaactctcaataaattaggtattgatgggacgtatttcaaaataataagagctatctatgacaaacccacagccaatatcatactaaatgggcaaaaactggaagcattccctttgaaaactggcacaagacagggatgccctctctcaccgctcctattcaacatagtgttggaagttctggccagggcaattaggcaggagaaggaaataaagggtattcaattaggaaaaaaggaagtcaaattgtccctgtttgcagacgacatgattgtatatctagaaaaccccattgtctcagcccaaaatctccttaagctgataagcaacttcagcaaagtctcaggatacaaaatcaatgtacaaaaatcacaagcattcttatacaccaacaacagacaaacagagagccaaatcatgagtgaactcccattcacaattgcttcaaagagaataaaatacctaggaatccaacttacaagggatgtgaaggacctcttcaaggagaactacaaaccactgctcaaggaaataaaagagtatacaaacaaatggaagaacattccatgctcatgggtaggaagaatcaatatcgtgaaaatggccatactgcccaaggtaatttacagattcaatgccatccccataaagctaccaatgcctttcttcacagaattggaaaaaactactttaaagttcatatggaaccaaaaaagagcccgcgtcgccaaggcaatcctaagccaaaagaacaaagctggaggcatcacactacctgacttcaaactatactacaaggctacagtaaccaaaacagcatggtactggtaccaaaacaagagatatagatcaatggaacagaacagagccctcagaaataacgccgcatatctacaactatctgatctttgacaaacctgagaaaaacaagcaatggggaaaggattccctatttaataaatggtgctgggaaaactggctagccatatgtagaaagctgaaactggatcccttccttacaccttatacaaaaatcaattcaagatggattaaagacttaaacattagacctaaaaccataaaaaccctagaagaaaacctaggcattaccattcaggacataggcatgggcaaggacttcatgtctaaaacaccaaaagcaatggcaacaaaagacaaaattgacaaatgggatctaattaaactaaagagcttctgcacagcaaaagaaactaccatcagagtgaacaagcaacctacaaaatgggagaaaattttcacaacctactcatctgacaaagggctaatatccagaatctacaatgaactcaaacaaatttacaagaaaaaaacaaacaaccccatcaaaaagtgggcgaaggacatgaacagacacttctcaaaagaagacatttatgcagccaaaaaatacatgaaaaaatgctcatcatcactggccatcagagaaatgcaaatcaaaaccacaatgagataccatctcacaccagttagaatggtgatcattaaaaagtcaggaaacaacagatgctggagaggatgtggagaaataggaacacttttacactgttggtgggactgtaaactagttcaaccgttgtggaagtcagtgtggtgactcctcagggatctagaactagaaataccatttgacccagccatcccattactgggtatatacccaaaggactataaatcatgctgctataaagacacatgcacaagtatgtttattgcggcattattcacaatagcaaagacttggaaccaacccaaatgtccaacaatcatagactggattaagaaaatgtggcacatatacaccatggaatactatgcagccataaaaaatgatgagttcatgtcctttgtagggacatggatgaaattggaaatcatcattcttagtaaactatcgcaagaacaaaaaacgaaacaccgcatattctcactcataggtgggaattgaacaatgagatcacatggacacaggaaggggaatatcacactctggggactgttgtggggtggggggaggggggagctatagcattgggagatatacctaatgctagatgacaagttagggggtgcagcgcaccagcatgtcacatgtatacatatgtaactaacctgcacaatgtgcacatgtaccctaaaacttaaagtataataaaaataaataaataaataaataaataatccttaaaaataaaaaaaaataaaaaataaaaaataagcattcttaagttcccaaaaattatttcactgatattatatcatgtgcttcagaatcctattctttaactgataggatttaatctaatcctatgtgtttggcccacataggagacaataccataaagacataagccgatcagaaagctttgtaagagtagtggtataaattgggcttgtgctttatacctacacattcgtcaagaatcagtcttttaacatttttctttgataccatcaaacaagcaaaactatatgtattttgcttttaatttaataaacctttattaatgaagatgtatttggtaatgttatttttaggaatttcttggaataggttttaattttgctccaactggagacaccattgttaaacggtctgcaaaaatcatgctacagaattattagttcttcccaaacagtggcccttcagggaaaaataattcctgttttcataatttctaaagtatatttggttctgtttgaaggtcatgatgatcatgtggcatggtcttgggggcagtgctattttacaggtgattcattagtttatgaatgagtcttgtcactggtcaagttactccatcttctagtggatttcctcaataagcctaaaggttaattgataaagtaatcaatgaaaatagagtttacattttgttctgccatctctttttaaatatcagattaatgtcgctgctaaaagaggaatgaaatttgttggattcatatcacagcattattctccatctaaattctgcaatggaaccaaccatgatggagatatagaatcgatgctacatgtgagacacggttcagatgaaaactgtagaagttggaatgaagggacgttaagtgggcagtcatctgaaagcggaattgaggaagaacttcatcatgaaagtggacagtatcaaatggaacaaaatggcagccctacttcctctaaatcaagaaagggagaaggtaatagacaagattagtagaaagagaatatactatagtttaagcaaaataagtttttgaggttttttttagaaatatgagtcaaagtaaattgctaaagattataatgactaaatgaactaataaaaacctcatgatttttaaaagttattacagctagcaataaggcagggcagttttttagacagttgtctctggcagaacataaaatgccatccacataatgaaactttgtgttgaagattggtttctatttagtcatccaaaactccctcataaattggaggctgtacatgtgtaccaaataagtgagtctattaggtctaaaaagctgttctgatttatgtttgtactaataaacagcatgtgagaattttcattttggcctttcccatttcatggatggttttaacctttgaaattaattggctttctttgatcatcaactagaatgtgaaactggcacatcataatgaaacaattaatataacaatagtgcctgcatcctaaaataactttgaacaacagttgtattcttctgtgccagctagcaagtcttccaaagaaactgagagtattttattcatgcatttgggaccattcaaagttttctgatacctttgtgggcatgctttaaaaaagcactatcagagaaaagcaaaggctacatataccttagcattaacaacatgggctctggaatcagatacctcaatttctttataaaaaggggtaatagtaagaactccctcattgggttgttgtgagaagtaaataagaaatgtctacaaagtgtttgacccagtgcctggtacagaataaactctatattaactgctattaactgatccttccatcagtgttggcactggaggagcacgccttggtgtcaggctttctgggttatgttttgatgtgcttagcatcctatacatggcagagattcatttagccacataagctccacctcctgaagaaataactgggagcatttaccaacttagatcgcacccatctccaccatcatcaccaccaccctcctcttttctcacccattccctagctaacaatgtccctgatttttctgcaatgtaaaaagtataggaatgtgtattagtctgttctcatgctgcaaataaagaaataccctagactgggtaatttataaaggaaagagatttaattgactcacagtccagcatggctggagaggccttaggaaactgacaatcatggcagaagggaaagcaaacatgtccttcttcacatggtggcaggagagagaagaatgaaagcccagcaaagggggaggccccttataaaaccatcagatcctgtgagaactaactcactgttattagaacaggatgggggaaaccgctcccatgattcaactatcactatctgatccctcccacaacatgtggggattatgggaactacaattcaagatgagatctgggtggggacacagccaaaccgtatcagaatgtaaaagtgaacaagaggtatcagaattatggtcagagagctattcactatcttccacccattcctacctttaaactccatgtgagttcccacccttactttgagcaaatcagatgtctatttctattcctttaagttctaaatccaatatagtacttaatgtaactatcaatctttagattcctctctctcagtatttttaaagtatgtacttctcaataacttttctgtagcagtggtttttaattagaagagggagaatgggggtagcaataattcacaaaagacctctttgagtatctggtgaaatccatggaatccagatacttttgtctgtcataccggtgatgttaagcttcctaaaacacaaacataggtgtggatccactgaccctacgttaagaatttgccaattcctagtaaagcagaagatatgatccagcatttccatgtctgttctagggtcactctcacacatgtccaaagagatacaaagttggtaataacagaaaaattggaaatattgcatatgtccaccaaaaggagactagaacattggcatactatgtagcagttaaaataaacgaataagatctatatggttatttacatttcaaaggcatgttgaacaaaaggtcaattcatatctacagtaggataccatttttaaaaaaattttcaaactgtaaaatgttacacatcatttatggttatataagtgtgtattaaaagattaaaagcttgcatgagaatgataaacaccaacttcattatagtacttatttctggagaatagaattagaggataccacatagtagcctcaaccgtatccatttctcatttctttgaaaaaatagtctgaaacaaatatagcatattattgacatttgattaagctgagtgcttgtttgtatgcttggaatatctcatgattagtgaaaaaattaagaatctttgatcaacaaaattataattttccccttttttctccttctgaatgcctagcctcagataacaaattgtatacagtcttcaatgcttttgatgatgattcaacctcctgggcctatcaggaaggcatcctgtcaatgaaagtaacaagaaaaggatcagtcattagtacacttgatgctgattggctggagttaactaccttttattataaacaaggcttgtctttaattgattcttttgtattctgggaaacatctaaaggtaagttttatgttaatgatattttatatctgaggaatttgaacttgtatcaaaatcagtgaaaatgtttttacctctcaagttctatggctgaaaggacagataccattcctaaggaaataaattccagctgttacacagatatgtagctttaatttaaaagcttaaagctccttcagcacaatggacacttaaggagtgtgggcagaaatataacgtaaaatgttcactgttgggttgtaattgggaaaccactgtgtgattgactaggagaattttccaaataagatgtactataatagtccaaacgggaggtttatgatggcatttcgtgtttactattcatatttattacattatcccaattttgaacactatctaccatgtatatagtcagtctatacctgattctttctataatttgtacagaaaaatcatctttggtttagaaagtgacgttggctctgttcttacttctgtcttcaccttgtctttcatccctctctagccttcctcatttagttacagtggagtatgtaattatttgtgtctatcacaaaaataaagacaaactataaaatattatcaaaaatgactttctaggaagtttttttaagagatgagggttaaaaaaagaaaaaggaaaggtagtaatgagactagaaaaatgcattaggaaaggtgaagtttaggaaatccaggataattaggaactcttaaatctatgaggttagaggaaagaatgaaaagcaaataagatctccctataccttactattgttaaatcagcctagtatttattaccttaactgatccaactacagactttggatgatattttaaattatcaggagtcatgttccaataggcccttttaactagcagtattaaggaccaaacgaattggagcacccagaaatacaataccttgcgtaatgcttagcacatagcaggtgctaaataaacatttcttagtatttttcagtaggccaggcactgtggctcacacctgtaatcccagcactttgggaggccaaggcaggcagatcacttgagtccaggagttcgagactagcctgggcaatatggcgaaacctcatctctacaaaaaatgcaaacgttagtcaggcatggtggcagccacctgtattcccagctacccaggaggctgatgtgggaggatcacctgagcccagggaggtcaaggctgcagtgagccatgattgcaccacaacattctagcctgggtgacagagtaagacactgtctcaaaaaaaaataaaataaaataaaataaaataaaataaaataaatatgtgtgtgtgtgtgtgtgtgtgtgtataaaaattaaaaatatttcttcatattttttggttattggaagcctcttccacttggtcttttatttattttttattattattatactttaagttctagggtacatgtgcacaatgtgcaggtttgttacataggtatacatgtgccatgttggtgtgccgcacccatcaaatcgtcatttacattaggtatttctcctaatactatccctcccccatccccctgccccatgacaggccccagtatgtgatgtttcccaccctgtgtccaagtgttctcattgttcagttcccacctatgagtgagaacatgtggtgtttggttttctgtccttgcgatagtttgctcagaatgatggtttccagcttcatccatgtccctacaaaggacatgaaatcatccttttttatggctgcatagtattccatggtgtatatgtgccacattttcttaatccagtctatcattgatggacatttgggttggttccaagtctttgctattatgaatagtgccacaataaacatacgtgtacgtgtgtctttatagcagcatgatttataatcctttgggtatatacgcagtaatgggatggctgggtcaaatgatatttctagttctagatcctcgaggaattgccacactgtcttccacaatggttgaactagtttacggtcccatccacttggtcttttatagcaatagcaaagtttcataggaaggacatgggctttagaatcagacagaccaaggtttaaatcctatgtcttctacttattagctgtgtcatcttcggaagttagttgagctcactgagtctcagtttcttaaagaggaataaaaatactcctactttttctgttgtgatgatgtaacaagatataataaatgtaaagtgactcccagaatgcctagcctacagtcagagttcattttctggtgttagttttctttcctgccacttgttatgtgcaattacagtacttttagtgtggatcatctatttagaggttggtttatgcttcataatatctctctctctctctctttctctttctctcttgtttctcttctctccaaaaagtttagttgaagccatttcaaattttggtgtgtgactaactgctgaacagaaaaacaaaacatacacttttcacaatctctctcaggcatccctgccttgggtcttgcctgatgaaaataaaattagccacagcagttgccagccaggctctgtgtggcttttgttcttaaagcctcagaagctatttagagagccccagggagactccctctctcagcagctcatggggtggagggggtcacggagacgggggtgcagaatcttcccctctcagcagctctggaatgtctcattagacatttgacattgcaggctatggcaagcccctcacaagccacgtcagtctatggggtctggcaactgagcatgtcatttgggactttcctgggagtacacagggaagttgccaaggggaaattgtgaccaatatctgtgtcactgtgagaagcattcagaggaagcagggctgaattggtcgctttgttttggtatgtttgatgcctgacatctaaagcacatggggagggtggtgggggcagacaatgcatattttgtttggtcttgcttctgtcctcttccaaaatattgtcagaagttagcccaccatgaggaatggaagaacaaaaccagacagcgctcagaaatttaaatatattaccccacaaatcacgctgaataaaatacctccttccagaaacacgggggggcgggggggcgggggacagatgttcaaaaagttttctacttcagcagagtgtaaaagttgtaagatctgtgaaattccttctcagtgtccctccacactcactctaacagccttttctgctgtgaagcacaccctgggacacacacacaattagcctcgaggttcctacacttccccagcctccaaatgccccaccaccgccagagcatagtctttccccaccttaggataccacatcttaaggctacattttgattttttaagaattcttttcagacttcacttgttattcatttcaatctttccactcctataaaaatgtttgtgtggcactagtagaggagaggtagcacaatgaagagtgaggatggagttataacattgaaactcatttcatatatgccaggacccatgccaagcactgggtttataatactcttccctacttacaaggcgctagccgtatggcatcgggcagtcaggcagtgaaagtgtcaaaacatatatatctaatttcaaaactaagaaaattgtgtaacatgaccatagaggatattatggcgagagtaccagggaagaactcacttaaagaggtggtcgggaggtcccctctgagaaggcagcaatcacactgagactgggcagctggagaggagcagacctgtgagaaccagaggtaggccattctaggccggagaaacacatctaaatgtacaaagaccttagggcaggaaagaggaactgggaaaaggtctgtgtttctggagcaaggcaagcaacagtatggctctggacacaatggaagaggtaggcagcagccagtccctacagggtcctaaacaggaagaatgcaatgacagcagctaacatctattttgtacttgctatacaccagcgttgtgctaagcattttgcattcattaactcatttagtccccacagcaacctgtgaggtaaagatgattatggctgggcatggtggctcacgcctgtaatcccagcactttgggaggctggggtgggcggattacgaggtcaggagtttgagaccagcctggccaacgtagtgaaaccccgtctctactaaaaatacaaaaaatgtgctggatgtggtggcgggcgcctatagtcccagctactcaggaggctgaggcaagaaaatcgcttgccaggaggcagaggttgcagtgagccgagatcacaccactgcactctagcccaggcgacagtgcaagactccgtctcaaaaaaaaaaaaaaaaaaaaaagaagattattccttttttttattttaactttatttatttatttatttatttatttgtagatggggtctcactgtcacccaggctggagtgcaagggcacaatcatagttcactgtagccttgaactcctgggccgaggcaatcctcccacctcagcctcccgagtaaccaggactatatgcacgccaccacacccagctaattttttaaatttttttgtagacatggtctcgctttgctgcccaggttggtctcaaactcctggcttcaagtgatcctccagctttggcctcccaaagtgctgggattccaggtgtgagccatcgtgccaggccatgcttattctccttttacatatgaaggaactgaagcacagagattttacataaggtgcctgcattcacacaactagaaagtggtagagccacctagatggagtgtgtgcttttaccaagatatttattccaattcattcattaaagatttaaacagggagtcataatctcatttgcaatttttaaagaatttctagcaaggtgcggtggctcacgcttgtaatcccagcactttgggaggccaaggcaggtggatcacttgaggtcaggagttcaagactagcctggccaacacggcaaaacgctgtctctattagaaatgcaaaaattagccgggcatggtgggtgcctgtagttccagctactcaggaagctgagacaggaaaatctcttgaacctgggaggtggaggttgcagtgagccgagatcacaccactgcactgcactgggcagtgcagcctgggcaacagagtgagactccatctcaaaaaaagaagaaaggaaaggaaaagagaggagagaaaagagaagggaggggagaggaggggaggggaagggaggggaggagaggagaggagaggagaggagaggagaggagaggagaggagaggagaggagagaggaatttctttgccctcattatgagaaatggatcacagagggcaagagtggaagtgtggtggggaggctgttaagaggctgttgcagtgctccctagagagatgatggtggagatggaaagaagtggataggctaagattctttttagagttaccatatgtgcctgccctctacttcaaagatgctcccgggcccacctctgggcagttgaataccaaaaatgacaggggaaccaaaaaaactaaaatggagtgttacctctctgcacctttacaggaatgtcaatatcatatccagctaaaagacaagacatgtccagaaaagtaaaccattccctgggagcccttcaaacatgtgcttttcaaaccagggttcaagtaccctcaggatattcagccttgtgccaaggagtacacaagttcacaagtttgcagaatataactcttcctggagtgtcaatattactttaagattgagtggcttttatgtaagatgaatatatttgaaaagaatgggccagcacagtggttcatgcctgtagtcccagtactttgggaggccaaggtgggagaatccctgggggcctggagtttgagaccagcctgatggtagagggtcttgcctctgtgttgatggtggctgactgatcagggtggtggttgctgaaggttgggggtggctgtagcaatttctaatttaatttttttctctttggggatagagtctcgccctgtcacccaggctggagcacagtgatgtgatctcagctcactgcaacctccgcctcccaggttcaagcaatcttcccacgttggcctcttgggtagctgggaccaaggtgtgcaccaccacactggctatttttttagagacaggatctcactatgttgcccaggctggtcttgaactcctgaactcaagtgatccacctgcctcagcctcccaaagtgctgggattacagcatgagctactgcgcctggccagctgtggcaatttcttaaaataatacaatgaaatttgctgcatcaattggctctttcttttttttttttttttttttttttgagacagagtctcgctctgtcgcccaggctggagtgctgtggtgagatcttggctcactgcaagctccgcctcccgggttcacgccattctcctgcctcagtctcccgagtagctgggactacaggctcacgccaccacgcccggctaattttttgtatttttagtagagatgggtttcaccgtgttagccaggatggtctccatctcccgaccttgtgatccgcccacctcagcctcccaaagtgctgggattacaggcatgagtcaccgcgccacgccagctctttctttcacaaaatttctctctagcatatgatgctgtttgacggcattttaaccacagtagaacttctttcaaaatgggagtcaatcctctcaaaccctccaattgctttatcgcctaaatttatttaatattctaaatccttcattgtcatttcaacaatgttcacagcatcttcaccaggagtagattccattttaagaaaccattttctagactgggcactgtagctcacacctgtaatcccagcactttgggaggccgaggcgggaggatcacttgaggtcaggagttcgagaccaccctagccaacatggtgaaaccctatctctactgaaaacacaaaaatttgccagccgtggtggctcagacctgtaatcccagcactttgggagaccgaggcaggtggatcacttgaggtcagtagttcgagaccagcctgaccaacatggtgaaaccctgtctctactaaaaatacaaaattagccagacgtagtgacacgcctgtaattccagctactcaggaggctgaggcaggaaaattacttgaacccgggaggcagaggttgcagtgagccaagatcatgccattgcactccagcctgggcaaccaaagcaaaactctgtctcaaaaataaataaataaataataaattaaaatgcaaaaattagcctggcatggtggtgcacgcctgcggtcccagctactcaagaggctgaagcacaagaatcagttgaacctgggaagtggaggttgcagtgagctgagatcgtgccactgcactccagcctgggaaacagagtgagactccatctcaaaaaaacaacaacaacaaaaaagaaagaaaccactttctttgctcatccataagaagcaactcatccattcaggttttactacgagattgcagcaatttagtctccatttttaggctccacttctaattctggctttctcattattttcactacatctgcaattactttctccactgaagtcttgagcccctcaaagtcatccatgaaaattggagtcaacctctttcaaactcctgttcatgttgatattttggcctcctcccatgaatcataaatgttcttaatggcatctagaatagtgaatcctttccagaaggttttaatttattttgcccagatccatcagaggaatcactatctatggcagctatagccttacaaaatgtatttcttaaatatatgacttgaaagtcaaaatggctccttgatccatgggctgcagaatggatgttgtgttagcaggcatgaaaacattaatcttcttgtatatcttcatcagagctgttaggtgaccaagtacattgtcaataagcataatattttgaaaggcatctttttttctgagcagtaggtctgaatagtgggcttaaaatattcagtaacccttgctataaacagatgtgctgtcatccagcctttgttttccatgtctagatcacaggcagagtagatttagcataattcttaagggccctaggatttttggaatagtaaatgagcattggcttcaacttaaagtcaccagctgcattagtccctaacaagagagtcagcgtgtcctacgaagctttgaagccaggcattgacttctcctctctagcaatgaaagtcctggatgacgtcttccactgtaaggttgttttactgacgctgaaaatctatagttttaggccaggcgcagtggctcacgcctgtaatcccaacacttcgggaggctgaggaggttggatcatttgaggtcaggagttcgagatcagcctggctaaaatggtgaaaccccgcctctactaaaaatacaaaaattagctgggtttggtggtgtgtgcctataatctgagctacttggaaggctgaggcaggagaattgcttgagcctggggaggtagaggttgcagtgagccaagatcatgccaccgcaccccagcctgagtgaaagagtgagaccttgtctcaaaataaataaataaataataaataaaaatctgtagttttgtgcagccacctttatctattctcttagctggatcttctagataacttgctgcagcttctacattagcacttgctccttcaccttgcaattttatgttatggagacagcttctttccttaaacttcatgaaccaacctctgttggcttccaacttttcttccacagcttcctcacctctctcagccttcatagaatggaagagagttaggatcttgctctggattaggctttggcttaagggactgcttgtggctgctttgatcttctatccagaccactaaaactgtctccatcatcgagaagtctgttttgctttcttatcattcattcacttttattttccttcaagaacttttcccttacattcacaatttggctaactgacacaagaggcctagtttaccgcctgtctcagctttgacatgtcttcctcactaagcttaataataattcccagctttcgatttaaaatgagaaacttgtgactcttcttttcacttgaacacctagaggctatttcggggttattaattggcctaatttcagggaatgggggcctcgagaagagggagagagatgggggaagggccagtcagtggagcagtcagaacccccacaacgtttatcagttaaattcaccattttatatgggcatggttcccggtggcccaaaacaattacaatagtaacatcaaagatcattgatcacagaccaccataacagatagaataataatgaaaaaggttgaaatattgcaagaattactaaaatgtgacaccaacacatgaagtgagtacacacctttggaaaaatggcactaatagacttgttcaatgcaggattgccacaaaccttcaatttgaaaaaaaaaaaaaaaaaccggtatctgcaaaacacagtaaagcaaagcacaataaagcaaggtgggactgtgctagtgcctcccaatattgagagcaagaaaacacacctggagccacaaagcccagagttttcacattatataatcccaaagtaagaaagaaggagattataattaactatgtaattatcacaggatacaactaattttaaaacacatacctctaaaagggaacttggggcatgcacaattgtagatgatctagtgatgccctaaactttcaatcagaaacaaatttgattccactggtcacttcagtgtgacagtaaataagtacacttaaaggaaatgaaatagacactgtaattagaaaaccagcttgaactaggaaactaaacttcactgggttttttgtttgtttttcatttttctgttttgttttgttttgtttttgagatggagtcttgctctgtcacccaggctgaagtacaatggcacgatctcggctcaccgcaatctccccctcccgggttcaagcgattctcctgcctctgcctcccgagtagccaggattacaggcatgcgccaccatgcccagctaattttgtatttttagtagatatgggttttttccatgttggtcaggctggtctcaaactccctaccgcaggtgatctgcctgcctcggcctcccaaactgttgggattacaggcgtgagccactgcgcccagcctactgggttcttgggaaccactctgaacaatgcaaattcttcatggtgttctgccctaaccatgaattatgtcaaaaaaataataataatgatttatctcttaaaatttatagcctgataatgaaaattaaaacagaaaattacattaaaattacttttgtcttttttatctttaagcttaaaagatcctttgaaaagtttgcaggcctttagaatttagagagctgtcaaccagggaaactttaatgtgacattgtgctacacaaaaaccgaaatgtttaagcagcacatgaccatgggaaaaatgtctcctatagcaaaataggagacaaaagaacttccataaaatcagtttgtgtaggccagctggttattgtcaactattcaagaaaaagtcagagaggccctcccttaaaacttccttcccagcaggaattcttttgacaatgacttctgtttagggtcttcctgtccctgtttttcttatttttttttttaacccatcattgaggtaaagaattgttctgtgtttaggtcttttgaagtaatcttacctagcattaattttaatattatgtctttaatttcaaatattaacagttttatgctgtttctcttaatggttataattaacatgcatacaacgtatagatccgaaaccaaattttgatttcaaaatgaagatcacatccagatgccttttagattgattttccactcgcttctcactgtgccacactattttaccttgtttttgctattgtagtttttatatgtatagttggattttaattcagtgaagtaaaaaaaaaaaaaaaagtgttgctctttggggagaaagaaaaactttccaagaggaggaggagattattgattcagccaaaacaaatgtttttttttaattttattttattttattattgttattattattttttttttttaattgatcattcttgggtgtttctcgcagagggggatttggcagggtcacaggacaatagtggagggaaggtcagcagataaacaagtgaacaaaggtctctggttttcctaggcagaggaccctgcggccttccgcagtgtttgtgtccctgggtacttgagattagggagtggtgatgactcttaaggagcatgctgccttcaagcatctgtttaacaaagcacatcttgcaccgcccttaatccattcaaccctgagtggatacagcacatgtttcagagagcacagggttgggggtaaggtcaccaatcaacaggatcccaaggcagaagaatttctcttagtacagaacaaaatgaaaagtctcccatgtctacctctttctacacagacacggcaaccatccgatttctcaatcttttccccacctttcccccctttctattctacaaaaccgccattgtcatcatggcccgttctcaatgagctgttgggtacacctcccagacggggtggtggccgggcagaggggctcctcacttcccagtaggcgcagccgggcagaggcgcccctcacctcccggatggggggctgaccccccccacctccctcccggacggggcggctggccgggcagaggggctcctcacttcccagtaggggcggccgggcagaggcacccctcacctcccggacagggcggctggccgggcagggggctgacccccccacctccctccctcccggatggggcggctggccgggcggggggctgacccccccacctccctcccggacgaggtggctgccgggcagagacgctcctcacttcccagacggggtggctgctgggcggaggggctcctcacttctcagacggggcggctgccgggcggaggggctcctcacttctcagacggggcggttgccaggcagaaggtctcctcacttctcagacggggcgtccgggcagagacgctcctcacatcccggacggggcggcagggcagaggtgctccccacatctcagacgatgggcggccgggcagagacgctcctcacttcccagatgtgatggcggccgggaagaggcgctcctcacttcctagatgggatggtggccgggcagagacactcctcactttccagactgggcagccaggcagaggggctcctcacatcccagacgatgggcggccaggcggagacgctcctcacttcccagacggggtggcggccgggcagaggctgcaatctcggcactttgggaggccaaggcaggctgctgggaggtggaggttgtagcgagccgagatcatgccactgcactccagcctgggcaccattgagcactgagtgaacgagactccgtctgcaatcccggcacctcgggaggccgaggctggcggatcactcgcggttaggagctggagaccagcccggccaacacagcgaatccccgtctccaccaaaaaaatacgaaaaccagtcaggcgtggcggcgcgcgcctgcaatcgcaggcactcggcaagctgaggcaggagaatcaggcagggaggttgcagtgagccgagatggcagcagtaccgtccagcttcggctgggcatcagagggagaccgtggaaagagagggagagggagaccgtggggagagggagagggagagggagagggggagggggagggggcaacaaatgttttttaattgaaatgtttttccttcagtttcctatatgagttatttaaggatttagatggttttatgagccacttagtatttacaacccttcttaattgtaccctcttcctcacaggggaacatttgcctaaatctttggaaggattttttatctatgaagaagaaggttctggagttccaggttctagtaggaaaggaaatgatgccatcgtagtagaacaatggactgttattgaggtgagctgcagttttctgacaatttagctttacatatataaatataatatataatatatatatatgtttggtttgggtttttcatttgtttgtttgtttgtttttgtttttgtttttttgagtcagggccttactctgttacccaggctggagtgcagtggcaccatcacagctcactgcagcctcaacttcccctggctcaggtgattctccaacctcagcctcccaggtagctgggactacaggcctgcaccaccatactcatctaatttttttgtattttttgtagagacagggtctcgccatgttgcccaggctatatatattttattttacatgttaaagatcttcagtgcctggcacatgcagtatccttaaacacatatttgtttagtgtttagaatctcattacaaatgcatgaacaaacttctttcggatttgtgaaaaggtaatttgctttatccagtgttaaatgtttttgcaagatagagaaataattaactatgcataagcagcagtaagttcccaaaaattttaagccaaaaaacatcgcctggcactgagcttctctttacagcattctgtgacaactgattgaaagaaaaaaatttggtcactcaactagtgttttatctccaatcaaccaatgtgactgaggttttttttaaccttatgaatgactttcaaaggcaaaaatatccaaaagatgttctctctctcgccaggccaaatatgtacacacagcattgtccttcacaaacagagatgacattgctgctgatgttgtgcaccctgaattcagatgtcactgaatggactgtctttgaggtgtacacactgaattcaggtatattctgttttgtgtttgaggccctccctgacaggctgtttcagggatacttttacctttctgaccttacacaggttaaagagacatagcccattttcaaagaaactagaaaacccattgagtggggaaaaaggatttgaggaaagaggtagagctcttagcaaaactcaattccaaattaagaaaaaagcagtgaaaagactccccacacccaagcgcctctcatcttcaataccactattgtcactctccactcttgtcctcacttcctggtccctagacccatgtttctgaaatgtgttctagaaacttcttggatccaaatccgctaaggaactcgtgttaaaatgcagcctctgcctgacacagtggctcacgtctgtaaccccagcactttaggaaggtgaaatgggaggataacttgagcccgggagttcaagaccagcctgggcaacatagtgagaccccatctctacaaaaaattttaaaattaaccaggcatagtgtcatgcacctgtagtcccagttactcaggcggcagaggcaggagaatagtttgagcccaggagattgaggttaaagtgagttatgactgtgccactgcaccctagcctggatgtaggaatgagaccctctctttaaaataaaataaaataaaataaaataaaataaaataaaataaaatgcagattcccagctccccaaccccatgtattaaatttcgagaaccactgccctaacaagaccaaaggaaggcccaaacttcagacaacgggatggaaacctctctccattactagtgtttctaacttggttcaattatcagaaggaagcagagcagaacatgaagcccaggaaggctgcagcggatgaaagtgaactcccctcatcctaacacgcatcaccctttgttgtaattgtgtagttggttgtctttgccattagactatgagctcttatacttattcatgcagggatgtgaaatcaaaacagattatggccctctgctgcacactctggctgaattcggatggcttctgacaagcgtgttgcccacacctgtattgagacatgacaggtaaggcaaaagtatccttacatactatcatttaattctaatatataacttcatctgttagatagttcaattcaacaaatatttgtttaatgcctacagaaaacattacactgagcttcgaatttgattttatggaccttagaggttagtaaatatagtccttggcattatagatgtataagctgttaggctctgcagcacatatccaaaactgttctcaccccagcccacagccaggtttaggacacagtagggttccagagtgagcaggatggaggagcgcttctgccacctcccctccagtgtggtgagttagttccccttggcacatggacttggtagctgtttccattaaaataaatgcctacattagaaccaaatgccaatattttgtaagtactaactttccttttccttttctccttttactaactttcctggaaaggaaaaattgaatcttacttttttgagagagggaaacagagaccaagtaagtcattatgtaaaatgctttgctattcctgggacccagagatgtgtcctctgcccgctttggcatccaggaaatgactgactgctaaggctgtcctgcctgggcaggtgactacctgcagaggacagcacagtaccaactaggccttcccttttagcagagtcaattatggttcaacattctgagtgatttgcaggtgtgactaaggaaagcaacttccccttccttagtctaacccacttcactcaccttttctggccttcccggtttagcaacttagccctgtccagtatcccagtaccccacaacatttaaaaacctttgattggcatggctttatctgaaaagccacaccttcttcgggtagggaaaggaattaaggtggatataaagtaaagaaactcaagtttaaagaacaaaaaaggaatgtttgaagtaagcaaagcaattaatctacttttcttcccagagctctatagtaactgttctcaaattgagtgatgactccttgaagcatgatttcccagccttttgtactctgtgacatatctgtcaaataacagaatagtaataattctcaagattcagtcttcacaaaacaggagaattccatgacacccccgccctcaaccttgcaggatgtgtgacaggggtgtggcttgtttgttcaccctctgcatgctcaaaccacttacaggaggggaagcacacagatgggcaggtgcaggagctggggtgagtgctgtggggctccggccccatggtagcgtctaggggtgggtgcctgtgactcccaaagcccaagtaggcatgtgttacagtgatcttttagttttgccatctgcagagggcttaagtgttaaccagctcagtgtcctctcagtacctaggtccttgtccagcgtccaggaagaaccaagttgcacagggaattgaggacagtgattgtgcaggttttattgagggtagaggtgggatgcagtgggaagatgatcatcttccggagtttgaccgtccagcagccgatctcctctccaaccatctccagccaaactcttctcagcattcagatgctccttctcttatctctgccacgccattctgaattttaaattttaaaaatcaaatttaaaaggcaaaaagtcaatcaataaataaaaatatgtggaagctgtacatggtttctggccctgaaggatcttgtgagctggttaagcttacgtttcatatgtacaaaacaagggacttacattctggtcagggcagatcaagcttatgtattgtgtaatataatacagtaactaatcaagggctagatgaggtgtcttagtctataggttctgtaggaatattaaaaagaagagacattttaaactgtcaaagttggatgggatcatcaaatactaaagagattagagggcagcatcatcactatttagcagatttccatttaggaagatgctactaactctgtatagaagatagcagaaaaatgtaattttaacattaattgccattatgcaacaaggctcactacaactctcaatgtctactcttcttttgtatgccaaggagcattgtgcaatattggtgtttattttgttcctttgcattttgtaatttgagtcctgccaagtgcctgcaacacaggaaatataggatgaaggtcatttggtaacaaggattgttggtaaatcttgtttattctctgcctttttattcttgtgcaaatatactgtccctgtgacaagtcacatgctgttcttagctgcttcagtacacacaacgatagtaatcatggtcaatgatgtcatctttacaaataaagaaaagtgttatatacagttgaccttggtcaaaatagaggatagagcccgaagtttttagtctctgacactagaggaatggttatgagctgcccaggctttggagctaagcagatcttgttttaattatagcttcatcattgtttagctgtatgatttgggcaagtcatctaacctttttaagataaatttccttatctgaaaaattggacaataatatcaactttagtggattatcactatgactaagataatacacgcaaagtacctatacagggcctgggcatattaagctaatgaattagggctaatgttttgggacgcaatccttagcagaaccaaaatttctgataagttgaaaccaatgttcagggatggtagcttggcctgtcctaaatcaggatgtttcagaaaatgtaaatactctagttcactatatacaaaatcagcactgaagatgacaagataataaaagcaacagaaatacataatgacattattaagatatcttcttacacatattctcacacccagaaaaaagaatgtctatcatcatcttctttttgcggcccacatgtcgaaaacataacttaaaattactgtcagtgaaaacattcttccttacatgtgtttgtcttatatgcaacaacagagtcttaagtaatttcaacattctccctactcttctgtcacctaagccatacttgaatggcctatatataagctgtttttccctcactcaaatatatcctgttattggattacatacatacagtacgtccctaggttaaagttgttgcttcaattaccctaggcaatatcacaccactagggtttaaagctgcattaccatggaaacgtcatgatgctgtaatcttatatcaccacattattccagagttattgttgttggtcctgaaaacatgccagaatcccttcttaattgttatcactattaataataccaatgggctcaatcctttttccttcaagagttcaaggtgaaagttgacagtaactcttcagagcaaatttggtggaggaccaaaccagctgagttagcagctaatattgttaaaccaccaaaataaaggagaaggaggagctaaagttccctctgtttggctacctcaaaacagcagcatggctcccctctccaattctggagtgtgggcaggaatgtgcattgtaacaggaatcccaaagcaatttttatgcactttcagaaacactgaattctaaccttacactgagagagagaaagtgagggtaagggagggggtgagagagagagaactttagaacacaggatagaagaaagacatgcactcatttatatccagaaggcagaatttaaaggcaggggacttttggtccagctgaatcaagttgtactataccaagaacattaaaaaacctcatcctcaagtgaacctaatagacacctacagaactctccaccccaaatctacagaatatacattcttctcagcacatcacacttattctaaaattgaacacatgtttggaagtaaagcactcctcagcaaatgtaaaagaacagaaatcacaacaaactgtctctcagaccacagtgcaatcaaattagaactcaggattaagaaactcactcaaaactgcacaactacatggaaactgaacaccctgctccttattgactgttgggtgaataacaaaacgaaggcagaaataaagatgttctttgaaaccaatgagaacaaagacacaacataccggaatatatgggacacatttaaagcaatgtgtagagggaaatttatagcactaaatgcccacaagagaaagcaggaatgatctaaaattggcactctaacatcacaattaaaagaactaaagaagcaagagcaaacacattcaaaagctagcagaagacaggaaataactaagatcagagcagaaatgaaggagatagagacacaaaaaacccttcaaaaagtcaatgaatccaggagctggttttttgaaaagaccaacaaaatacatagaccactagccagactaataaagaagaaaagagagaagaatcaaatagacgcaataaaaatgataaaggggatatcactaccgatcccacagaaatacaaactactatcagagaatactataaacgcctctatgcaaataaactagaaaatctagaagaaagggatgacttcctggacacatacaccctcccaagactaaaccaggaagaagttgaatctctgactagaccactaacaggttctgaaattgaggcaataattaatagcgtaccaaccaaaaaaagtccaggaccagacggattcacagccaaattctaccagaggtacaaagaggagctggtaccattccttctgaaattatctcaatcaacagaaaaagagggactcccccctaactcatttttgaggccagcatcatcctgataccaaaacctggcagagacacaacaaaaaaagaatattttaggccaatatccctgatgaacaatgatatgaagctcatcaataaaatactggcaaaccgaatccagcagcacatcaaaaagcttatccaccacaatcaagtcggcttcatccctgggatgcaaggctggttcaacatacacaaatcaataaatgtaatccatcacataaacagaaccaatgacaaaaaacacatgattatctcaatagatgtagaaaaggcctttgacaaaattcaacagcacttcatgctaaaaactctcaataaactaggtattgatagaacatatctcaaaataataagagctatttgtgacaaacccacagccaatatcatactgaatgggcaaaaactggaagcattccctttgaaaactagcacaagacaaggatgccctctctcaccactcctattcaacatagtgttggaagttctggccagggcaatcaggcaagagaaagaaataaagggtattcaattaggaaatgaggaggtcaaattgtctctgtgtgcagaagacatgattgtatatttagaaaaccccattgtctcagcccaaaatctccttaagctgataagcaacttcagaaaagtctcaggatacaaaatcaatgtgcaaaaataacaagcattcctatacaccaataacagacagagagccaaatcatgagtgaactcccattcacaattgctacaaagagaataaaatacctaggaatccaacttacaagggatgtgaaggacctcttcaaggagatctacaaatcactgctcaaggaaataaaagaggacacaaacaaatggaagaacattccatgctcatggataggaagaatcaatatagtgaaaatggccatactgcccaaggtaatttacagattcgatgccatccccatcaagctatcaatgactttcttcacagaattggaaaaaactactttaaagttcatatggaaccaaaaaagagcccacattgccaagaaaatcctaagccaaaagaacaaagctgaggcatcacgctacctgacttcaaactatactacaaggctacagtaaccaaaacagcatggtactggtaccaaaacagatatatagaccaatggaacagaacagaggccttagaaataacaccacacatctacaaccatctgatctttaacaacctgacaaaaacaagcagtggggaaaggattccctatttaataaatggtgctgggaaaactggctagccatatgcagaaagctgaaactggatcccttccctacatcttatacaaaaattaactcaagatggattaaagacttacatgtaacacctaaaaccataaaaaccctagaagaaaacctgggcaataccactcaggacataggcatgggcaaagacttcatgactaaaacaccaaaagccaaaatagacaaacgggatctaattaaactaaagtgcttctgcacagcaaaagaaactatcagcagagtgaacaggcaacttacagattgggagaaaatttttgcaatctatccatctgacaaagggctaatatccagaatctgcaaagaacttaaacaaatttataagaaaaaacaaacaaccccatcaaaaaatgggtgaaggatatgaacagacacttctcaaaagaagacatttatgtagccaacaaacttatgaaaaaatgctcatcatcactggtcattatagaaatgcaaatcaaaagcataatgagataccatctcatgccagttagaatggtgatcattaaaaattcaagaaacaacagatgctggagaagatgtggagaaatagggacacttttacactgttggtgggagtgtaaattagttcaaccatgtggaagacagtgtggcgattcctcaaggatctagaattagaaataccatttgacgcagtgatcccattactggttatatgcccaaaggattctaaatcatactactataaagacacacgcacacatatgtttattgtggcactcttcacaatagcaaaatcttggtaccaacccaaatgcccattaatgataaactggataaagaagttgtgacacataaacaccatgcaatgctatgcagccataaaaaaaggatgagttcatgtcctttgcagggacacagatgaaactggaaaccatcattctcagtaaagtaacacaagaagagaaaaccaaacatcgcatgttctcactaataagtgggagttgaacaatgagaacacttggacacagggaggggaacatcacacactggggcctgttgtggggtggggagctgggggagggatagcattaggagaaatacctaatgtaaatgatgatttgacgggtgcagcaaaccaacatggcacacttatacctgtgtaacaaacctgcacgttgtgcacatgtaccccagaacttaaagtattaaaaaaaaaaaaaaaaaaaaaaaagtctggtcccagccaggaacagtggctcatgcctgtaatcctatcactttgggaggccaaagaaggcagatcacttgaggtcaggagtttgagaccagcctagctaacatggtgaaaccccatctctactaaaaatacaaaaaaattagctgcgcgtggtggtgtgcacctgtagttccagctacccaggaggctgaggcacgagaatcacttgaaccagggaggcaggggttgcagtgagccaacatcatgccactgcacgccagcctgggtaacagagtgagactctgtctcaaaaaaaaaaaaaaaaaaatctggtccctaaggacaagatgtgaataacaagagaaattggtcttctcactgtgatgctgagctctgctcccctcttccattttctgcagcccctgtagaacaggcccaacagcctcatgggcatcacagctcagaagcactggaagtctgtggagtcccaatctcaatctcaatcttcatgtggcagccaaagcagatgttgcacatttatatacatgcagttgagggagaggttaggatttggcccattctaatgcagttctctgctcttactaatttaaattttgcagaaacagtgtcatgtaattccatcatgagttaaactcatagtaatcttgctgtgagcagtattttgataaggccacattcttaaaataatcaattttgtctattatatatacttccagttaccatcgctctttctcatctgaacataaatgttaaacattttgtggggtgaggaggagttgggacaactaaactgtagcagtgcccttttctttgtttttaacacatactgatacctgagaaacaaattcagggtcataggcaaaggaactttgtgactaagcacatagctgcaaagttggaagccaaaatttaattttataattttccttttaaaaagcaaaattttatttcagttttcaaaagcaagaattaactcatttacttttgagttgcaaatgttaagccacgacaattaattaatgtgtaagatgaagcaaaagttaacataaaatacaaattaacaattctatttcttctagtctaatgaattttggaactataaatgaaagctttattattattattattattattattattatacttcaagttttagggcacatgtgcacaatgtgcaggtttgttacatatgtatacatgtgccatgttggtgtactgcacccattaactcgtcatttagcattaggtatatctcctaatgctatccctgccccctccctccaccccacaactgtccccagagtgtgatgttccccttcctgtgtccatgtgttctcgttgttcaattcccacctgtgagtgagaacatgcggtgtttggttttttgtccttgcaatagtttgctaagaatgatgatttccagtttcatccatgtccctacaaagaacatgaactcatcattttttatggctgcatagtattccatgatgtatatgtgccacattttcttaatccagtctatcattgttggacatttgggttggttccaagtctttgctattgtgaatagtcccacaataaacatacgtgtgcatgtgtctttatagcagcatgatttataatcctttgggtatatacccagtaatgggattgctgagtcaaatagtatttctagttccagatccctgaggaatcgccacactgacttccacaatggctgaactagtttacagtcccaccaacagtgtaaaagtgttcctatttctccacatcctctccagcacctgttgtttcctgactttttaatgattgccattctaactggtgtgagatggtatctcattgtggttttgatttgcatttctctgatggccagtgatgatgagcattttttcatgtgttttttggctgcataaatgtcttcttttgagaagtgtctgttcatatccttcgcccactttttgatggggttgtttgtttttttcttgtaaatttgtttgagttcattgtagattctggatattagtcctttgtcagatgagtaggttgcgaaaattttctcccattttgtaggttgcctgttcactctgatggtagtttcttttgctgtgcagaagctgtttagtttaattagatcccaaatgaaagctttttatgagagtgtatttcacaagtgactgagcagttacagataaacccactcttttgaaactggcttagttgtattgaaactgatacagattcatgcatttattttaacaagaatgttctttctgttcaactcaaatatttcttgagtgcctaatatgtgcaagacagtattttacccactctaggggcagacatacaggaactcatactctgctttgagaaacaaaccagttcatgacaggtcctgccatgaaggtctagagcatgtattctcaacgggagtgatatgtccccaagatgatgaaaattggttattgagagtgtgagggggtgaaaaaagtctcagctattacaatggtttgtggccctccaaaaggccacacagtatatacacagatatacagcatatctttggtattaaaatttaatggggagatattagggggaaaatatctgaatattgctcctcagggaagcaataatgaaaaaagagttgactataaggcaggtgaatatggtagaggaatcaataaaggaggagggcaggtctgtgaagctcatgatgtctgagggggcaccgtgatgaaagaatagtgcttccaaaagcagttttagaaaggaaaagtattccttgtggcagatagggctaacttggaatagtaaatgattttcctctaagataccagcactaatctgttggtagtggctgcctggaacgctgcaataaggattctgagactagaaccagctcagcaaaaaaaatgtggcattcaattagtgatgtctactatgtgcatgggagcggacgttgcagtatgaataccacagattatttgctttctctggcaaccttaagcaaagcaatgtcagaaaagtgcaggatatatttaaagaagagtgaattcaggtgaatgaattcctaaaaacttctcatttaaaacccaacaaattcggccaggcgcggtggctcacgcctgtaatctcagcactttgggaggccaaggcgggcggatcatgaggtcaggagatcgagatcatcctggctaacacagtgaaaccccgtctctactaaaaatacaaaaaattagccgggcgtggtggcgggcgcctgtagtcccagctacttgggaggctgaggcaagagaatggcgtgaacccgggaggcggagctggcagtgagccgagattgcgtgcactctagcctgggaagacagagccagactccgtctcaaaaaaaaaaacccaacaaattcaagactgatttttccaaaagaataaatgtaaagggggagggagcttttttatcatgtataaatctacaactattcttctacatgtcacccttaaatatactattttaaaacaatttttgtgatataaaacactcatatagaaagtgcataaaacacacgctgggtgtggtggctgacatctataatcccagcactttgggaggcccagatgggtcacctgaggtcaggagttcaagaccagcctggccaacatggcaaaaccctgtctgtactaaaaatacaaaaattagccgggcatggtgtcacatgcctgtggtcacacctacttgggaggctgaggcatgagaatcgcttgagcccaggaggcagaggttgcagtaagccaagattgcaccactgcactccagcctgggcaacagagtgaggctctgtctcaaaataaataaataaataaataaataaataaataaatagaatgtgcataaaacacaaatgtgcataattatgcacaaagacctgtgtcatcacagctggccaaaaaaatagaatatcacccacaccctagaagcacctcatgtgtctccccatcacattcacttcctccacacagagataacattatccccacttttaggatagtcatatccttgcttgcctaatagttttaccacttatgtatgaatccctaaacaatacagtttagttttgcctgttttttaactttatatgaatggaatcatatcatatatattcttttatgtgttgctgctttcacttaacattgtaagttttacctatgccgtgtgcagcagtttatttattcattctactatgtatgtgtccattcagctgctggtggtttgctgtctccagttgttggctatgacaaacaatgctgttctgagtatgagcagagatcttggtgcacacatgtgtgagtttctagaagcagaattgctgggtcatagggcacttctttagctttgttagataaataccagattcttttcaaatagattgtttccatgtacactcctactagcagagtgtcagagtcaccattgtctcaacacaaaatattatcatacttttaaattttgccattttgatcgagagtatgtagtgtgatctcagtgtgactttcatttgtagtttcctaattacttgctgagattgagcacatttacatatgtttattggccacttggatttttctttcataaagtacctgtctttttgcccacatttaaaattctatgtttttttgttttttgtttttgcttttttgagacagagtctcactctgtagcccagactggagtgcaggggcatgatcttggctcactgcaacctccacctcccgggttcaagcgattcttctgcctcagtctcccaagtagctgggattacaggcacccaccaccatgcctggctaattttgtttttctttgtagtttttttagtagagacggagtttcaccatgttagccaggctggtctcgaactcctgacctccagagatccgcctgcctcacctcccaaagtgctgggattacaggcgtgagccaccacacccggcctaaagttctattcataaggccaggcacagtggctcacacctgtaatctcagccctttgggagactaagctgggaggatagcttgggcccaggaattcaagaccagcctgggcaacatagcaagacccccatctctatacaaaatttaaatttaaatttaaaaaatctctacctataacttacttaaatataacagataaagagtcctttatttgttatgcatgctgcaattatcttcactaattctgtggcttgtctttttactctatgatgtctttaattaacaaaaggttttaattttaaaatcgacaaatgtacctatctttaccctttttagtatattgtttaagaaatctctcccttcattgaagttagtgtagaaaggaaagagtgaattattttaaaatatgagactttttttattattatactttaagttttagggtacatgtgcacaacgtgcatgtatacatgtgccatgttagtgtgctgcacccattaactcatcatttagcattaggtatatctcctaatgctatctctccccactccctgcaccccacaacagtccccactgtgtgatgttcccgttcctatgtccatgtgttcttattgttcaattcccacctatgagtgagaacatgctatgtttggttttttgtccttgtgatagtttgctgagaatgatggtttccagcttcatccatgtccctacaaagaacatgaactcatcattttttatggttgcatagtattccatggcatatatgtgccacattttcttaatccagtctatcatttttggacatttgggttggttccaagtctttgctattgtgaatagtgccgcgataaacatacgtgtgcatgtgtctttatagcagcatgatttataatcctttgggtatatacccagtaatgggatgactgggtcaaatggtggtggcgcacacctgtagtcccagctactcaggaggctaaggcaggaggatcacttgaacctgggagacagaggttgcagtgagccaagatcacgtcactgcactctagcctggcaacagagcaggactccatctcaccaaaaaaaaaaagatcttggcttttatatcttaaagaatgtagaacaactttctcccacctatccataaattctaagtactatagctctcaaagatgcttgaaattatgggcacatattgaaccaagaagaagttcaagttgtccttgtaacttcctacaaaaaaatttttttaatttaattatcagctgggggcagtgactcacaccagtaatcccagcactttgggaggccaaggcagacagatcacctgaggtaaggagtttgagaccagcctggccaacacagtgaaaccctgtctctactaaaaacacaaaaaaaaaattagccaggcataatggcgcacgcctgtagtcccagctacttgggaggctgaggcaggagaatcacttgaacccacaaggtgggggttgcggtgagccaagatcacgccactgcactccagcctgggtgacagagcaagactccatctcaaaataataataataataaaaaaaagatagtgtcaaactataaatagaacttttttttagtttcatttttgttgcttgtttgtttttacaactagtactagtcactgttgaacaaaactgaattcatttgggggaattttaaggcaaagctttcaatgattaatcttttatgtcacactttaataccacggatcatgaacttgctcctgtctcttcttccgtttgccacactaacatcaggacctgtgtggtttgcttaagtagtctaattggcccaagaaaaatgaacatttgtgtttattttcttcattattctccactataacttctgaacattataaggtggaatgcttaatttaggatgctaaataaaaatctggaatttggtaaaataagcttagacttatccactaattataaagttttctagtcagaatagaattaaactaacccacatcttcctgtagtcagggcttcagtgagctctacaagcaaatgtagtcactctacatttgcttgtagagctaatgcagtattgtagaaagagtgggaactagaggagacccaagacaaaggtcttaaaagctgagtctcaatttccctatccataaaatagagaaaatgtctgctctgcacaccttaaaggattatcataagaaacaagcatgttaatgtacacagaaaggacttggaacgctgagagcactacaggagtcaaagttgtttttattagtttagtccaagagatcttctgttagtgggaagacccaatcttcttgatagtcatgctgttgtcacagcaaatccctctccctcaaatgacattcacatagaatcttctttgtgctttcttatgaaatgcatagaagaaggcagggaagagaaaaggaaacatttctgagcatctcctatgctccagggtccatatccagggtgtaggaactttacatctactatctcattgacaatgttcaaccacttctgcctgcagagaactcagcctgccctggctgacctgtccttcatgcagcctgtgccctcgtgctgaccacagcaccagggatcatctgctgccctcagagatgaagggactagtcaatgttctcatcacttctctgtagactgttctctatacttgtcaccaaaacagtttgtactagaactttttcagaatttaaattactatctctaaatcaagcatattttccaaagttgcctttgttttctaatacatcaaagcatgactgtccattaaagtctaaaacagaaccagaagattcttaaatccctctcaggaagatactaagtcacttacttaactaacagcaccttttggatgaacctttttgtagggaataagagatgtgggctctgtcctctgaaaccatccagggcatttgaaacatcctctcaggtgccataatgaccaccagtttgctaagggaaaaatattctatcccaattctgtaaatagaattatctcaggaaccactgagaaccataagggacttacttgctttaccaaataggcgtccctctataaggcttcagacctctttcccttaggtctaccgtgattagagcctcgaaaccaaaacaagttccacatggtctcacagctggtctgaaagtagcaggacctattttaaatcaaaatggccctcagaaaaccagggacatagaagtttccgacatatctcaaattaaggatctgactatgaggacgtccccaagaggtaggcagatgctgaccttccaaagtcttatttgagcatctggatgctgtctaaagttgtcagcctttgacaaaccatctccatgtttgctgttttatctcattagactccccaaacagcactccccatagggccactggaaggcattactcgtcagtttcaaccgaacagttttaaagctcgtgcttaggccaggcgaggtggctcatgcctgtaatcctggcactttgggaggccgaggcaggtggatcacctgatatcaggagttcaagaccagcctggccagcatggtgaaaccccatctctactaaaaatacaaaaaaaagccagatgtggtggtgtgtgcctgtaatcccagctacttgggacgatgaggcaggagaatcccttgaacccgaaaggcagaggttgcagtgagcccagatcataccactgcactccagcctgggcaacagagtggagactccgcctcaaaaaaaataaaatataaaataaaatcaagctcgtgcttaaaaagcttctgccctttcagaggcaattccccttcacaccacaggagggataggtttgacagtgctcttgcctcactgaagtagctgtggagggttcgccctcccctgtgccacatgtttcacctctctgcatactgtgttaaatatcaagtagaacgctggcagagagaatcctatttcaaacatacaggcaatgattctcaacccaggatcgagcagtgtacttcacaccatctgaggacttttttccttgacatacacccctaacccacctacctccacctccaacccaccgagcctttgataagccacctccttcctctttctccttctcacactgcctcgggatccgctggtagagatactctttcataatttggggttgctgccagaaattgtgtcacactgcagagggagtaagtaactcctcgcccacattccaaattcgtttatattttagacaagtcaggtcaggaataaattggtaaactaaagatggtgaaaaatatgtgtcctcagcatggctctaggcagcctatccagctaaaattgtccaaaacatttaaggacacaagtcacattagaagaatatggtaaggctgggcgcggtggctcacgcttgtaatcccagcactttgggaggccgaggtgggcggatcacaaggtcaggagatcgagtccacggtgaaaccctgtctctactaaaaatacaaaaaatgagccgggcatggtggtgggtgcctgtagtcccagctactcgggaggctgaggtaggaaaatggcgtgaacccgggaggcggagcttgcagtgagccgaggtcgtgccactgcactccagcctgggcgacagagcgagactccgtcaaaaaaaaaaaaagaagaagaagaatatggtaaaatagacatcaaggatgcttccagaaaataagccctttttgtttccacactccataccaacaggaactgttggtgggttttattattcaaggaaaacagtgaatgcctttgatagtagcaagtatcaccaagtaatccccaaggcctgagaagtccacacttccaagtctgtctcttctggtgatggttcccaaatttactgtgcatcagggccacctgggcagcctggtgaaatggagattccaaaagactggagtggaccctggaatcaacaggcacctcaatgtttggaatgcacggtaaagtttgtaaagcctgccgtaggtcaaacatcagatcttagtgcattcagaattgccccatccacagttagtgtgaaagaactccctgtaaggtctccaacaatccctaccccaatgcgttcctgctttctcttcaagaagaataattctaccctgatccctgcttcccatcttcggatcgttccagacctggttctttcatgtaattctccacctggatcacacacctggaacattacccagaaggtctcttctgcattcccacgtaccctgtcccttgaatttgtttttcttttttctttacttttctttcttttaagataggttctctttctgtcacccatggtagagttcagtggcgtgatcaatagctcactgcaccctcaacctctgggctcaagtgatcctcctacctcagcctcccgagtagctgggaccacaggcatgtaccaccacacttggataattttcttttaatgattttgtagatacaagagtctcagtatgtttcccagactagtctcaaactcctgggctcaagggatcctcctccatcagcttcacaaagtgctaggattacaggcatgaaccaccatgtcctgctgtcccttgaatttgctctctggaagatattcttgattctgaaacttttctccccttcccttaactgcaccctatatttcactaaatgaatggaaaagtggaaggaaatcacagttgttgtgttccttcttgtggcaagcacaatgggaggctcttcatgcactcttattcttcacttatcacttattgaggtccctgatagaaaaaaatcagagaggctgggcgcagtggctcacacctgtaatcccagcactttgggaggccaaggcaggcggatcacctgaggtcgggagtttgagaccagcctgaccaacatggagaaaccccgtctttgctaaaaatacaaaattagaccagtgtggtggtacatgcctgtgatcccagctactcggaaggctgagggaggagaatcacttgaacccaggaggtgacgttgcggtgagccgagatcacgccactgcacttcagcctgggcaacaaaagcaaaactccatctcaaaaaaaaaagaaagaaagaaaaagaaaacacaatttacggattaaatgattaaaggcgtcagctattaggtactatgacagagtttggatttgaacccaggaactgtctggttccaaagccatggctttttccagcacacttcatgctcccaaaacatgtgaccagctttttctgtacacatgctaatcccgcccgtgtaccaaagcctcatgatgatttgttcccaaagttactacatattttataaaagttttttgttccaatcaaagataaggtcaaaatggaatgagattagactagaaacagcctttcaaaaataaaaaagaagcagtctcctgttatcactttgaggaagatttgatatttctcaaaattcagtggtatcagtaaggctgggattttcaaatggtatgcagttgacatataactctaaagccagagtttcagtgttgcattcattttccagaaaaagggctcagcataaaatgcagctaatagtaaggttttgttggggttttttgcataataaaagtcgtaactgagcaacattagctacagacactcctccccataaatccatggagactctgtgaaaagcatttcagaggaatacaaaccccaagcagtctttggcaaggggtaatttgccatgatgatagttaaataaggagaatactgagtagctgactacaaagaagcatctgaaaataaatctagctatagttgaagtccctcaattgaaaatggatgtaaattttctcacatgtggcagcctaaattagtctcttctgtttataaggcaagtttgacaatgcataccaagaagcttaaatcataagatttgacctaataatcccactcctaagtattcatttcaagaaaataattcataagaggaatatgatacatattttttataatagcatcatatatttataactggcaagaaactggaagcaaccttattttccaataataaaagaaaggcttagtacattttggtatcttaattctttgagttattatgcaaccattaaaaataggattacagtgtacaaacaaggaaaagagcattcagtgaagggcatagaaacaaaatataaatgtgcagtgatcacagacatgcaaattacacaagctgataaagactaagaggggaaacaaagaaatgaaaatattgatgttagcttggtgagattacaagtgtctttaaacattaaaattatttccttttatagtgaccatattcagtttttaggggtttttcctgtttttccagatgtggtttttatagaattatattttacattctttccatcactggaagaaaaaaaagatttatattttataattatttttggtcagaagattattttacaaaactacatatggaatgttctagccaattatgaaatatagagaattactaactcacaaatactaatactattgttttaatttgcagtgaagggaatttggctacaaagcagatcgtattccttcagaggccagttatgtggaattcagctgctcaaacaccagatgtgagtaaaattgatgctttattaactgaatgttatattgaagcatttaatccttaaactctcattgtaattccaaataagaaagcgtggacatgatatggaaacagtcctctgaaccaacctataagggaaatgtgctagcaatcaggcaacatgaaatagttccaaaggggattataatatgccatcacaaaatatgccactttggcaagaggattactttgagctgaaggcaattaagaaacagcagacacaggaggaactctctgtcctccacctttctgctgaaaaacaagggcacacatgtcactttataaaggcgacataaatttccatttgtaaacgtgtctaatcaccagagacaattcacactgaagagtctgcaaaaacaaaccttactaaaataagcttgatcttccattcgtttaccccatgtatttgccttctcacaatttacttccccagaagcccaaactccttttccctcatctagtcacctgtccacaacttaccaccctttgttaaaatggtatataaactcccaggtcttctacaccaaactgcctctttgggtttttgctacttttctgtgaaaagactgtgtgcattgaaaataaaccttttctcctgttaatatgtcttttgtcagtttaatttgtagttctcagctactgaacctaagaggagagaggaacagttttttctgcccttacagttctaaatcttgtgaatgaatgtgcctgatcttgcaatgcatccatgcaaccttggctatattgacctttggcaacacttttcttttatgttatctactcaagtttatattttttcagcactttgctgaagggctattctgatcctcaagtcaccttgatcttactggatgcacagctggaatacaatgattgaatgaggcaatctgtgcattaataaagcataacttgcaaaacaagaaatttgaaaatggaccagaaaactatttaaagtgattctttttctgtatctaaatcaagaaaacgttgttttatgttttcgggcaaagctgcagagatttgaaaaaagaaaacattgtttagtacattttaaagttatctaaactatcaaagagctagattgactgtgtgtataatacagtcatgctaaattgtctcacattaattttggaaagaggctggctgggtcagtaggtaaatcggtagagaggtagagaggttgttgggaagacggagaggcaggagaatagaatgaccaagtacacagaattagaaaccacattaaagcccacaagtgagcactgcaaccctccacaacaatgaggatgactcaagttcatgagtttattaaaaaatattctgtctaggccatgcacaggggctcacacctgtaatcccaacactttgggaggctgaagtgggagaactgcttgaacccaggagtttgagaccagcctgggaaacattggcagaccctgtctctacaaaaaattaaaaaataaattaggcaggcatggtggcacatgcctgtagtcccagctacttgggatgttgaagtgggaggatcacttgagcccaggagttcagtgctgcagtgagctgtgatcatgccactgcattccagcctgggtgacggagtgagaccctgtctcaaaaaaaattaattaaataaaagaaatattctggcccagcgtggtggctcaggcctgtaatcccagcactctgggaggcggaagtgggcggatcatgaggtcaagagatcaagaccatcctggctaacatggagaatccctgtctctactaaaaatacaaaaattagccaggcgtggtggcacgtgcctgtcgtaccagctacttgggagcctgaggcaggagaatcgcttgaacccaggaggtagaggttgtagtgagccaagatcgcaccactgcactgcagcctggcaacagggtgagactctgtctcaaaaaaaaaaaaaaaaaaagaaatattctgcctaaaagaagcaaaggtgggtatatgcagagaatggccagaaaaagttgtcctttcttcttcccccaaagcaaacttctcatcatgtcacacccttcttattcttttttttttttttttgagatggagtctcactctgttgccaggctggagtgcagtggcgcaatctctgctcactacaccctcctactccctggttaagtgattctcctgcctcagcctcccgagtagctgggactacaggcacacaccaccaggcccagctaattgttgtatttttggtagagatggggtttcaccttgttggccaggatggtcttgatctcctgacctcgagatccccccacctcggcctcccacagtgctgggattgcaggtgtcagccaccacacctggcctctttctttctttttaacattctacaaatggccattatttttaggaaaaaatcatcagaattcacagcctcatggggttttgatttactgagggccatggagttgtgcttgtgaagatgtaagacccaaatccagctacctcacagtctcttttacttaatattagatataaggtttttaattccccaaaaatatgcaggccctttttgtttatcatgttttacttttttatgagacagggtcttcttgtgttgcccagtctggtctcaaactcctgagttcaaacaatcctcccaccttagcctcccaagtagttagggttacaggtgctcaccactgtaccaagctcttttttgtttagctttagatactatccagtagtctctagtcatagcttttctttgggtaatctttatatttcactgaaatgtaaaattactggttcatttatataatgggaagtatatatagttggtttgtatcaatgacaaatctaataataatatattttataacttacaattcctcttctaaacggatttaccatttcttcatttgacaaatgtttaatttttctaacaagaaaccgcaggatcttgagattatttcagggtagaacttgtaggtaggagtcaaagtgtctaacagctataacagaaagctgatttgcaaattcagtttttacttaaggaaacaatttcttactctatctcagaatggtagtaatactttcaggacagtaaactattaatatcaatatagagttaatttattaccaaaatgttaatttagctatctcatatatattttgtgaaagttgtatttacaatatgccttgaaaaaatttatgcagtcacagatccataatagcactgttctttgttaataccctgaaatcagttattgtttggaaggggttgatgggaagactgctttgtttataaagtctttcaaagaattttttcaaagatgtttagttttaaaaacagttggtagatatttcagacattacaaatgttgtcctaggattgtcaatgagttttcattaaacaatagatttcatgggctgatagaaattaacctagagtctgacctttgaaaaaaatttcttcagccaggcacagtggctcacgcctgtaatcccagcactttggaaggccaaggcgggcggatcatctgaggtcgggagttcaagacccgcctgaccaacatggaaaaaccccttctctactaaaaatacacaattagctgggcgtggtggcacatgcctgtaatcccagctactcaggaagctgaggcaggagaattgcttgaacctgggaagcagaggttgtgctcagctgagatcatgccattgcactccagcctgggcaacaagagcaaaactccatctcaaaaaaaaaatttttctcttgtttcttttactaagactaatatcaagacttttcctacccaatttcactgagcacagaacagtactgttattgagaggtgacagagtgctggcaaccctcgcagccctcactcactctccgcgcctcctcagcctgggcgcccactctggccacacttgaggagcccttcagcccgccgctgcaccatgggagcccttctctggtctggccgaggccagagccggctccctcggcttgcagggaggggtggagggagaggcgtggagggagaggcacggggcaggaaccagttctgcgcacagtgcttgcaagccagggcgagttccagatgggcgtgggctcggtgggcccacactcagagcggccggctggccccaggcattgttagcacccaggccagcagctatggagggtgcgccgggtcccacagcagtgccagccctcccacactgccctcgatttttcaccgggtcttagctgcctccccgccgggcagggctcaggacctgcagcccgccatgcctgagcccccccgctccaccaccgtgggctcctgcaccaccggagcctccccaatgagtgctgccccctgctccagtgtgcacggtcccacggaccgcccaagggctgaggagtatgggcacactgcgcgggactggcagacagctccacctgccgccccagtgcagtatccactgggtgaagccagctgagctcctgagtctggtggggacttgcagaacctttatgtctagctaagggattgtaaatacaccaatccgcactctgtatctagttcaaggtttgtaagcacaccaatcagcaccctgtgtctagctcagggtttgtggatacaccaattggcactctgtatctagctaatctggtggggacttggagaatctttgtgtctagctaagggattgtgaatacaccaatcggcactctatatctagctcaaggtttgtgaatgcaccaatcagcactctgtgtctagctcagggtttgtaaatgcaccaaagagcactctgtatttagctaatctagtggggaaggtggagaacttttgtgtctagctcagggattgtaaactcaccaatcagcactctgtcaaaacggaccaatcagctctctgtaaaacagaccaattggttctctgtaaaatggaccaatcagcaggatgtgggtggggccagataagagaataaaagcaggctgcctcagccagcagtggcaacctgctgggctcgtcttccccacttggggagttttgtttttttactttttgcaataaattgtgctgctgctccctctttgggtccacactgtctttatgagctgtagcacttactgcgaaggtctgcagcttcacgcctgaagccagccagaccacgaacccaccgggaggaacgaacaactccagacgcgccacgttaagagctgtaacactcaccgtggaggtctgcgggttcattcctgaaccagcgagaccacgaacccaccagaaggaagaaactccgaacacatccaaacaccagaaggagcaaactccggacacgccgcctttaagaaccataacactcaccgtgagagtccgtggcttcactcttgaggtcagtgagatcaaggacccaccaattctggacacattatgttcaacaaatccatttcatgcccttgttgtgggggaggaaattgaggattgcacaatgaagaaagcgtatcattggatttttttcttcggaagttatggagacctttacttttggaatttgttttatatttcacagatcttctgcagtattctagatacttgtgactgtttttaaacatgaaaaatgtcatttcaaaatatttagaccctcatttactacctcagttttctctaagctattaagagaattcattttagttaaactagaaaactattaggaaaaaacataggagaaaatctttgtcaagtggagttaggcaaagagtttttaggggccaggtgcggtggctcacacctgtaatctcagcattctgggagcctgaggcaggaggatcacttgaatccaggagtgtgagaccagctggtcagctcagcaaaaccctgtctgcaaaaaatacaaaaattagctgggcatggtggcgcacacgggtaatcccagctacttgggggagtgggggtggggggatcgctggagcctgggagatggaggctattgtgagccatgatcgcgccactgtactccagcctgagcaacagagtgagaccttgtctcaaaaaaaaagtttttagacataagaccaaaagcataatctatttaaaaattgaaaaaatataattcatcaaaatataaaacttttgttctgtgaatgacactgttaacagaaggaaaagacaagccacaaactgggagagaaaaactcatatatcatatacatgacaaacgattttacccaaggggtatcaaggactctcacaattgaagagtaagaaaagaacccagttaaaaaataattaaaagactggaacacctcaccaatgaggatatgtaaatgagaagtaaatacatgaaaagatgcttaaatcactagccattagggaagtgcaaatgaaaactcataatgagatatcatacacctgttaaaatggttaaaataaaaaatactgacaataccaagaactggggagaatgaggagcaatcagaaccctcatacacagctgctggggatgcaaagtggtatatccactgtattagtccgttttcacgcagctgataaagacatacctgagactgggtaatttacaaaagaaagagatttaactggactcagagttcctcatggctgaggaggcctcacaatcatggcagaaggcaaggaggagcaagtcacatcttacgtggatggtggatggcggcaggcaaagggcttgtgcaggggaactccttttttttttttttttttttttttttttttttttgagacagagtcactctgtcacccaggctggggtgcaatggcatggtctcagctcactgcaacctccgcctctccagttcaagcaattctgcctgcctcagcctcctgagtagctgggattacaggcgcgtagcaccacacctggctaatttttgtatttttagtagagatggggtttcactatgttggccaggctggttcaaactcctgacctcgtggtccacctgccttggcctcccaaaatgctgggattacaggcgtgagccactgtgcctggccccatttttaaaaccatcagatctcatgagatttattcactatgatgagagcagcacggaagagacccatctctgtgattcaattatctcccatcaggtccctcccacaacacgtggaagttatgggagctacaagatgagatttggttgaggacacagaaccaaaccatatcatccaccctggaaaacagtttggcagcttctcaggaagttaaacagacatttaccatatgacccagcagtccctgtcttgggtgtttaacctagagaaataaaaacttacgttcacacagaaacctacacacaagtatttgtagcagctctgttcgtaatcacctcaaactggaaacaacccaaatgtcttcaacaagtgaatgaataaacaacagtggtacatccatacaattaaatactcagaaataaaaaggactgggcatggtgtctcacctctgtaatcccagcactctgggaggccaaggaaggcggctggccatgaggccaggagtttgagaccaactggggcaacttgggaccccatctcataaaaaagtaaaataagataaagtctgtctctacaaataaaaaataaaaatgaataggaaagaacttactgatacacataacttggattaatctcaagacagagtgaaactccatctcaaaaaaaagttttatgtactgtttctatacatcgtctgtgtgcatgcaaacatatatatgtagagagagaaaaaaataggaaaatatgccgaggttttaacagttgtatttctgggagatggaattataggtgggttttgcttttttctttgtttttgtcacattttctatattaaatgtgtgttatttttatgattgaatgaaatttttatttaggaaacacacaaatcttttacagcaaatctactcatatttttgcagatgtgggtaagacagtgtgaaaagaataaggtaagagacttgggctacagttccgggccagctattcatgaccttggacaaatcctgttttctttctgggtctgggccccacctctgtagaataaggggactgaagtagataatctccaagaactagttgggcttcagacttctacagtctaagttatgagaacatcacagtttggtttgttggaaatgttattatttaatgtgaaatgagggtggggtaggagaggtgatatgattgctgaagatgtatttattaaacttaacatgtcacacgtgtctgtgtgaagagactaccaaacaggctttgtgtgagcaataaagctttttaatcacctgggtgcaggcgggctgagtccaaaaagagagtcagcgaagggagaaaggggtagggccgttttataggatttgggtaggtagtggaaaattacagtcaaagggggttgttctctggcgggcaggggtggggggtcacaaggtgctcagtgggggaacttctgagccaggagaaggaatttcacaaggtaatgtcttcagttaaggcaggaaatggccattttcacttcttttgtgattcttcaattacttcaggccatctggatgtatacctgcaggcttgggctcagaggcctgacattcctttcttcttatattaataagaaaaataaaacaaaatagtggtaaagtgttgggacggcgaaaatttttgggggtggtatggagagataatgggcgatgtttctcagggctgcttcaagcaggattaggggcagcgtgggaacctagagtagcagaggtcaagttgaaggaggattttgtggtaaggggcaatattgtggggttgttagaaggagtatttgtcatatagaatgactggtgatggcctggatgcagttttgtatgaattgagaaactaaacggaagatacaaggtctgaataagaggagaagaacaggtattaaagaattaagaattgggaggacccaggacatccaattagagggtgcccaagggggttcagcataattacttgcttggttggagagttttggtgctctatccttgagtttttttatgttgtcttacaccaggccagattgatttaggtaaaaacaacactcttctttaaaaaatatacagagtcctcatgtttcagcagtgagtaagtcaaggcctcggcggttttggaggacaacctcagctagagagtcacttgggcctgaaggactgataaaatttgtgatacgtctgtgatgctagcagagaagtcattagagaggctacgaaaggtcatgacagaggttgaaatgcctgctattccagtaccaagaacattagtggacgcagaaagtcctaaactgacaagcaagggaattagtggaataactcttttttgtcgtgtcagtgtcatgtggggaacaggaagctcttccgtcccatttgcaaattgaattttgggagtaaggaaaattaatgtgcatgtgcctgtccaattagcaggtagacacatgtaggtagaggatacacagaggaagaagagaccttgtataaagcaaaactggaaatgcaaagtaaaaagatgagaaggagtgctgaaagaagtgtcttctacccagactcctagggatccagctagggcggcagctgtcagaggttttaatggggactgatagggtaactgcttagagggggaggttcgattttcatggtgtgtgagaaaacgatgagtatctacaaacaacttttcactgttatttatggggctgggtataagtaaacaagaagagggcctgggaggagagtctgacgagcaaggggaaggtagccaaggttggagtgaaatacagggtaagtgccttcgtaagcaataattactgctaatgtttttaagtttgcccgtattgatagagggcttatctgtaatacggagctgggaggctccaattgtttcagtggtgtgtgtagttgggctttggagatgaagagtgaaggaacatcacgaagg

SEQ ID NO: 583 - DNA, 1117 bp, Homo sapiens
ctctttgcttttgatatttcagcttcatcaaacccagaagtcatcaagataaattcaattctggatatagtaacaaaagtggaaaactattatcttaaaggatatattgtcggggctattcatcctgttatacaacctgtggggcagcgaaaacacctacctgcaagttacctatacagagtggtgctattgcgcttgaaattaagcccaaagaattcggcagcacccagtggacaaagacgcccaaggctcgtgattgaggaatgtcccctaacttctgaggcacaaacaaatgacgcagcaaaagaactgatagaaaagattaatgtcgctgctaaaagaggaatgaaatttgttggattcatatcacagcattattctccatctaaattctgcaatggaaccaaccatgatggagatatagaatcgatgctacatgtgagacacggttcagatgaaaactgtagaagttggaatgaagggacgttaagtgggcagtcatctgaaagcggaattgaggaagaacttcatcatgaaagtggacagtatcaaatggaacaaaatggcagccctacttcctctaaatcaagaaagggagaagcctcagataacaaattgtatacagtcttcaatgcttttgatgatgattcaacctcctgggcctatcaggaaggcatcctgtcaatgaaagtaacaagaaaaggatcagtcattagtacacttgatgctgattggctggagttaactaccttttattataaacaaggcttgtctttaattgattcttttgtattctgggaaacatctaaaggggaacatttgcctaaatctttggaaggattttttatctatgaagaagaaggttctggagttccaggttctagtaggaaaggaaatgatgccatcgtagtagaacaatggactgttattgagggatgtgaaatcaaaacagattatggccctctgctgcacactctggctgaattcggatggcttctgacaagcgtgttgcccacacctgtattgagacatgacagtgaagggaatttggctacaaagcagatcgtattccttcagaggccagttatgtggaattcagctgctcaaacaccagatg

SEQ ID NO: 584 - protein, 373 aa, Homo sapiens
  VARIANT (1)...(373): Xaa = Any Amino Acid
LFAFDISASSNPEVIKINSILDIVTKVENYYLKGYIVGAIHPVIQPVGQRKHLPASYLYRVVLLRLKLSPKNSAAPSGQRRPRLVIEECPLTSEAQTNDAAKELIEKINVAAKRGMKFVGFISQHYSPSKFCNGTNHDGDIESMLHVRHGSDENCRSWNEGTLSGQSSESGIEEELHHESGQYQMEQNGSPTSSKSRKGEASDNKLYTVFNAFDDDSTSWAYQEGILSMKVTRKGSVISTLDADWLELTTFYYKQGLSLIDSFVFWETSKGEHLPKSLEGFFIYEEEGSGVPGSSRKGNDAIVVEQWTVIEGCEIKTDYGPLLHTLAEFGWLLTSVLPTPVLRHDSEGNLATKQIVFLQRPVMWNSAAQTPDX

SEQ ID NO: 585 - DNA, 100610 bp, Mus musculus
  misc_feature (1)...(100610): n = A,T,C or G
aacttgaactgccactttggaaaccaatttggcagtttctcagaaaattgggaataggtctaccttgagacccagctataccactattgggcatatacccaaaggatgctccaacatataacaaggacacttgctcaaatatgttcatggaagctttattcataatagccagaaactggaaacaatctagaatgttcctcaatgaaaagagaatgtggtacatttacacaatggagtataactcagttattaaaaaccatgacctcatgaaatctgcaggcaaatgggtggaactagagaagattatcctgagtgaggtaactgagacccagaaggacaaacatggtgtgtactcacttataagtagataatagctgtaaagtaaaggataaccatgctggataatccagacccaaagaagctaagtagtaaggaaggctcaaggtggggcaagcgaatctcactgagaagaggaaataaaatagacatcatacgtagatgcgggggtggggggcgctgggggagaactggacagggaggggcggaacaggagggatcaagtaagaagaggacagagaaagtactgggaaagacaagtggaattgggagtgggtagaaatctctgggacaagctagaaacctagagcaatagaaaaatcccaggaatctatgagggtgactcctagcaatggggagtaaaacccttgacctccaatttgttctgtttacaagatgttgcaggggtaaagatggagcagaaattgagggaatgggcaaccaatgactgttccaacgtgagatccatgccatgagagggagcccacccctgacactgctagtaatattctgctacacttgggagacatgagtctagcataactgtcatctgagaggcttcacccagcaattgatggaaacagatgcagagatccacagccaagcattaggaggagcttggggaatcctgagaaagaaggggaggaaggattgtaggagccagtgggatcaaggacactacaagaaaacctacagaatctactaactttgacccacagggactcagaaagactgaagtgccaacctgggagtgagcttgtatgggactgacctaggccctctgcacatatgtaacagttgtgtagctgggtcttcatgcgggactcctaacagcaggagcagaaactgtctctaactcggttgcctgcctttgggaccctttccccctactagattcccttatctagccccaataggagaaaatacttgtagtcttactccaacttgatgtgccaagctggttgatatccatgggagacccccccttttctgaagagaaattggtgggggaaggaaaggttgggaaggaaggactgggaggagagtagggaggggaaactgtggttgggaaattaataaagtaaattaagtaagaaagttaattaatatgtttatgtttgtactcacagattagcagtgcctttctgcattggacagcagttaatgcagaggctgttaactagccaaagtgttgagaataagtggtttttgggtgctcagccctaaatggaacaactgcatcaaactcctcccacaggctcagggacatctcagaaatgggagtaggatgctatgaaatgctgtcctctgagcatgacacgggcggatgaactcacagcagttatggttatccacacaagacctatataaaattaatccaataaaaccactcaatattctagcccctctaaatggaatcaatggattacaaaattttttttaaattaaggatatgtaggtggaaggctatgtgttgagggtatagatgagaggaatacagatgggaattggggtagagatgatcaagatacaatgtatacccagataaaattgtcaacatgaataagagattaaaggattctttttaaagtagagaaaacaaaaatgtctgctttatcccattgtcttgaataagacctaagagagaagaaagactttgcaaaagcctgcatctcactcttttaccacagagccttccgctcattctaaagtggacaatttccaaactgtgtacccaagcaccccagaggctagtggcaggggtgcaaaccagagcctcacaggcctcccctgggtctccaggctacagaggcaccttctcctcaatccctttacatccccagagttcatgcaaacaaagttttctttgcttgaaaaactctctctggagaatttaggtcggttttcagtttcccagaatttaatacatttgtttacctgattcatggtactttcatatcacctgaatctaatacctgaatccaacctcggtactcaaaacgggttctctcctctgaacgcttgtccttggaggatttaataacaatgcatatttttgggagcaccgtgatacacgtgcttctatcaccggcagcttgggagctctcacgtggggcaaccctgtgttctctgtagccctcacccaaaggggagagcaagctgctgaacagcacgggaacagttaaatacactccctcggtgtttccccttccgtgggagtggccataggaagggcctgtcagctgtctgcagggggcccacctcctccatggcctcctgcattctcagttctcagaggtcagctcccattcacctctcaggctttcagtctcctcctgtagacgcctcttctgttctggtggtaaacagatggggggggggacagtaagcagggggagggaaaagttcattgtcattgcaaacgtgagaaccttctccagtcagctagtactttttatagtccctggggacacaatagagaactgaatattacatccctgccttcctggagtttacattcaagtggaaaaaaaaaagcaatttttaaaaagtacacagtagccatgttaagaagcaatgaaggctggagagatggctcagcggttaagagtactgactgttctcctggaggtcatgagttcaaatcccagcaaccacatggtggctcacaaccatccgtaatgagaaacaaatagaaaacctatgggccagaataagggggcccgagtgagtgggaagggaagggagggggggaagcaatgagagagccagcaaggtagaccacacctttactcccagcactctggaaggagaaacaggcatgtctctgactttgaggccagtctgttctacatagagaattccaggccagccaagagcaatgcgattggtgttgtttgatgattgatgatgatgatgatgatgatgatgacgacggatgatgatgatatgatggaggaagaagaagaagaagaagaagagaaagtggaggaggaatgttgtccatgaaaccaagcaggctggctagtgacaagggtgctacttgagaccaggtggtcaggaaaggttcagtcccgggtaacaaaaggcaccagccaagtcaatcaaactctgagcaaagagttgagccaaagtgataacatccaccaaggctctgggccagaagagttcagcctactccacaagcaggaaaggggacagcacggcagaacggcgagcaaggggaaccacaagtaaggagctagatgctgggccagttcacaggctttctgtggcaggcatacggagctttgctaagtggatttgggcaccactggaagatcctaggtagagacagacaacccagctttaagcagaaaggaggtagtgaggactttccccctcggaacaagagcacctgagtccagcactagaggtgggctagaaggcttagcgcactgggtcttataccccaggccccagagtgctatcagagggtttggaaatctaacctggagggcctaattcacagagatctccaacttccacacccaaagacttacccaatctgcccagcaagttttttaatacacatgactcaccacacaaacacatctgtggatctacacagactggggatcctcaagagctagtccttagaattatcaagaaaccagagagctgacagccctgttgaattgggagtgttctctggactccatggactgagaaagggaaagttctggcttgaagcctcatcacacagtgaatgctcattctagcatcgaggttctactctaaagatggtgctcatgacctcatgaaaggtgttctagaagaggggggagtcgtcagctctcccaaaaccagaccacagaagcagcaagccttgggcatctctttagctacaccatgaaaacagcagatgtacttagaaggttttcatgcaggcgcagtatcttctccaccatcggcctatctgtacacttagccttctctcaacccaggagaccccggcttagttcccagggcctcagggtgccttgaacagatcacactttttccaacacaatggtcttgagcatagagaagcaagaaagacgtggaagggccaagtgagtagacaccccacatcttcacctcaacgagagcacagactgagctcgtctgtatgttttcctaggaggcttcattttctcataaagaatgcaagacaagcaggggagattcggggacaggatcttgggaagcttgcagctagctttctactcggtccctttgggactggggcagggtgcagggtttgaggcaatgcacagagcaggtttaagcttaggttgtttgtgggtttcaaaggatgctctcgggtttcagagaaagcaagagaagaggtataggttgcatcctgagccagctttcaaagccaaggttggtgggaggtgaggcatgggattaggaggccctagacttaaaaagccatgaagcaaggagttctccactccaagctgtcccagctggggctccaggctgcccgcttccacctcaatcctttctgttcatttctgtagctggtatccgagccaagaggccaaactcaccagagccatgccttgcccagcccagatttcggatgatctggagttctttgtgaacgggaggaaggtaagcgacccgtaaagttagccctgcgacttgcagcaggaaacccctgactccaggggctccaggaatccgatctgagcctctcctttctgggacaagaagcttagctttacgaacccattttgacttctcttttctcctcgaagccaacaactgggtcctggcatagtgggaggcaggagagtcttgggattctttgcatacccctgggattctaacatggcacttcactgcataacctgatacaaattacttcacctccctgagattcggagtccccctgtggcctgtgcttcccacagctgttgtgaaattggaaggaaagctgcttctgtccccaggcaggagcccctgaggcacgagacacagaagcagtacgccctactgcatggtttgcgtttttgaactctagaagttttttatgaatccatctttgtaattctgtttatcaaatcaatttctctaaggccataattctcaaccttacaaattctgtgaccctttaatacagttcctcatgttgtggtgaccccccaaccataaaattagttttgttgctacctcataactgtaattttgctactgttacaaatcatacgcatccgtgttttctgatggtcttaggggacccctgtgaaagagttatttgatctctaaaggggtcatgactcacaagttgaaaagccaggaggcccctctttccctaggttgcagtctgttctgggaatatagagacaaggacagagcctctcgtggctactttcactagtagcctccttcctagcctcaccacccctcacacgggacactggctgctcttagtggccaagcccttcttgtcatgagccccattctactttccaagggcccacagcttctctgaactcttgccacctcccctccaagagcctctcgaacctctgcctgcacacatgtctgcactcaggagctggcccaggaaagcagccacagggctgttcatttgcctgcatgtgctctcagctgagtgcagcctcgccaggcacccaccaccacatccttctgtgacaatcactcatggctttcccattgagccagatccagttatgatcccagaatgacacggctgtagtcagaacagagaataaatcaagagatagaggggagaggggaacaaagaggaggggagagtgttgtgttttataaaaagaaaaaaaaaataggagagaccagagatgtttgatagaggcaaggtatggtgtggaggaaaggggtgcctcagtgggcccatgctgaggtatcccttccccctgagggaccagccacacgatgctatagtacagaaaagagtttattcagggcatggggaggggagttgagagaaagggggagagggagagaaagagagagagggagagagggagagagagaatagtacatgagagagagaggagaggggaatggggagagagggagagcaggaggagagagcaagagtaagagggcaagagagtgaggaggggacaagcagccccttttatagtgagtcgggcatgcctggctgttgccaggtaactgtggggcagagctgagactaagtgccaacagagcggagggaaggggaggcagtctgtgtggtgggagtctgttagatatttctatggggtggggtctgattacattctcggtaattgtttgtaaagggcctagtgtgagaggaagggcattggagggtaggttttgttattattctagtgatgaggtcctcccccccccccccgccccagccccagttctcaccttagaaatatatgcctagagatttctattccttgaggtgtacaaaaatgtgtgttccccttctgaggagaaaggaagaaggcagtgttggcccacagaaccttccttgcctgtcacacagctgaatgacgagaggtgctcacatgacatcccagggcaaaagcaataactatgctaaaggatacaacagggaaagagaaaacaagcaagttcctgtgtgacttgtgatgtgaacaccgcctttccaggggaaggatgggccctgagtaaggtgtcgaggccaccagcaggccactccaatggcaggggaccagcaggccactccaatggcaggggaccagcaggccactcaaatgtcaggggaccagcaggccactccaatggcaggggaccagcaggccactccaatggcaggggaccagcaggccccagagcctctccaggacaacagtaactttcccccacggactttctgcgacaaattccagaccccagagatcatccagagttccctaccaggtatcccagaaatggcagacacatcccacccacctcccctccctataggaccactccccatcccctgaacaaacacattccaagtttaaaatacttctaaagattctgttgggaggttccacgaggccgggcaacagagcagaagtgaaaaatacaaagtgcagatatgtttcaaaagtggaaaaagtccagagacagcatcccacagcgtcccacagcgtcccacggcttccaccacacaaatcacatttctacacgggccttgtgaggctcctctcctgtaaataaacacggtttcccctctgagcaggtctggtctgctccatcctacctcctccatcaaacagatggagcagactgccacagacattctgctgagtcagccattcaatcccataatccctcctgtttccaatgcaggtgacggagaagaatgtggacccagaagtcactctgctggccttcctgagaaagaactggacccttctgatcacagtttcagccatgtttatagatgccttgtagaatgtatggagtgcgttagctgctgcggttgtgaggtctccagccctgtcacccttgcctgcttttgcttttggcagtggctttaagaatatcagattagttgggctggtgagaggagaaagcttcccggcattgcttacgtgtgattgaatagtgtgaaatagaagctaagccgtacacttgggctctgccatccaccggagtgttacataatagaggcttgggttgcctgtgacctgccccttacaaaaccagattctcagattcagcaattggatacgacaatttcttcaccttacatctattttcttacaccagatgtccccaccatcttatatgctggaacacagctcttcataatgataaacatattttaattagtaagcccaatgaattgctcggggaagccaaaacataaataatgaaactcagggacaggagcaacagattgatgaaactgccccgaacaagctttgtgtgaaagcccacgtggttgctaattagccaccaatatttgaaagtcaaaacattttatgtttgaaataatcaagacttccatttgtcatggcaagtggaagggtagccagcctgtcacacagtagctgtgcttagagctgagtgaaaactgtcattggtcccctctctgaaataagactcagggactcgttttcccacccaggccctctttacttagataatacaactgaaccaccgtgaactgatgaaccaacagaacagagagagagagagagagagagagagagagagagagagagagagtagcaaggagttgatgagtttaaagccttttttagccacaactgatcaatcttatgtggaaacaggagaagaaagataaatgcagaggcagagcccagctttgggattatctggagagagttagaaagaaagatgctcacggtgggacccagaggcaagataacagacctagagactcatcacccacttcaggtgcaatgcagccagaggaaggctgggctattacaagccaaaattaataacgtattgagttgttaaaaatagttcttctccccacaattacatgaccagaaccagaagaagacaaaaataccttgtactgaagtagggtctgtctaaggagttttaccttaacaagatgtatatagtgagctcgcctgacaatgtaggtatcactccttcttctctgcaaatagaaacaagccagaatgggctagtttgcccgggaccacatagctaagcaatggcttctcagacagggtgtcatcccacaaagacctttcacactggtgacaccctaaggaagcagctagctcagaggcaaaatgtctgctttgcatcttttccttgacgccttccttcccagtatgcctcacaggaactaaggatgcgtgtggaacaggaggctgtggggcctgcacagtgatggtgtcacaacacgatccggtgtgcaagaagacaaggtagctacccagggtccagtagccaagagagaggtctatccctgcctgacttctgttctaccacataactaagaaagaccagatcctagtgtcccactgaaggaatccccaccaatgctgtgagccctttactctgattacgtaactatgctaacggccttctgtatatcacttctgaaacttgaacttcatccacatctttggttcaaaacacagatcccccaacatggttaaatgactttactcagagagcttaaactaacaagaaaatgaatgcagagtgcactagtataggcaaaaggcaaaaagcctttgcttgtgatgcggccattgctcaacaaagactaatagaagttcagccacccttctggtgacatgggtccttccccacttggggaaagggagtttaatgattaagagctctcaggggatctattttaaggctgtaaagatttttctggtattcaggatgtgtccaggtacacattaaggacccccagttctcataggtgtcatagaatgagcagagagtgctttgacttgctcttatctgtcacccctgccgtcttcccacctccccatttcaccagagctgtcacctctgcagtccctgtctcccatgccccccaacctggccatcagagttgcccttcttagttcctggttctccatggtgcaggactgtgtcactttacttggttttctttgtgtttcccacacaaagacacttctccgtcatggcatgcctggtgcccctgtgctccctgcatggggctgctgtcaccaccgtggaaggtgtgggaagcatcaagaccaggctccaccccgtgcaggtaagcacacattctaatcttctcacttctgaacttcactttgccaaaggctgtgcagactgtctgtcccacctccaccttctgggtcacaatgtaggagctttggacagctatgccaggcaatggtggtgcacacctttaatcccaatacttgggaggcagaggtaggtggatttctgagttcaaggccagcctggtctacagagtgagttccaggctatacagagaaaccctgtctcaaaataaacaaaacaaacaaaaaacaaaagagagagagagagagagagagagagagagctaaaacacaccttcatttgattaaatggtcatcatttattgcttcttctatttgaataatattaagattttaaaaaccttgtctgaaaccaatttaatataaactgaagtggatattgaacacaggctatagaatagatgcctctgaggggctggggatatagctgttgatagagcacttgcctaccattcatgaagtccttggaatggtggcgcatacttataaccccagtactggggaagtagagacagaaggagttccaggtcatcctccactacacagtgaggtcaaggccagcctggaatacatgagatgctatatcaaaaaaccatacccatggctggagagatggctcagtgttaagagcacttccagagaatccaggttcaattctcagcacccagttaggtcaattatatcagcttctaactccagtgcccagggggtctaatgtcctcttctgacttctacaagcactacacaaatatgttacacgtacatatactcatctattatccatatatatccatgcacacacacatatggtatgccctatcaacggccatatccccatcccctcagagacatttactctatagcctgtgttcagtatctactctagtttatagtacaattggtatcagacaacgtttttatgagataaaattcagggatcattccctgtagcataaaggtttgaggcgtaaaaatcagcatttggctgagggaagtctgagagcaactccctagaggacggggacactccccctccagcactcagcctgctgctgaagcggcagtgttgggttgaacggtgatgtgacatgtgctggcactgattctcctgtcattgtcgtgggagtttgggaagccacagtcagatcaaccaatgctcagggattttaggcaggagaagccccagggtttcttgatttaaccacttgagagtcaactccaaagaggtcagtaaagataaaggacccagaaaagagtctgctaggaagtcgtacaagacactcgcagctaagtccacacagtgggaccccaggcattgtgcactgaatctagagccaagcttccaagctttggtgttcacaagagtcacctggaacttgctaaaagttcagattctggccaagcagtttggagcagggacctgagttccccaccatttcccagaagaccatagatcacgcttgaaataacagagaccaaaatcctcggtccctgaaagctaagtcttttgagctgacacagaaaatattaaggaagacaacaggagatcagcaatggtctccatgtcagtcaaagccgcacagcctcccatgagatctaagccgtggaagatgtacgggtgttcaagaaaaccagttttgaaacttacgtgcaccctcctaataattactaattcctggataagtgttctcactgggagtgccggctgcacactgctaattcccaaacagaagtctcagagcatctgaccctgaaaagtaattaaagttgtgagcggtaacttctgaacctcttgcctttgggagctgcctagaaaggggaatatacagaactggacaacggggcggggcacatttgctcagagggtgagaatggtacagatttgtggaccctggagagaatctgaggcggcagatgtgaccacaaatgtatgcttccaggagaggatcgccaagagccacggcacccagtgtggcttctgcacccctgggatggtgatgtccatctacacactgctcaggaaccacccgcagccctcagaggaacagctcatggaggccttgggaggtaggtgtgacacaggaggcaggcagaaggaaaaggttcttcatgctttcccacaccaccctcaggatcttcctagctctgctccagtgccaagccacagtcatttctaacatttgtgtgcagacacagacgtcaagtcatctgcacgcggcccaggggccaccacacttctgtctgctgacttatcacatgctccccagggaccggaatccatgagcctacccaacaaagcacaactggctgaaaacacagaaagttctcatgcagttctgggagcattaagtctggagtcgagctatcggcccaccagtgctgtgtctgaaagccctgaagagactgcttccttattcctctcagccttattcctctcagtcagctgagtcttggcatttctgagctcatgagctacatagctccaaactgtttctacctcacacctttctccttgctgtctggcttatagatcttcctcttgtttacagacatcagccactggggtaggcccgccccaggcctggacaaccttgttacctcttgattccactgggagagatcttattattcaacaaggttatgttcatagttgccaggacttaagactacaaagagtcttggtagagcggcatatatcaattcataataagcctctcatctgaaagatttgtaacagttttagttttataaacatatagggttaataaacattatcttcaggtgttatcaatctgtaaacaagtcctcaattcaaaggttgaagacagatgaaaatagatatgctccttatgtgccagctgctgatctctctctctctctctctctctctnnnnnnnnnnnnnnnnnnnntctccccttctccccttcctccctccctctctcttgctctcgctagctctctatccttatctcttctttcaagtgcagaaaaccatagctgagcatatgatagagtagttattatgggcaaaagtcctgggttcaattcacaatataataataataataataataataacaataacaataatcagagaatcatactaattcatctaaaacccccaccttccccaggtctctcttcagcagctcatcagccctaaaacttgaccaagcccgatttgtcatacttcctgctctctacacgactcctccaggccagtctctccccatcttgttcctgctgctctgagaattctacccattctttactaacccatagcttgcacatcctttgagcccaaacttcttagtcaggccatcagagatgaactctagtctacactctctctctaccctcagaccttcaccttcatccttggaagcgtaaggattccagactttaccatgcaacagaatggcccactggtctcttaaatgcaggctctcctgcctgtctccagatgctcaggttccagaagggcagattcatgttcttaacaaatacaaccaggtgactctggtgcagtgacctaagagcctctgaggaacacacctggtagcccacccgtggcactttgtctgtctagtgacaccttggggattgctttcttaagatctcactgtcttacataatttaaaatagttattgtcaatagctaaacatcagggctaggatcatagctcagaagtagaatgttatcctagcatgtccaaggccctgagttctactccccagaactgacaagaaaatctgttagatctatttcggtttttaaaagaatccagtagagtggctggagatttggctcagtcattaggagagcttgctgctcttccagaggcccagagttcagttctcagcacccacatttgtggcttacaagcacctataacttcagccccaggaaatgcaataccttcttctgacctctaagagcatccacacacagacacacataaataccaataaataaataataatctggaaaagcaagcagtagagacaagcaattcacagctatgcttcccctctgatcagggaacctctgccgctgtactgggtatcggccaattctggagagcggcaggaccttctgcatggtgagtacacaagggtaaggaagtggagacacgtcatacggagtaggaatgagaagaacaggtgatcaaagctggggacacaagaatggggtttgtaagaccatcacaaccgactaaaacagacaaatgtcaccgcagaggggagggggaaagggcgaggactcattggagttgccagtgcttgctgtagaccaggtgagcattacaccacctttgatgtggtctagaaccacagaagaaagtcaggtgagctaagaagctgtctgtccgacactcaccaccagtgagacagggcatctatccagtgcagctgaaatgttgtctgtaaacactagaagtcaagccaggctttgctgttgtgaagaaggcttcttctgagaacccaagcaactgggaatgggaaaatagaaaaagaaggagaaattgcaacgtagaagctaaaattcactccaagaacacagggaacagcctccaaaaatagagatatctctctggtgaaaactcaaatgtcttgcttggcagttagtaagagctcaacaaataattactcataatgagaatgctgttgactgaatagcatttggcagacactcaagatggtgcatctgatgacgctctgctgaggacacagtggatgtggggggagacattaggcagaagcaaagggtacctcacatcttggaggagccccctgtagttcttacccagctattcaggagtccatagggataactcgatatgcttatctttttctggatcattctccatatagggcttcaactgtacctttaggctaggtactttagggaaggtcttaggagccaatgtgtgcacacaagttcaatgaagctccttatagagaaagagcagacactgggctggagtattcacaggagcatatgcagccactacagagccatatagaaagagaaagcagaagccacaggctaacatctctgtatgtgctcctgcctcagttccacatgccgtagaggtagacctggaaatatacagtgggtgtgtcccaaagccaggagggtattctggtcatgtgtgtcccagatttctattgccccgtgagggagccagagttgacacactaaaaagtggaataaagagactgtacactcagctgattgctgctgtaagtggggaagcatgagataccagcaagagtgctaaattaactcctttccctaagagtgtaggtactacctgccgctcctggaacacaggtgctggagataaagtccaaaatgagttccaatagctcaccctgttgccagccagtctcatgctacattaggtgaaagaaacccagccccaggtaggacacaggtttttattacccactgaacccaaagaagcacgattttcttcagcctccatcgacccacgtccatcctggggactctaagagcttatggtgggagaggaagggctggttgctctgccagctgcttttgcttcttggacagagtcagcaagtagcagcaaaagatatggggaaaggacagggaattcaaacagttgggaggaagtgctttgcaagacaggagagaccacctgaggaagcaggtacaaggagtggggttgcaagaaacagaaacggatgagctgcaagcagggaccacttaaaaactgccataactcacccagctgcattccccttccgtaaaggttccatatgaattaaatgagcaatgtcccaaaatatgtatgcgctgtagtggctgtatcatggttgtcctgaaaaataccatttaaaaaatgtattttaccactagtcattactctaaaatagctcagatatgtactttcaatgaatggtgttcatctactgagtacagcatagatatgatataaatacaatataatcccaaatatgtcaaaatgccagtgacctgggcagtgggtgtttctttacatttctgcacattgtgctattttatattacttgtttatatggtatgtgtttcataaactacctcataaaataagtaaataagcaaagcaagatcagccttgtgctatccctgtaagtagaaggtggcttcagagtctgaagtctcgtatagattgttcaaaccttcagggcacgaccttatttgcctataaaaagtattattcacatacagcacttcatgtcctcaggagccagacggttgtccacagaaaggaacaggacagtgttgcttggatcagaaggaaagtgactcatcgggaagcaaaagtgatgtgagtccctcggtctgttttgttctctctctgtgcattgcttaacgcccacctagctctggcagcgccgagcatgcataggcatttgatggacggctcccgctttgtttgcaaccttcccagcacttgcaggaagccccgcagtttgcaggtatgtagtgagcatagttgctcattcagcaatcacaatcggaccttccccttcatagacttcagactagaaaggccggaacaaaagggaaacaaaaacctcttagatggcagaaaagcatcgactgcatgaggtcacctccgtggttagaaacaagttctaaagctgtccctgctcacacagccgtcctcggtccctgagctgagacagagacagcactgtcagctggcaagctaagtccactgcagcattccagcctgtggcactatcatctgacagacattcctttttaaaagatccaccatcctgttctcacaggggtcgaatagagaggttaataagatcccagctaacacctcttaggctgtgaaagagctcagagccggcctgagaaaaaactgcctctcatcctctttgtgtgtgtctgtgtccttcagacccacctgtccacaagcacctcccgctgataccctttctttagtctaaagaaggggtgcggtggaataaagaggtgttacccgaggaggcgagctacacacccccaaagtgactcgaggaagatcaacacttggaagagtcaacacatcccaaagtccattccccaccttgcagactcaggcattcgggttgagcaccctcaggtcgggcgctaggtaccacttgacttaatgaagccaaacaccaagggttgtgtttaagctagaatgttcctcggtatttactcctaaggagaaacacaactataaagtaaaaccccatcctttcctcacagtcacacattctgtggagaaggctgagtgctcagtgacacggcagttcacaggggtgtccctgctgggtgacagaccaggtgtctgcctaggaccacctctacctcttactctctgaccatttttcatttggacaacggttaagtcttgctgttgagcctgtttagaacttttcatttctgcctgttgattcactgtctggcaactttgattctcacgtgaaatctttttttctaggttttagaaccaaatcattggccccaagtactgcccaagctacttctcacacaagaaaccaattggtccactgttacctcaccctgcaggggtacagagagtccgtacaaggaataaccatgtgtgctttctggaacctctcaaggcctcagaaagatggggggggggggggggagacaaggagtgggaaatgacaaatgtcaggccatttcatctaatcatcacaattaccctccaaaataagcattatctccacttactctttagaaaggttaagcacctttccatagaaaggtcggtgggggtgggggtgttaagagggaaccagacctgtcaaccctccaatgtctgtgattctctctctcctctatgcgcctgcaccccacaccctgcagctcagttctcctgtgtcctcaggttcctctcctggcaaggagagcactgaagcagatgtgagggagacaggagggcagttgggtccggttctgccctgcttccctttcctggtgggcaaaatgccaaaattcagattataacttttaatacaattgtcacggagatgaaataacactaacatgggtaaaagccttcaataaacagtcatgaggggtgtgtgtgtgtgtgtgtgtgtgtgtgtgtgtttatgcagaaagatatgtttagagtcattttcccgaaaactctgggacatccccagagcttgagattgttgaccatgatttgcaacagaggggacagtaagtacagtggaggttcccccaagctcctctagcatctgtttactttcacaagaagtcttggcatttcccaggatgctctttgtaagagtcaagacactcttccctctagaaccacattactggcaaccagccgctctctgtcgggcaatcccacccctattctaagtcattgggttacaacgagttcccaatagggggacgtgagagactcctactgcatgcatcctgccctaattccttaaagaatcccagggctctttccaactgagctgagctgacacagccatctgcttcttccttttataaagatttgcacgaagctatttgtgaaagacgagttccagcccttggacccgacccaggagctcatatttcccccagaactcctggtaagacaacacgggtattttatgtgcttgtttaaatctccagttatgaacccaattttgtaaatctaccacgtccttcaggtgacatgtcaaatgggagacgtgttgggtaggatccagaaacctacttcctcccatccctggctgaccttgggctttttaaaacccaacccagcattacttttaatcagtgtgatctgcaacacgtccctgttgactgtccaggccgttcagcttgctgagcgtcctccattgcacctgactgtcaggaacactgcctcttccctcctttgctccctgctttgggggcagtttcttgactgacagaaacaggggcacccagccccacccctcctccataagcctagtgagcgctctttctcaggcatcccaggccccttctataaaatacttttccctcttttattaaatattcatttctggtttcaatgatgtgtatgtcggtatgtctatgtgtgagtgtgtacacttgagtgtacacatgtgcccatgtgcccatgtgttggatccttggaactggcatagcagacattttgaaccactgccaagagcagcgtatgcccctaaccctctccagcccccttttctggggcaagaaaacattctgaatattttgaatgagaacatactcattcaaaaataaatacccatttagcaacacactgcattgttgtaagtactagctatacagtaaggaaggaagctaacagaagacactgccctaggagagcttgcaatctgggaagagaggtggacagtaagcaaaataatagatgactatgtaaactgggcacagtaccattaatccaagcactcaggaggcagaggcagtcggatttctgtgagttcaaggccagcctggtctacacagtaagttccgagacatccagagctaaggaaaaatcaaatcagcaagcagaggcaaggctagaacgcagatggttgtaattttcagtgctgtgtccagagaagatgcctctgaggaggtaatttctgaagaaactctagaaggaagagtggagtctgtcgtggggaggcgttctgggagaagcagccaggccttgggaatagcgagtgtgaacatactagagacaaaacgacagacagctggcctaatccggactcacagaaccagcctgaacagaacacagtaaagagggaaggtcagaagccgtcaggacgggccgtgctggacttaacattgcttggctttcccttgtgtataggaaaagccactatgagggaggtcacatagaagagggtcaagctcctactgccgtcatatcaggatgctttctgttgctgagccaagaacctcctaaagcttgaggagggggcagggaagaagcagtgtgctctgtaaggggatagccaccaccccaaagggcagaggctagacctttggtgcaggtggtgaggaccaagtagattctgggtatgcttgctgctggtgtgatgtcgagtgagagccaagcctgaccccagtgttatatgtagctagagggtaccagtttccagatggaaaaacctccagcggggcaggtcggctttcctttggtgttcttttccaagggctgagaaaggagctcagttagggcaaaataaatgtgaggtgcccctgacacatctaagaggtgacagacatcaagaattcactgagaaatgacataaatattaaaggaaaaaatccagactgatgatattaatttggggtcattaggattactgtgatataaaagccatgaaactgaattaatactgaattatccgaggctgtgcagtagtcaacggtaggcgctgacttatagggtcacttcttcccccaaaggccacctatttacatgaattcaggctttagccagtggatatagcgagtgtctttctggacaagtgtcccccagaaccttgaagtcttcctagaaggacacaacccacccagggcctgctgtggcccagagtggctggtatgtacacaggtagatatcctgtcatttgccctcagaggatggctgagaacccagagaagcaaaccctaaccttttatggagagagaatcacctggatcgccccaggaaccctccaagaactcttggtgctgaaagctaagtaccctgaagctcctctcatctcgggcaacacagccctgggtaagtggtcacagtctgcctggttgaacttcctggtccctgatccgttcccaatctgctgcttagagatgaaatattcacctgtctagcaaattcagtgactttcaaaggtgatggacatgcaccctagtagtattcaggatagctggggatgatatgagagggttttaaaaaaaaatgttttaattcattttatctcttgttcttttgctacggttaaatattaaatagacataaagaatgtcataaaatatttgtggatgtattaacaaacatacctactgactacccatagccatgttaataactttgcttcacacacatacacacacagacagagtccagtggtagaatgctaacctagcctgttcaagctctgggtttgatgcccagcattctccacaaacgtgtaattggtgttctaaccactggccttctgagaggcacagccattgctcctccctcccttccctcctgatgacacccctcaggtgaactgtttgtcattggtcagcctcttcctcattttttatgattaccacatacgtctgaattaactgaacaacgtgtcagttaattttgtatatactgtacagagactgtcgcttttactctgaaatttgtgtctttcagtcaacattcttgacctgaaactcatcccctgtttttgcacgttcatgggttctactccattatatgagcacggaaagatttgcccctccagtctgttaaaatagctccagctatttccagggcccccaggttttataaatgtctttttatttccatgctgtggatcaaacctagagcctcacacatgatcagcaggtgcttgacaccgagtcatatgaacattctctattttggtttggtttggttttttggggtgttttgtgtgtgtgtgtgtgttttgtttttgtttgttgttttggtttggtcttttgttgtttgttgttgttgttgttttgcttattttgaggcagtcaaaaaagtgttgtcactttgaccagcctggaactcactatgcaggccagtctggtcttgaactcacagagttcaaattcagctggctctgcccctgagtgccgagatcaaaggcatgcaccactactctcagccacaaacattcttagaagtatttccaggttctttggccaagcactggccagtcttatgtgtaagggagtttgaggagcctctcacggttttatttcctattggtctacatagcaggagtacaagtcagggaatgcatacattgggcagaggagtatatatatatggtcattgctttcacttccatacatatttattatcaaagtttaagctttgtgtctgaatgtttttatgagaaatgttcaatgtaaaagaaagggcatttttttctctctctctaaaatgtatttttttccttcaggaccagccatgaagtctcaaggacacttttaccctgtcctcctgtctcctgctagaattcctgatctaagaatggtgactaaaaccagtggaggtaagttccagccctgctaggaagtagtgaatggctaacctcggcagatcaccctcaggtacctatcttattagctccggcccatactgcattctttttctgaagtgaaagtgtgtctcctctgcaaacctcatggccaaagtcaaggttgtagccagagaccctccatactctttggccaagcactggccagtcttcccgctttctgacttttctctgataccaagtatcagtaaagtcagtaatgaaaataggttgttccataggaaagggtcacttttcctcagccctcctgtctctggggcccttatatgaggcacaattcaaaatcctcaacatagcttaatctttcccctatagatgaagaacctgcggtgcaaaaagaaaatgtgctcgcccaagggcatcaggttacaaggtcaccagctcacagttcagaagccccactgccttttcacattaactgcccagcttggtccctccgccaaaggaagccagccaggctctgaagtctgtgcaacttgtggccaatgactcgcttaaagctaaggcgtgagcaccctctagtggtcctcaggaaacttcctgtggccagcagtgtgagcaccactggggtgtctggaaccagctgtgctcacggcagcaccctcaggagtcatatatctctacaacagtcccacctttgatgtaaaggtctctttaaactacacgttcattcatatatccacagttggctcagcctaattttcttttaaaggcattaatatgaagtgtcccaaagtcactgctgatgggcccatgaggcatagagtcaaagtttaaaaccatatagaaacactgaggaggtaatgtgaacaatggaagcaccacaacaaaggcccagatggcctgtctggcctcggtcagagtatgaactcccgtgaggacagagctatatagaacagggagctggcattttggagccccgctagagggttgagctgcatggggttgttttgttgttgttgttgttgttgctgctgctgctgctgctgctgctgctgtctgtgtcaaaaccagaagcaggatcagggtatggtggctcctgccctcatgcctggaatcccaacaacgtggaaggatggagagggaggatcagaattcaaggtcagccttggcaacaagagactgactgtctcaaaaacagaaagcaacaaaaagccaaaagaggcagtgatgatccactctggtctctgtatttctggcttaaataacagcagtaagatgtttatacgatgttgtgtctggtttgtttttccctaaagagagccagggtcttctcgggacaatgaatcatttgacagagaacaaggttagctctactgggctcctgcagagatacagcaggcatttagggtttgagtatttgttgttggttttttttattattatttcatgtgcattgatgttttgctgcgtatatgcctgtgtgagggtacaagatcccctggaattggaggtacagacagttgtgagctaccatgtggttgctgaaaattcaacccagattctctggtagagcagccactgctcttaaccactgacatctctccagcccttgggtttgagttttagtttgcggttgggaagattatttggcttggtttggttggtttggtttggtttggtttggtttggtttggtttggtttggttttagaagcacagtttccttaggtagcccaggctggcctcaaaatcaccctgtctcaacttcccaagtgctggggttacagacatgtgccactccgtctggttaaggccagaggttttacagaagtgaacagtagattctaatagaaccactgggataaggaatcaacaggccataggtaggggttctgaggtgagaccagatctcataagaattatcttctatgagatgctgagacaggacaagcactccaggccgacattctgaaaatgagggactatttagttacagatttcaggtgagattttcttggcacatgaattactggtcttctccatccaggaagttaactgaggttagtgaaacaggggtcgggggtgaaggaggggagagagggagtgagagggtgttggcaaagacaaaggatatattgtgccaagaacatttaatattgacaaaatatagctatgtgggagggttgaatactctcagagatgaatcaacaagagaaaattaaaaatccaagcagaaacctgttaaaaatcagtctcacagcagctatccggggcctgcaagtgagctcaactccagccctgtgtgctaaggtttcattatgtaaacttgagagaggtgaaggatttcttttaaaaggtcaactctggttgtcttgggtgaccacatactttcctatattgatttgaacccttctgtcctactgaggagaaaccctgaagttcttgctcacatcctgccaatcctcacacgtttaactcccaactgttgtcaaaatgttgattactttctggtcagttggcaaggagcactgtgcctctcctcctgggtgctcacccacacagctcccttcgccccactcctgtgacccccgaacttccccacacccaacaccaccagccaatgggaagcctgaggcagccgctcccttgggatgtgtttgttttgattggccagtgtccttcatggaccgactcatgaaggttgtgatcatcagagttggaaaatctgcagtcaaaatgtgactgatttgattcttgtttgggtcatcttggcctaaattctcgagctattatatttagaaatgttttcaaataagaacatactgaaaggtcacacaaagtgggagtgatttacatggagaggttcacacggcctacctcatttcttgacaggtaaatagaagcttggcttgttcattacttgggttggtcgttcacatgtttttcctctaagaatcaccaggagcggttaatgtgctggtatcctgtcagattcaaattggcatcaccataaatcctgggagaaacataaagccagggagaaggtcactcatatttgtccgaacttcaagtttgtataaaaatctctttccttccaaaaagtaagtgttgattttagaccaagacctagggattcaaataacctttgccactgtgataatgttatcagatttattctccttaaccccatagtaatcatggtcgatcagaaggattatgggagttctagaaggatctaccactggcatgttgttgccagtacttcttctctcctatctctatttcttcacacttgttcaaagacaagtgcggccacagggtcccgtgcatagctacacaggagacagatcaccttggagcattttaaaagttttatagccagggccggggaaactggatcagctatctgggtcttgcaagcaaaaaggtctaagtttgatccccagaaatcacataaaatatctgggcaaagtaagacacgctataatcacaatattagggaagcagagacaggcagacccctgaggctcatgggtccaatcaaatctaacaggctgtgtaccagtgaaagaaaaagaaaaacaggattgccaaccaaggttatatgtacacacacacacacacacacacacacacacacacacacagcccagtccccagagactgatctagctgacatgggagctcctggtgaccctctgagctgccacaatggcagtcagcacactaaccaaatgttaagtgagaccctatagtgtagtgatgcaagctctgcacctcccatgccaacaaaacaacctgctcttccaggactgaccataggtgcctgctgcagcctggctcaggtgaaggacatcttggctgagagcatctctgagctcccacaggagaaaactcagacctaccgagcactcctgaaacacctccggagcttggcgggacagcagatccggaacatggcggtgggtctcccgctgggcacacacacatttctcatcattgagacaccaggataagccaaaaggtctcaatgagttgaaacgacagatcagttaacaaagacttttaaatcaataaatgatatttagtaaaacgtttaagaaaattctatatgaaatccaacacagtagctaagcaggaacacgggtcacaaaggccatcctgtttttgctaatttcttgacaaacctgtcaaaaagactgatttaaccttaggcttcattaacagaagtataggacctacagaaagccggccagcctttgactttgtactattaaaaccacagctggagactcactgacgtgaggttttgcaagcatgcatacatgcctttctccaacatctgctgggcggtgtaacagagatccttagaccctggggagtcagcagatgtcattgactctttgaaaactctcaagtgattccaaactcactagagcctgtcaagaagggggtgatgaatgagtttgggggttggaagcacatctaacggagagatcgggtcagtcaacgagagcataagagatgcctcccaacatacatggacccctgaggacagaactggccaagattcctcttgaccctttccgagaccctgaggggatcacaagcaaatgtcctggcctaaccaaaacactaaccaagatgttgctctctctctagtccttaggaggacatgttataagcaggcattgctactcggacctgaatcctatcctctctgtgggcaacaccacactcaatctgctgtcagaaggtaagctgcactccttatagagcctttgttttttgtttttaattacatttttaaggttttcttaaggaactgcattaagtagtagcctaggtcacagactcagttcaccatagggagcgactatcatgaggaaggtacattgtaccaatgggcagaggtgctttctgctgacaacacacacacacaccatatgctcatgtgttagttcatgtgttcttgcttgaccagggatgatgtgtaaaagctaccatgagagcaaggtttcaaggtcctggagacatgactcagaggttaagagtacacattgctcttacagagaactggaattcagttcttggcacccacatcaggtggctcacaagcaccaacaactccggttccgggggactcaacatccccagctgctgtgggcacccacgctcatggcacatgttcacagagacataaaactatgtatgtgtcatttcaaaaaaaataaaaaccagcctttcaatgaagtgaatgtggttagagaaatgggtctgcagttaagaacatgccctactgttgctgggcacctgagtttactccccagctcccatgtcaggtatctcacaaccacctgtaactccagttccaggaaatctgacgtctctagcctccaatgtcacccacactcacatgcacataaccacataaaacagctgtacgtaactaaaaataaaattagattcttttgaaaagagactaagaactaggcttggtggtgcacacctttaatcccagcactcgggaggcagaggcaggaggatctctggtctacattgtgagttccaggactatgtaaaaagactgtctcaccaaaaaaaaaagaggggtggggagtgggtaggttgcaaagggtgccttccttcagcctaagagagcaaggctcttgccttcctccttcaaactacatcctatctgagtcaccccctactgccctctattctcatgccaggagtctatcttagtccagagccttatgcatgtcaggcaagtattctaccacagctcacagcaatcgcttcatagtgttacaatccctattaaattccatgagctaaatgaggtgttttttttttaatgtattgtaccgtgtgtgtgtatgtgtgtgtgtgtgtgtgtgtgtgtgtgtgtgtgtgtgtgtgtgagagagagagagagagagagagagagagagagagagagtgtgtgtgtgtgtgtgtgtgtgtgtgtgtgatgcannnnnnnnnnnnnnnnnnnncagagaactggaattcagttcttggcacccacatcaggtggctcacaagcaccgacaactccggttccgggggactcaacatccccagctgctgtgggcacccacgctcatggcacatgttcacagagacataaaactatgtatgtgtcatttcaaaaaaaataaaaaccagcctttcaatgaagtgaatgtggttagagaaatgggtctgcagttaaaaacacgccctgctgttgctgggcacctgagtttactccccagctcccatgtcaggtagctcacaaccacctgtaactccagttccaggaaatctgacgtctctagcctccaatgtcacccacactcacatgcacataaccacataaaacagctgtacgtaactaaaaataaaattagattcttttgaaaagagactaagaactaggcttggtggtgcacacctttaatcccagcactcgggaggcagaggcaggaggatctctggtctacattgtgagttccaggactatgtaaaaagactgtctcaccaaaaaaaaaagaggggtggggagtgggtaggttgcaaagggtgccttccttcagcctaagagagcaaggctcttgccttcctccttcaaactacatcctatctgagtcaccccctactgccctctattctcatgccaggagtctatcttagtccagagccttatgcatgtcaggcaagtattctaccacagctcacagcaatcgcttcatagtgttacaatccctattaaatttcatgagctaaatgaggtgttctttttttttaatgtattgtactttgtgtgtgtgtgtgtgtgtgtgtgtgtgtgtgtgtgtgtgtgtgtgtgtgatgcatgtcactgtgcacaagtgtcatcagacttggctgtaagtgccctttccccctaagccatctttctggacctaacttttgagcgagactagtactgaaaccttagcagatgtgaaccactgtccgtctggcttccattcgtctccccatctcctcagaccatcctgccctgtccccagggcttctagctctaaaatgccttcccttttcctcgctgaatacctgactagccatccattactccgtcctctgtccctcccactccctcggcagatctccctgcctccacccaggcacagggatacagaggaagtagccacagccactgcccctgtggacttctaggctccctggggtgtttaatgctgtcactcactgctcagagttcagaggtgatgaggagagacttgggagctgagaaaaaaatgcttaggccccactccctgattgctttcacatgaaacctactaagaaggagaccattaaaaggttaagtgtgctggtggagctgggctcctctctgaggacaccaggcctgtagtttgggatgaccccagtataacccacaaaacggtcaagaagccaaggctctggggataccaagatggtgaggtaccttctcagggtcttctgttatcatgatggtagcaatgttctattgggtatttgtagttacctttgatttatggtatctgccttccaaactctgctgaagctggcacagacctccatcactccagagaaggcagggtctcagctcacggacttagcagcaagggaggcaggcagtgatgagcggtgactttgctagctttccaacctgcacagagctcatgccatccctgggctgtggcttgacctcttcaggattcatcctataccagtggttcccaaccttcctaatgctgcacctctttagtacagttcctcatgttgtggtaactccccacccacccacccacacacacacaccataaaattatcttcattgttacatcctaactgtaagttcactactgttatgaatcgtaatgtaaatgtctgtatttcccaatggtcttgggagaggttgagaacagatatcctttaccttaaaaaatgcaaaccatattttaaagccggaggagagccctctggtcccaagaagtgatagctgagcccaagggagatttgacaagttgtttaaaggtatgtttgcgtcaggaacacaaaactgcagtaagtgtgaaaagcagataactgcttacagtgagacccagtgatctcataagttatacctcagccttgaccctccgtccgtggttcatttagttagctagcctcgctgaaggatgaaaaccaacagggtggtgggtatggcatgagtgttgacaggaaaacaaatgtcacgcacagtggaaggaaaggggacactggacagtttcacagactgggacctctgcctcagtctctgtgaacagaggtcatatgccttctcctctggcagccaacctctgaaggtgcggatggggcttgcttttctcacggctgtcctgaaatggcatttccttccacagaaggcccgcggcagattcccctcagtggacattttcttgctgggttggcaagtgcagacctgaagcccgaggagattctggggtctgtgtacatcccacactctcagaaggtaagaccctggctggttgccttgacgttgtttcttcccgttgtccatagtgaagtcatctctgctatctgcagacagtcggaaggagcgtaaccgtgcccccaaaactgtttcctgacccactgcaaactggttcagcaataaacctctggggctggcctgcacaagtgctgctggatgtgggttttggttgttgctgcagctgtggggtgtggcccgcagccttggggtgtggcctgcggaagcccacaggaaggcctgtggccacgctcccaagcccacttgtttccataggtgaaggttctctggctgcagatggagcttctccacttgacacacaggaagctggagccctagacttggctttcccagccccacatttctgccaaaccctacagcacatagaaacacaaggcctccagatgttccctggtccaggataccacccagctagctatgaaggtggccttctgccctctctgttccataggcctctttccaaaagctgtgcttgactctaaaagaagcacaataacacacacacaaacacacacacacacacaccactcacaggtcataatgaagtcttaagtttcatttcagctatggataatctttggtagtccttcctgtggaacagaaactttggcatgcaaaggtagcagatagaaaaatggtgtatcgtcgaattagagggctcagcagctgtgaccacctgtcgctcttacagaagacccggggaaggaagaaacctggcttttcattctgaaggagtggtttctgtctcctcagcgggagttcgtgtctgccttccggcaggcccagtgccatcagaacgccttgcctgatgtaaatgctggcatgagagtcctgttcagagaaggcacagacgtcattgaggagctgagcattgcctatggaggggtggggcccaccaccgtcagcgcacaaaggtcctgccagcagcttctgggccggtgagtcatgaactctgtgccttaaagggagcctcaatgacaggacaaagaattggccctgacaactggaatgacagaaacttggactcaaaagaaccactgcttcttccttctttagttttgctgacttaattccacattatttggcttcaattaggccacttttggggagaggacacaacaaaaatggcctgtgttttctcatccagcccctgtttctcctgcaaatggacacccagccggcctctctgtggggcactcaatgctcctaccatagggttcacactttcttcctaggtaaagggcattcaagtgtgaattctgtgctgctctagaatattctggaatggttctagaatattctgactccaaaacatgcttgatttatgctgcaatggagaaggcaccattctcactcagccatgattcttgtgcctcttggagcaacccgcaggctttgttttgtccatcgtcccttgtaaacagaaattctaagggaaaccctgggaggggggggggagtctctaaaatgtcggttccctgcaatcaggccacctttaactggttcttcttgcctcacacggtgccaggcgctggaacgcactgatgctagacgaggcttgcagactgcttctggatgaagtctcccttccaggctcagccctgggaggcaaagtggaattcaggaggactctgattgtcagcctcttcttcaagttctacctggaggttctgcaggaactgaaggctgaccagaagctgcccccggagtccaccgtaagtgcgttgggggacagtgacagatgctctcacacacgatcatggactcacagttctgaggccaggaggccttgaccaaggtgccatcaggaagcagagtaaggtgactcaaccttgcgaccccaacatttgagaggctgaggcagggagatcacaaagggctcaagttctgtctgagctacagagagctgtctccaaataaaataaactggaatccagagctgttatcagagctgatgcggatcctcctgagaactgtgaggctctactctaccccctcgcctggcttctgctggcttgctggggacgtcccctggggatgtctgctggggatgtttagggttctttagcttgtatgtatcaccctgctaatgccttcacaggacactgcccctgggtgaatgtctatatccaaatttctcctcctaagaggatatcagctataacaacagccaattctaatccattagcgctgtcgtaaacctcagctcttgcttggagaggtcacacttgggaggacggaacagaacaccagcttctgtcaactccttgcttcaggagttcttagctttaccactgcttttgccaattgtcctgtggagagcctgttaccattatctctcctctgttcctgggaagcctttgtcagtcctgggattcagccttgaaggcctgtcaaagcacctcggctctccggtgttcatcgtgccccagcacagaactgttactaggcctgtgtctctcctctgtgattttttttctcttaaaataaactttattgaagcataatttgccatgaaacaagagacaaataataaatatgtaactaaacccacctgtttaaacttgatgcacagatatactactgtggagccaccagctcaaactaaatacaacacactttcatcaccccggagaatccccacgcccccttccttcatccccacccccatccaataaacattaatctcctgtgtgctactaaagcttcattttgcttactctagagttttgtaatcaatatgaagttgtaaattcaaattcttatgtttcaaaagacaagcactggcatgtctactaacatctacccagctctctaggttttctgattgcaaacgtctggaatatgttaatgaagatatctacactcccacttgttcctcctgccttgtccctgttctctctcaaccctcccccaccacgcaattctcacccttccctgtcctataaccctcagccacccccaccctgtggctactgtccctaatctctgacttcatttctcagtcaggataccagagcagctaggatactgaaaaaaagtcttcagaatctttttccttgtgtgaaccatgagctctggcttattctgggatggcgtatccagcctagagttttttcttttcctttttttttttttttaatttatttattttatgtatatgagtacactgtagctgtactgatggttgctgggaacttgaattcaggtcctttgctcgctctggccgaccctgctctcttaggtccaccgtctggagcctaaagatttatttatctaggtcttcagatgcaccagaagagggcgtcaggtctcaatacaggtggtgagccaccatgtggttgctgagatttgaactcaggaccttcggaaaagtagtcagtgctcttaactgctgagccatctcaccagccctagagttttcttcctaacaacccctgctttctcccacctccaagttcagacctttccctccaggtacatgaggatcagattcaaaccagtcacccaagtcccgtcttggatgggagggtgggagggcaccagggttataagaagtgaaaccctggcagggtaactaggccaccctcagcacattaggagccggttttcataatccaaacccagcctgaaccagactaaccagtctctctcattgtgccgtgtgatcccaggacagccagcgttatccagagatcgcagaccggttcctaagctctctgggagatttccaggtcacgctaccccggggagtccaaacataccaggtcagtgagtttgatttcactgaaacctacactgagagataagagagagctgtgtgggccaggcaacctattcacttgagtaacttttagttctttctaattattcctaattcaaatcagtagcctctggcccccaagagctggtgctggagggcacaaggctgcactgccagactgatctgcagacagacagtcataattactctaaagtgatattctttgggtatttgttaaatacctacccagaagagtagctgagcccagaggttcagtctctagcccaaactgcacatttttaatctccagtcagcaaacaagaggccttgcaagtgactgcactcatctttcttgaagaaccatttagaaaatagctgttcttgcaggtacacgccctgagagagagagagagagagagagagagagagagagagagagagagagagagagagagacatggctctcctaggtgtgattgaggaggtagagtttattgtagctatgagggaaagaacagccagaggcttctgaaagggtcaacactgaaccggccatgagaaaggggagggggaaatcaaaacaggagagaggaggggagaggtaagggaggtgaagggggcctaagagagaagccgaagaccaagagaacaaaagcggcagtggctgaggttacataggaatcagagaagctgggcggatgaagaaagcccagggagaagctgagaagagtagagtgtggtgtgccagccagcatgactctggaacaggtactgcctctgtgagtagggaccaggcatggccagagcctgctttgatatgttaaatgggcacctcagttagccatctgtccacagttagacacctaacacacacacactcacatgcatgcacccattcacatgcacatgtatgcacgcacatactcacacacgcacacaaccacagatacactcacacacacacacactcacatgcatacacacatacatacacacattcacatgcacatgtttgcacgcacacactcacacacactcacatctacacacacacacacacacacacacacacataaccagtgcaagcgtctcagagaaaagtcccagaacaccctctttcaacaccccgctgggtctggagtatcccgtgccagttccacccccatcaagtcttctcactcaggctttggtctctctccgaggtcatgctgtatcacataggcctcatcagaacaatgaacataagcaggttggtcattggaagcatgaggacagtgccccactctagttacgtcatgaaatggccgtgctcatcttctgactcactccgatgtttgtgacccacggggactgtcccatgcctcctccccgagtcagaaggccacctgaggtgaaaggttcctgggctaactctctcttcctctctagagagtagattctcaccaacctctccaagatccagttggacgtcccatcatgcacctgtcaggtcttaaacatgccacgggggaagctgtattttgtgatgacatccctagggtggataaagaactcttcatggctttagtcaccagtaccagagctcatgcaagaatcatgtaagtaaatcaaagcttccaaaatccttttaaaggtacagttaaccctgagattcatcagagaaaaaccaactctaccattctgggccaaattaaagcaagctttaaatgccgaccaagagatggactttggtcaggaatttcacatgtgaaaatggtcctgaggtgtagcagcaccttaaaaagacaaacctataggtcactgtactttcccatgaggctttgatattttctaagaactacaactcccagcattccaagaagttgcctggtccttgagcaggtagggtttacgggttaattttagagattacagtatacctggggatgccttatgggaatatgcccttttctgcaatgccctgatccaaagagctccaagaggaagaaaaatatttagaatagactgtcctgtaaacaaacaaacaaacaaacaaacaaatcacaggggctgaggatgtaggtcggttggtagagtgctgaaacactctaccatgcacaaagcctggtgtgcaatccccagcaccttagaaacccagcatagctgtaaactgcagtgattccagtactcaggaggtagaggcaacaggatcagaagtgcgaggtcatcctcacatagctaattccaggcccatgtgggctacgtgagacctccagcctcctgcatgactcagagccaccctgatacccctaaatcgccagcctctttactgaataggaaataaatactgtcatacatttccaaagaggactggtctcactgcccctccccggcagctggagcattgcatcctggccctgcagcaggacccccagacactactctatggcaggtttaccctcattgctaaagacagattgacagatgatttaattttcaaccatgtccttcccttgggtttgaggccctcagcattcgcacatatctccttaactctctccctgtgttcagatcaatcgactcatctgaggtccttgacctgcctggtgtggttgatgtaataacagctgaagacattccaggcaacaatggtgaagaggatgacaaattgctggctgtagataaggtatggatgggctgtgctctcccagtcgcctgtgcagatcacccaaggaccctgtcagtcacctgacctagcaccctagatttttctgccactgagatgccgactgccaagatcctggctcctctttcccaagtgccaccattctaccttgcttttctgaagttgggaaataacacactagaccaaaactaatcacagatctgattcagccactgtgcacctctgaattcatttgcccttacctgaaaagtaaataccaggaaatgatctatatcaggacagaatgctctagaaccatgattctcaaccttcccaatgctgcaactctttaacccagctcctcataaaattatttaattgatatttcataactgtaaatttgctactattattaatattaatgtgaatagctgctatacaggatatctgatatgcaacctccagaggggtcgagacccacaagttgagaactgctgccctagaaagatctagaaaggaggtgaggggggccacagccccaccctctaatttacagggagctctctcccttcctaaacctgttctctcaccagacctctctttcctttgtgtgctctatttttaataagttgtcttggctgtcactgggcttttaattcatattcagctatcgtttacaggccaccctgacttggggccagagcatttccacctactgtatgccctcggagtttaccatctctaaaggaggaataaccatacacacacatcattgtattgtaggagttaggcaagtgaacacacgtgaggtgtctaggacaatggttggcacatgaagtgctggctattgtcactactgtcatacttcaatcaaccccacattctttttcctcctggtgtagaagacatcagtgagttgtttgtttgtttgtttgtttgtttggatggatggatggatggttttttgttttgttttattattgaatccatcaggagaggttgactgtcatatagcaggctattggggctgccataataaaactgcctgaccatgggactggatatgggattcatggttaagagctgctcttcctgaagacatgggttcaattcccagcacccacatggcagctcacaactgtctgtaactccagttcccctgtatccgacttgttattctggtctctgggggcactgcacgcatgtggtgcacagacttacatgcaggcaaactacctatgcacacaaaaataaagttaaaaaaatgcacagtgagaggctgaaagtgaaatggcttttcaaagctctggagctgagccaaagccacagtgtcagcaggtctggcttctgcggtctcttctttgcttgctgacggctgcctgctccttgtcttttctctgttcactcttccctctctttagctcactggtcctattgtacaaaggccccactccttgttaataacctctgtaaaggtcctgtcgccaaatgttatctcataggtgctgcaacacagtcagttgttgactgagtagtttgtcagttcatggcagggtctaccacatacgctgcaagctcttacatgacaggatgaagaaagaattcatgtgaacacatcacaacaggggacttgcttggtttgtgttacagtcaacatctgggacttaccctcactgaatacagtggccagtgggtggaacctataatctgcactttggtgctggaagtctaatcacgggtctcacacacactaaggcaagttctggatcactgggtacaacccaagaccttccgttttcgttatttttaaatttgtacccaagcacatgtaacttcagtgtggctatttctattcaacaatgacatccaagacaccaactaccgatgacattgagcttggcttctgttctatttgctttaaaattacttaaattggttggttcgtttatcactattacggtgtggagagtgggaggtgtggagggcacatgtggaggagttgtttctatctccaccgacctttatgtgggttctggggattgaacccaggtccccaggtttacagagcaagccctgttacacactgagccttctccctctgccttctttatggtgctctatgtttctgtatgtacttcacaggtgctgtgtgtttatgtatgtactttacagatgctatgtttacatatgtactttacaggttctctgtgtgggccaggtcatctgtgccgtggtggcagagactgatgttcaggcaaaacgagcaactgagaagataaaaatcacctacgaggatctgaaacctgtgattttcaccatcgaggtaagctgggctggtcaggctccttctaagattgtaaagccaggcttgagagaaggctcagtggttaagagcactgactgttcttacagaagacccaggttctattcccagcacccacatgacagcttacaagcatttgtaattccagttccagaggatctgacaccctcttctggtccctgcagataccaggcatgcacctggcacatagacatacatgtgggctaacattcataaacataaaacacaaataaatcttttttttttaattgtgaggtcgagagcatcatcataaatgttagaagactagctcaaaaccttttcccctgcttgcactggaaaaaaaatcattttgctttggaagatattacttgtatgagatgaaattagctttggcttcaagaaacagaaaaaaaccaatcagaataaaagtttcactcttccattcaaaggcctagaactaaccaggcctggtggcagaggcctatattatggctgtggagcctgctgaggctcacaaattatactgaggcaggttggtgagacattgactcaggacaaaaagtaagaaagacaggcccgtcggtcagtgaactctgtggtagaatgcttgcctactgacaagagaaaaggaaaatgactagaagtgatctacccagggcttatatgatgtgctagtctgtttacatctgtgcacactgtttacatggtatgttttgtgctgctattacagaacccccaaggttgtgtaatgaacaggaatttatttttcatggttctaaggtctgcgaagtccaaagctgaagggctgaatctaatgctacatgattccagactgtggaggggaaaagcgcagagaaatgcgctttcataacaaagctgttccaccatggttattacaataacccacagagctactgagcccccattacctaggcaccttgtaagggtcccacgtttcaagactgttgccttgggagtcaggctgggtgggacacaagccacagcctgtgagctgtgtgtatccagaatccagcgccttcgaatctagtctctccgtaacacaaggtttgcattctagcagctactgacgctttggccattaaatccacattccagatagcaaaagggatgaaaatgggtaagcctaatggctctttgaaaaaggcccagacagggcctggagacacatgcctttgacctcaggacttgggcagtagaagcagacggatctctgtgagttagggatcagcctggtcttacatagtaagttgcaggagatccaggactacatagagactcattgtctcaaaaaaattaaaattatttcccatcccttacagggagatgtgtgtattggcatgccttactatttcattggctagaaggcctgcatctgctgtacgtaactgccaagagagccaggaagcacatttttactccagatggcatgtgtatcccccaaagacttgggaccctgtttgttgaggaaggtggtgagagtggaaattgggaacaatatgtcttcaaggtagagactaaaggtcatgagaatttcataatgaaattctatagaaattttcactctcatttctgactctcagtggtgggatttaagttatatctgaagataataatggtgtgagaacatagaaaattcaagtgcagcctggtgtggtaatgctgtcatcacttaacaagcaagataaataagataaataccttataggatagacagtttctctggctcaagatttagaagtttcaattcatgctttgctgggtaataaattgtagtggccacgcaaaggtaaacaaaagtgttcccctcatgtctgggacaggaaaggcagaaaaggaagagaccaagtcccacagttcactttgagggcatgcctccaataaccaaaactctccaggagcctttgctggttaaaagttttgtcgttctcatgctgggaccatgctgggagagttgccaaactagagactgagctccatctcatgggtgttttcagtacatcacagacccaaattatagcaacttggacttgcattctctaactcggcacatcataatcagagaaatcaggttgagagagaaatcagcttgtttctgggcttgcaatatgccatagatggtatgcatagatggactggggaaccatggggacagcttgaaatgtgcctgaaggatactagtcttgcaatgtacagagtcatgaaggcccagttgttagtctttctacaccaaattcccatctgccaagtgggcaagggacgagggttttcttggttggccctccctctgacttgcactggaatcctaacgtgggtttggttttgttgttttatttccatttgaactctactttcctgaagggggaatagcacccagaggacacattcatgacccttctgggactcagaatagttagaggtttaaattgtcttcagaataagaatgtctaaagtgagcaaataattcttgcatgaccaaaggcaggaaacaaaagccatatatgccaagagtaacatatacatgtatatatgtgtgtgtatgtgttgtgtattgtgaatgttatatatgatatatatgataaaactatataaaatatatttataagagagacagtgtatcacacaggtactagatccaagctgacaaattttaattctaactgtgcggctttctacctgtgtgatcttaggcaaggagtttgtttacacccttgtgcgtggcttactagcctgtaaaaggggagtaatgatatgcatctcaccaagtcctgagaaatgagttagtgaaggtaaaacagagcagagtctaacttaccgtgctcactcgatggagttcatcgcatcagaaggccgcaagtcttttgacacacattgcagcaataaacatacttctgtgtttgccgccacgacttatggaggtcaaagtgtgtgctggagagttttatgtcaagttggcacaagctacagtcatctgagaggagagaacctcaattaagaactgcctccccataagatcaggccgtaggcaagcctgtaaggcattttcttaattaatggttgataggggagggcccagcccattgtgggatggtggtcctgggttctataagaagcaggctaagcaggtcattaggagcagcaagtcagtaagcagctccccactccatggcctctgcatcagctcctgcctccaggttcccacatgcttgagctcctaacctggcttcctttgatgaagagctgtgatgtggaaatgcaagccagataaacccttgcctctgggtgtcacgtgcttggattaaaggcgtgcactgctacagccctcgaacttcctgggtctgagtgagcctccgtttagagcatcctgactcattgattcagagtgtcctaagttcctctgccttgtagcatttatcaactcaggggaagctgctatgcaacagttcgtcacgctattaccactaacaagaaagaaaggctttctaatgccagaggactctaatgcctttgggttccaagaaagcaagaagcaggtgtcattgtgaagtgcagaaggacggactggatcttcagggttagcaaggattggctgtggtaagtcagttcaaagaaccaacgaggagaatggctactatgtgggagtcacgctagtgtcagagagtagaggtgaggaggaaggaagtgcagaagagcaaaagtctagaaaggctctattgaaatatgtcaaatacccaaaagaatgacaacatatactgggtcttgcccctatcagagtttgaggacctgtgtcctctccatgaacacagcctcagccttctcaaaatcctgagtgaagaagggattcacacatatagctacctaagtatctatctaacacttttttcctcagggagaagtggaaaaagaggactcagaggcttccccctggtgcctgggcaccagccctagagacccatgctaaaaatgagcaggtgtcatccagtggaccctcccattttgtccaggcctcagttctgaaaatggcttccttctttttttttcttcttttttttttattacgtatttttttcaattacatttccaatgctatcccaaaagtccccccataccctcccgcccccactcctctacccacccattcccattttttggccttggcattcccctgtactgtggcatataaagtttgcctgaccaatgggcctctctttccagtgatggccaactaggtcatcttttgatacatatgcagctagagtcaagagctctggggtactggttagttcataatgttgttccaccgatagggttgcagatctctttagctccctggatactttctctagctcctccattgggggccctgtgatccatccaatagttgactgtgagcatccacttctgtgtttgctaggccccggcctagtctcacaagggacagctacatcaccgtccttgcaacaaaggcttgctagtatatgcaatggtgtcatcgtttggaggctaattacgggatgattccctggatatgacagtctctagatggaccattcttttgtctcagctccaaacattgtctctgtaactccttccatgggtgattgtttccaattctaagaatgagcaaagtgtccacactttggtcttcgttcttcttcagtttcatatgttttgcatattttaccttatatctcactatactaagtttctgggttaatatccgcttatcagtgagtacatttcatttgacttcttttgtgattgggttacctcactcaggatgatgccctccaggtccaaccatttgcctaggaatttcgtaaattcattctttttaatagctgagtagtactccattgtgtaaatgtaccacattttttgtatccattcctctggacatctgggttctttccagcatctggctattataaataaggctgctatgaatatagtggagcatgtgtccttcttaccggttgggacatcttctggatatatgcccaggagaggtattgcgggatcctccagtagtactatgtccaattttctgaggaaccgccagactaatttccagagtggttgtacaagcttgcaatcccaccaacaatggaggagtgttcctctttctccacatcctcgccagcatctgctgtcacctgaatttttgatcttagccattctgactggtgtgagatggaatctcagggttgttttaatttgcatttctctgatgattaaagatgttgaacattttttcaggtgtttctcagcctttcggtattcctcgggtgagaattctttgttcagctctgagccccatcttttaagggggttatttgattttctggagtccaccctcttgagttctttatatatattggatattagtcccctatctgatttaagataggtaaagatcttttcccaatctgttggtggtctttttgtcttattgacagtgtcttttgccttgcagaagctttgcagtttcatgaggtcccatttgccaatcctcgattttacagcacaagccattgctgttctattcaggaattttttccctgtgcccatatcttcgagacttttccccactttctcctctataagtttcagtgtctctggttttatgtgaagttccttgatccactaagatttgaccttagtacaaggagagaggaatgggtcgattctcattcttctacatgataacaaccagttgtgccagcaccatttcttgaaaatgctgtctttcttccactggatggttttagctcccttgtcgaagatcaagtgaccataggtgtgtggattcatttctgggtcttcaattctattccattggtctacttgtctgtcactataccagtaccatgcagtttttataacaattgctctgtagtaaagctttaggtcaggcatggtgattccaccagaggtacttttatccttgagtagagcttttgctatcctaggttttttgttattccagatgaatttgcagattgctctttctaattcgttgaagaattgagttggaattttgatggggattgcattgaatctgtagattgcttttggcaagatagccatttttacaatgttgatcctgccaatccatgagcatgggagatctttccatcttctgagatcttctttaatttctttcttcagggacttgaagtttttatcatacagatctttcactttcttagttagagtcacgccaagatattttatattatttgtgactattgagaagggtgttgtttccctaatttctttctcagcctgtttattctttgtgtagagaaaggccattgacttgtttgagttaattttatatccagctacttcaccgaagctgtttatcaggtttaggagttctctggtggaatttttagggtcacttatatatactatcatatcatctgcaaaacgtgatattttgacttcctcttttccaatttgtatccccttgatctccttttgttgttgaattgctctggctaggacttcaagtactatgttgaaaagatagggagaaagtgggcagccttgtctagtccctgattttagtgggatnnnnnnnnnnnnnnnnnnnnnnnnnnnnnnnnnnnnnnnnnnnnnnnnnnnnnnnnnnnnnnnnnnnnnnnnnnnnnnnnnnnnnnnnnnnnnnnnnnnnnnnnnnnnnnnnnnnnnnnnnnnnnnnnnnnnnnnnnnnnnnnnnnnnnnnnnnnnnnnnnnnnnnnnnnnnnnnnnnnnnnnnnnnnnnnnnnnnnnnnnnnnnnnnnnnnnnnnnnnnnnnnnnnnnnnnnnnnnnnnnnnnnnnnnnnnnnnnnnnnnnnnnnnnnnnnnnnnnnnnnnnnnnnnnnnnnnnnnnnnnnnnnnnnnnnnnnnnnnnnnnnnnnnnnnnnnnnnnnnnnnnnnnnnnnnnnnnnnnnnnnnnnnnnnnnnnnnnnnnnnnnnnnnnnnnnnnnnnnnnnnnnnnnnnnnnnnnnnnnnnnnnnnnnnnnnnnnnnnnnnnnnnnnnnnnnnnnnnnnnnnnnnnnnnnnnnnnnnnnnnnnnnnnnnnnnnnnnnnnnnnnnnnnnnnnnnnnnnnnnnnnnnnnnnnnnnnnnnnnnnnnnnnnnnnnnnnnnnnnnnnnnnnnnnnnnnnnnnnnnnnnnnnnnnnnnnnnnnnnnnnnnnnnnnnnnnnnnnnnnnnnnnnnnnnnnnnnnnnnnnnnnnnnnnnnnnnnnnnnnnnnnnnnnnnnnnnnnnnnnnnnnnnnnnnnnnnnnnnnnnnnnnnnnnnnnnnnnnnnnnnnnnnnnnnnnnnnnnnnnnnnnnnnnnnnnnnnnnnnnnnnnnnnnnnnnnnnnnnnnnnnnnnnnnnnnnnnnnnnnnnnnnnnnnnnnnnnnnnnnnnnnnnnnnnnnnnnnnnnnnnnnnnnnnnnnnnnnnnnnnnnnnnnnnnnnnnnnnnnnnnnnnnnnnnnnnnnnnnnnnnnnnnnnnnnnnnnnnnnnnnnnnnnnnnnnnnnnnnnnnnnnnnnnnnnnnnnnnnnnnnnnnnnnnnnnnnnnnnnnnnnnnnnnnnnnnnnnnnnnnnnnnnnnnnnnnnnnnnnnnnnnnnnnnnnnnnnnnnnnnnnnnnnnnnnnnnnnnnnnnnnnnnnnnnnnnnnnnnnnnnnnnnnnnnnnnnnnnnnnnnnnnnnnnnnnnnnnnnnnnnnnnnnnnnnnnnnnnnnnnnnnnnnnnnnnnnnnnnnnnnnnnnnnnnnnnnnnnnnnnnnnnnnnnnnnnnnnnnnnnnnnnnnnnnnnnnnnnnnnnnnnnnnnnnnnnnnnnnnnnnnnnnnnnnnnnnnnnnnnnnnnnnnnnnnnnnnnnnnnnnnnnnnnnnnnnnnnnnnnnnnnnnnnnnnnnnnnnnnnnnnnnnnnnnnnnnnnnnnnnnnnnnnnnnnnnnnnnnnnnnnnnnnnnnnnnnnnnnnnnnnnnnnnnnnnnnnnnnnnnnnnnnnnnnnnnnnnnnnnnnnnnnnnnnnnnnnnnnnnnnnnnnnnnnnnnnnnnnnnnnnnnnnnnnnnnnnnnnnnnnnnnnnnnnnnnnnnnnnnnnnnnnnnnnnnnnnnnnnnnnnnnnnnnnnnnnnnnnnnnnnnnnnnnnnnnnnnnnnnnnnnnnnnnnnnnnnnnnnnnnnnnnnnnnnnnnnnnnnnnnnnnnnnnnnnnnnnnnnnnnnnnnnnnnnnnnnnnnnnnnnnnnnnnnnnnnnnnnnnnnnnnnnnnnnnnnnnnnnnnnnnnnnnnnnnnnnnnnnnnnnnnnnnnnnnnnnnnnnnnnnnnnnnnnnnnnnnnnnnnnnnnnnnnnnnnnnnnnnnnnnnnnnnnnnnnnnnnnnnnnnnnnnnnnnnnnnnnnnnnnnnnnnnnnnnnnnnnnnnnnnnnnnnnnnnnnnatcagccttaggccatggtggtctggtaggatacatgggacaatttcaatatttttgtatctgttgaggcctgttttgtgaccaattatatggtcaattttagagaaggtcccgtgaggtgctgagaagaaggtatatccttttgttttaggataaaatgttctgtagatatctgttaagcccatttgtttcataacttctgttagtttcactgtgtccctgtttagtttctgtttccacgatctgtccattgatgaaagtggtgtgttgaagtctcccactattattgtgtgaggtgcaatgtgtgctttgagctttactaaagtgtctttaatgaatgtggctgcccttgcatttggagcgtagatattcagaattgagagttcctcttggaggattttacctttgatgagtatgaagtgtccctccttgtcttttttgataactttgggttggaagttgattttatccaatattagaatggctactccagcttgtttcttcagaccatttgcttggaaaattgttttccagcctttcactctgaggtagtgtctgtctttttccctgagatgggtttcctgtaagcagcagaatgttgggtcctgtttgtgtagccagtctgttagtctatgtctttttattggggaattgagtccattgatattaagagatattaaggaaaagtaattgttgcttccttttatttttgttgttagagttggcattctgttcttgtggctgtctctttaggtttgttgagggattannnnnnnnnnnnnnnnnnnnnnnnnnnnnnnnnnnnnnnnnnnnnnnnnnnnnnnnnnnnnnnnnnnnnnnnnnnnnnnnnnnnnnnnnnnnnnnnnnnnnnnnnnnnnnnnnnnnnnnnnnnnnnnnnnnnnnnnnnnnnnnnnnnnnnnnnnnnnnnnnnnnnnnnnnnnnnnnnnnnnnnnnnnnnnnnnnnnnnnnnnnnnnnnnnnnnnnnnnnnnnnnnnnnnnnnnnnnnnnnnnnnnnnnnnnnnnnnnnnnnnnnnnnnnnnnnnnnnnnnnnnnnnnnnnnnnnnnnnnnnnnnnnnnnnnnnnnnnnnnnnnnnnnnnnnnnnnnnnnnnnnnnnnnnnnnnnnnnnnnnnnnnnnnnnnnnnnnnnnnnnnnnnnnnnnnnnnnnnnnnnnnnnnnnnnnnnnnnnnnnnnnnnnnnnnnnnnnnnnnnnnnnnnnnnnnnnnnnnnnnnnnnnnnnnnnnnnnnnnnnnnnnnnnnnnnnnnnnnnnnnnnnnnnnnnnnnnnnnnnnnnnnnnnnnnnnnnnnnnnnnnnnnnnnnnnnnnnnnnnnnnnnnnnnnnnnnnnnnnnnnnnnnnnnnnnnnnnnnnnnnnnnnnnnnnnnnnnnnnnnnnnnnnnnnnnnnnnnnnnnnnnnnnnnnnnnnnnnnnnnnnnnnnnnnnnnnnnnnnnnnnnnnnnnnnnnnnnnnnnnnnnnnnnnnnnnnnnnnnnnnnnnnnnnnnnnnnnnnnnnnnnnnnnnnnnnnnnnnnnnnnnnnnnnnnnnnnnnnnnnnnnnnnnnnnnnnnnnnnnnnnnnnnnnnnnnnnnnnnnnnnnnnnnnnnnnnnnnnnnngtcagccgactgtgtgccctagctaccccggtgctgctcggaccggaagggcggcttccttcttaatgtcccctagtccttctggctgattttctctgcaaatgtagaggacagtccctctgattccttgtgtactctagaactcttgaatgcttgccaccttttgtgtgccccaggaggcaacaatgtgggggaacatactagcagacagcagcaaagagaaaggatgactgtctttgtgtttttgtccttttgcacaggatgccataaagcacaattcgttcctgtgccctgaaaaaaagcttgaacaaggaaacatcgaggaggcctttgagaacgtggatcaggtagctgaaggtaagtagtatgggagagtttacagtgagtccttgattccacagtgaaccagccatcaaaggcatctgtttgcccttggggtgggggggctcatcctctgaaggcctggggctcacacaaacctacacttcttctcaaagcctcgtgcatccttgtgcctgtgtgtgtgtgtgtgtgtgtgtgtgtgtgtgtgtgtgtgtgtgtggtgtgtggtgtgtgtgtgtgtgtgtgtgtgtgtgtgtgtgtgtgtgtgtggtgtttggaggtgagaagtcagggtagcagaataagcagaaagtcccccctaagacttgcttagtcaagggcagagtcagaaataaaacctggaacttttaaaaaatatatctgttttatttcacatgcattggtgttttgcctgcatgtatgagggtgtatgagggtgtatgtatgtctgtatgagggtgtcagattccctagaactggagttacatgttattagacgcgttctcacgaccggccaggaagaacaccacagaccagaatcttctgcggcaaagctttatttcttacatcttcaggagccagggtgcaggaagcaagagagcaagaagcaagagagcaagaagcaagagagagagaaaacgaaaccccgtccctcttaaggagcattctccttcgcctcggacgtgtcactccctgattggctgcagcccatcggccgagttgacgtcacggggaaggcagagcacaagtagtcataagatacccttggcacatgcgcagattatttgtttaccacttagaacacaggatgtcagcgccattcttgtaacggcgaatgtgggggcggctnnnnnnnnnnnnnnnnnnnnttctaattcgttgaagaattgagttggaattttgatggggatttgcattgaatctgtagattgcttttggcaagatagccatttttacaatgttgatcctgccaatccatgagcatgggagatctttccatcttctgagatcttctttaatttctttcttcagggacttgaagtttttatcatacagatctttcactttcttagttagagtcacgccaagatattttatattatttgtgactattgagaagggtgttgtttccctaatttctttctcagcctgtttattctttgtgtagagaaaggccattgacttgtttgagttaattttatatccagctacttcaccgaagctgtttatcaggtttaggagttctctggtggaattttttagggtcacttatatatactatcatatcatctgcaaaacgtgatattttgacttcctcttttccaatttgtatccccttgatctccttttgttgttgaattgctctggctaggacttcaagtactatgttgaaaagatagggagaaagtgggcagccttgtctagtccctgattttagtgggattgcttcaagcttctcaccatttactttgatgttggctactggtttgctgtagattgcttttatcatgtttaggtatgggccttgaattcctgatctttccaagacttttatcatgaatgggtgttggatcttgtcgaatgctttttcctcatctaacgagatgattatgtggtttttgtctttgagtttgtttatataatggattacattgattgatttttgtatattaaaccatccctgcatccctggaataaaacctacttggtcaggatggatgattgctttaatgtgttcttggattcggttcgcgagaattttattgaggatttttgcatcgatattcataagggaaattggtctgaagtactctatctttgttggatctttctgtggtttaggtatcagagtaattgtggcttcatagaatgagttaggtagagttccctctacttctattttgtggaatagtttgtgcagaactgggattagatcttctttgaaggtctggtagaactctgcactaaacccatctggtcctgggnnnnnnnnnnnnnnnnnnnngaggtgctgagaagaaggtatatccttttgttttaggataaaatgttctgtagatatctgttaagcccatttgtttcataacttctgttagtttcactgtgtccctgtttagtttctgtttccacgatctgtccattgatgaaagtggtgtgttgaagtctcccactattattgtgtgaggtgcaatgtgtgctttgagctttactaaagtgtctttaatgaatgtggctgcccttgcatttggagcgtagatattcagaattgagagttcctcttggaggattttacctttgatgagtatgaagtgtccctccttgtcttttttgataactttgggttggaagttgattttatccaatattagaatggctactccagcttgtttcttcagaccatttgcttggaaaattgttttccagcctttcactctgaggtagtgtctgtctttttccctgagatgggtttcctgtaagcagcagaatgttgggtcctgtttgtgtagccagtctgttagtctatgtctttttattggggaattgagtccattgatattaagagatattaaggaaaagtaattgttgcttccttttatttttgttgttagagttggcattctgttcttgtggctgtcttcttttaggtttgttgagggattactttcttgcttgttctagggcatgatttccgtccttgtattgcttcttttctgttattatcctttgaagggctggattcatggaaagataatgtgtgaatttggttttgtcgtggaatagtttgttttctccatctatggtaattgagagtttggccaggtatagtagcctgggctggcatttgtgttctcttagggtctgtatgacatctgcccaggattttctggctttcatagtctctggtgagaagtctggtgtaattctgataggtctgcctttatatgttacttgacctttctcccttactgcttttaatattctctctttatttagtgcatttttttgttctgattattatgtgtctggaggaatttcttttctgnnnnnnnnnnnnnnnnnnnnnnnnnnnnnnnnnnnnnnnnnnnnnnnnnnnnnnnnnnnnnnnnnnnnnnnnnnnnnnnnnnnnnnnnnnnnnnnnnnnnnnnnnnnnnnnnnnnnnnnnnnnnnnnnnnnnnnnnnnnnnnnnnnnnnnnnnnnnnnnnnnnnnnnnnnnnnnnnnnnnnnnnnnnnnnnnnnnnnnnnnnnnnnnnnnnnnnnnnnnnnnnnnnnnnnnnnnnnnnnnnnnnnnnnnnnnnnnnnnnnnnnnnnnnnnnnnnnnnnnnnnnnnnnnnnnnnnnnnnnnnnnnnnnnnnnnnnnnnnnnnnnnnnnnnnnnnnnnnnnnnnnnnnnnnnnnnnnnnnnnnnnnnnnnnnnnnnnnnnnnnnnnnnnnnnnnnnnnnnnnnnnnnnnnnnnnnnnnnnnnnnnnnnnnnnnnnnnnnnnnnnnnnnnnnnnnnnnnnnnnnnnnnnnnnnnnnnnnnnnnnnnnnnnnnnnnnnnnnnnnnnnnnnnnnnnnnnnnnnnnnnnnnnnnnnnnnnnnnnnnnnnnnnnnnnnnnnnnnnnnnnnnnnnnnnnnnnnnnnnnnnnnnnnnnnnnnnnnnnnnnnnnnnnnnnnnnnnnnnnnnnnnnnnnnnnnnnnnnnnnnnnnnnnnnnnnnnnnnnnnnnnnnnnnnnnnnnnnnnnnnnnnnnnnnnnnnnnnnnnnnnnnnnnnnnnnnnnnnnnnnnnnnnnnnnnnnnnnnnnnnnnnnnnnnnnnnnnnnnnnnnnnnnnnnnnnnnnnnnnnnnnnnnnnnnnnnnnnnnnnnnnnnnnnnnnnnnnnnnnnnnnnnnnnnnnnnnnnnnnnnnnnnnnnnnnnnnnnnnnnnnnnnnnnnnnnnnnnnnnnnnnnnnnnnnnnnnnnnnnnnnnnnnnnnnnnnnnnnnnnnnnnnnnnnnnnnnnnnnnnnnnnnnnnnnnnnnnnnnnnnnnnnnnnnnnnnnnnnnnnnnnnnnnnnnnnnnnnnnnnnnnnnnnnnnnnnnnnnnnnnnnnnnnnnnnnnnnnnnnnnnnnnnnnnnnnnnnnnnnnnnnnnnnnnnnnnnnnnnnnnnnnnnnnnnnnnnnnnnnnnnnnnnnnnnnnnnnnnnnnnnnnnnnnnnnnnnnnnnnnnnnnnnnnnnnnnnnnnnnnnnnnnnnnnnnnnnnnnnnnnnnnnnnnnnnnnnnnnnnnnnnnnnnnnnnnnnnnnnnnnnnnnnnnnnnnnnnnnnnnnnnnnnnnnnnnnnnnnnnnnnnnnnnnnnnnnnnnnnnnnnnnnnnnnnnnnnnnnnnnnnnnnnnnnnnnnnnnnnnnnnnnnnnnnnnnnnnnnnnnnnnnnnnnnnnnnnnnnnnnnnnnnnnnnnnnnnnnnnnnnnnnnnnnnnnnnnnnnnnnnnnnnnnnnnnnnnnnnnnnnnnnnnnnnnnnnnnnnnnnnnnnnnnnnnnnnnnnnnnnnnnnnnnnnnnnnnnnnnnnnnnnnnnnnnnnnnnnnnnnnnnnnnnnnnnnnnnnnnnnnnnnnnnnnnnnnnnnnnnnnnnnnnnnnnnnnnnnnnnnnnnnnnnnnnnnnnnnnnnnnnnnnnnnnnnnnnnnnnnnnnnnnnnnnnnnnnnnnnnnnnnnnnnnnnnnnnnnnnnnnnnnnnnnnnnnnnnnnnnnnnnnnnnnnnnnnnnnnnnnnnnnnnnnnnnnnnnnnnnnnnnnnnnnnnnnnnnnnnnnnnnnnnnnnnnnnnnnnnnnnnnnnnnnnnnnnnnnnnnnnnnnnnnnnnnnnnnnnnnnnnnnnnnnnnnnnnnnnnnnnnnnnnnnnnnnnnnnnnnnnnnnnnnnnnnnnnnnnnnnnnnnnnnnnnnnnnnnnnnnnnnnnnnnnnnnnnnnnnnnnnnnnnnnnnnnnnnnnnnnnnnnnnnnnnnnnnnnnnnnnnnnnnnnnnnnnnnnnnnnnnnnnnnnnnnnnnnnnnnnnnnnnnnnnnnnnnnnnnnnnnnnnnnnnnnnnnnnnnnnnnnnnnnnnnnnnnnnnnnnnnnnnnnnnnnnnnnnnnnnnnnnnnnnnnnnnnnnnnnnnnnnnnnnnnnnnnnnnnnnnnnnnnnnnnnnnnnnnnnnnnnnnnnnnnnnnnnnnnnnnnnnnnnnnnnnnnnnnnnnnnnnnnnnnnnnnnnnnnnnnnnnnnnnnnnnnnnnnnnnnnnnnnnnnnnnnnnnnnnnnnnnnnnnnnnnnnnnnnnnnnnnnnnnnnnnnnnnnnnnnnnnnnnnnnnnnnnnnnnnnnnnnnnnnnnnnnnnnnnnnnnnnnnnnnnnnnnnnnnnnnnnnnnnnnnnnnnnnnnnnnnnnnnnnnnnnnnnnnnnnnnnnnnnnnnnnnnnnnnnnnnnnnnnnnnnnnnnnnnnnnnnnnnnnnnnnnnnnnnnnnnnnnnnnnnnnnnnnnnnnnnnnnnnnnnnnnnnnnnnnnnnnnnnnnnnnnnnnnnnnnnnnnnnnnnnnnnnnnnnnnnnnnnnnnnnnnnnnnnnnnnnnnnnnnnnnnnnnnnnnnnnnnnnnnnnnnnnnnnnnnnnnnnnnnnnnnnnnnnnnnnnnnnnnnnnnnnnnnnnnnnnnnnnnnnnnnnnnnnnnnnnnnnnnnnnnnnnnnnnnnnnnnnnnnnnnnnnnnnnnnnnnnnnnnnnnnnnnnnnnnnnnnnnnnnnnnnnnnnnnnnnnnnnnnnnnnnnnnnnnnnnnnnnnnnnnnnnnnnnnnnnnnnnnnnnnnnnnnnnnnnnnnnnnnnnnnnnnnnnnnnnnnnnnnnnnnnnnnnnnnnnnnnnnnnnnnnnnnnnnnnnnnnnnnnnnnnnnnnnnnnnnnnnnnnnnnnnnnnnnnnnnnnnnnnnnnnnnnnnnnnnnnnnnnnnnnnnnnnnnnnnnnnnnnnnnnnnnnnnnnnnnnnnnnnnnnnnnnnnnnnnnnnnnnnnnnnnnnnnnnnnnnnnnnnnnnnnnnnnnnnnnnnnnnnnnnnnnnnnnnnnnnnnnnnnnnnnnnnnnnnnnnnnnnnnnnnnnnnnnnnnnnnnnnnnnnnnnnnnnnnnnnnnnnnnnnnnnnnnnnnnnnnnnnnnnnnnnnnnnnnnnnnnnnnnnnnnnnnnnnnnnnnnnnnnnnnnnnnnnnnnnnnnnnnnnnnnnnnnnnnnnnnnnnnnnnnnnnnnnnnnnnnnnnnnnnnnnnnnnnnnnnnnnnnnnnnnnnnnnnnnnnnnnnnnnnnnnnnnnnnnnnnnnnnnnnnnnnnnnnnnnnnnnnnnnnnnnnnnnnnnnnnnnnnnnnnnnnnnnnnnnnnnnnnnnnnnnnnnnnnnnnnnnnnnnnnnnnnnnnnnnnnnnnnnnnnnnnnnnnnnnnnnnnnnnnnnnnnnnnnnnnnnnnnnnnnnnnnnnnnnnnnnnnnnnnnnnnnnnnnnnnnnnnnnnnnnnnnnnnnnnnnnnnnnnnnnnnnnnnnnnnnnnnnnnnnnnnnnnnnnnnnnnnnnnnnnnnnnnnnnnnnnnnnnnnnnnnnnnnnnnnnnnnnnnnnnnnnnnnnnnnnnnnnnnnnnnnnnnnnnnnnnnnnnnnnnnnnnnnnnnnnnnnnnnnnnnnnnnnnnnnnnnnnnnnnnnnnnnnnnnnnnnnnnnnnnnnnnnnnnnnnnnnnnnnnnnnnnnnnnnnnnnnnnnnnnnnnnnnnnnnnnnnnnnnnnnnnnnnnnnnnnnnnnnnnnnnnnnnnnnnnnnnnnnnnnnnnnnnnnnnnnnnnnnnnnnnnnnnnnnnnnnnnnnnnnnnnnnnnnnnnnnnnnnnnnnnnnnnnnnnnnnnnnnnnnnnnnnnnnnnnnnnnnnnnnnnnnnnnnnnnnnnnnnnnnnnnnnnnnnnnnnnnnnnnnnnnnnnnnnnnnnnnnnnnnnnnnnnnnnnnnnnnnnnnnnnnnnnnnnnnnnnnnnnnnnnnnnnnnnnnnnnnnnnnnnnnnnnnnnnnnnnnnnnnnnnnnnnnnnnnnnnnnnnnnnnnnnnnnnnnnnnnnnnnnnnnnnnnnnnnnnnnnnnnnnnnnnnnnnnnnnnnnnnnnnnnnnnnnnnnnnnnnnnnnnnnnnnnnnnnnnnnnnnnnnnnnnnnnnnnnnnnnnnnnnnnnnnnnnnnnnnnnnnnnnnnnnnnnnnnnnnnnnnnnnnnnnnnnnnnnnnnnnnnnnnnnnnnnnnnnnnnnnnnnnnnnnnnnnnnnnnnnnnnnnnnnnnnnnnnnnnnnnnnnnnnnnnnnnnnnnnnnnnnnnnnnnnnnnnnnnnnnnnnnnnnnnnnnnnnnnnnnnnnnnnnnnnnnnnnnnnnnnnnnnnnnnnnnnnnnnnnnnnnnnnnnnnnnnnnnnnnnnnnnnnnnnnnnnnnnnnnnnnnnnnnnnnnnnnnnnnnnnnnnnnnnnnnnnnnnnnnnnnnnnnnnnnnnnnnnnnnnnnnnnnnnnnnnnnnnnnnnnnnnnnnnnnnnnnnnnnnnnnnnnnnnnnnnnnnnnnnnnnnnnnnnnnnnnnnnnnnnnnnnnnnnnnnnnnnnnnnnnnnnnnnnnnnnnnnnnnnnnnnnnnnnnnnnnnnnnnnnnnnnnnnnnnnnnnnnnnnnnnnnnnnnnnnnnnnnnnnnnnnnnnnnnnnnnnnnnnnnnnnnnnnnnnnnnnnnnnnnnnnnnnnnnnnnnnnnnnnnnnnnnnnnnnnnnnnnnnnnnnnnnnnnnnnnnnnnnnnnnnnnnnnnnnnnnnnnnnnnnnnnnnnnnnnnnnnnnnnnnnnnnnnnnnnnnnnnnnnnnnnnnnnnnnnnnnnnnnnnnnnnnnnnnnnnnnnnnnnnnnnnnnnnnnnnnnnnnnnnnnnnnnnnnnnnnnnnnnnnnnnnnnnnnnnnnnnnnnnnnnnnnnnnnnnnnnnnnnnnnnnnnnnnnnnnnnnnnnnnnnnnnnnnnnnnnnnnnnnnnnnnnnnnnnnnnnnnnnnnnnnnnnnnnnnnnnnnnnnnnnnnnnnnnnnnnnnnnnnnnnnnnnnnnnnnnnnnnnnnnnnnnnnnnnnnnnnnnnnnnnnnnnnnnnnnnnnnnnnnnnnnnnnnnnnnnnnnnnnnnnnnnnnnnnnnnnnnnnnnnnnnnnnnnnnnnnnnnnnnnnnnnnnnnnnnnnnnnnnnnnnnnnnnnnnnnnnnnnnnnnnnnnnnnnnnnnnnnnnnnnnnnnnnnnnnnnnnnnnnnnnnnnnnnnnnnnnnnnnnnnnnnnnnnnnnnnnnnnnnnnnnnnnnnnnnnnnnnnnnnnnnnnnnnnnnnnnnnnnnnnnnnnnnnnnnnnnnnnnnnnnnnnnnnnnnnnnnnnnnnnnnnnnnnnnnnnnnnnnnnnnnnnnnnnnnnnnnnnnnnnnnnnnnnnnnnnnnnnnnnnnnnnnnnnnnnnnnnnnnnnnnnnnnnnnnnnnnnnnnnnnnnnnnnnnnnnnnnnnnnnnnnnnnnnnnnnnnnnnnnnnnnnnnnnnnnnnnnnnnnnnnnnnnnnnnnnnnnnnnnnnnnnnnnnnnnnnnnnnnnnnnnnnnnnnnnnnnnnnnnnnnnnnnnnnnnnnnnnnnnnnnnnnnnnnnnnnnnnnnnnnnnnnnnnnnnnnnnnnnnnnnnnnnnnnnnnnnnnnnnnnnnnnnnnnnnnnnnnnnnnnnnnnnnnnnnnnnnnnnnnnnnnnnnnnnnnnnnnnnnnnnnnnnnnnnnnnnnnnnnnnnnnnnnnnnnnnnnnnnnnnnnnnnnnnnnnnnnnnnnnnnnnnnnnnnnnnnnnnnnnnnnnnnnnnnnnnnnnnnnnnnnnnnnnnnnnnnnnnnnnnnnnnnnnnnnnnnnnnnnnnnnnnnnnnnnnnnnnnnnnnnnnnnnnnnnnnnnnnnnnnnnnnnnnnnnnnnnnnnnnnnnnnnnnnnnnnnnnnnnnnnnnnnnnnnnnnnnnnnnnnnnnnnnnnnnnnnnnnnnnnnnnnnnnnnnnnnnnnnnnnnnnnnnnnnnnnnnnnnnnnnnnnnnnnnnnnnnnnnnnnnnnnnnnnnnnnnnnnnnnnnnnnnnnnnnnnnnnnnnnnnnnnnnnnnnnnnnnnnnnnnnnnnnnnnnnnnnnnnnnnnnnnnnnnnnnnnnnnnnnnnnnnnnnnnnnnnnnnnnnnnnnnnnnnnnnnnnnnnnnnnnnnnnnnnnnnnnnnnnnnnnnnnnnnnnnnnnnnnnnnnnnnnnnnnnnnnnnnnnnnnnnnnnnnnnnnnnnnnnnnnnnnnnnnnnnnnnnnnnnnnnnnnnnnnnnnnnnnnnnnnnnnnnnnnnnnnnnnnnnnnnnnnnnnnnnnnnnnnnnnnnnnnnnnnnnnnnnnnnnnnnnnnnnnnnnnnnnnnnnnnnnnnnnnnnnnnnnnnnnnnnnnnnnnnnnnnnnnnnnnnnnnnnnnnnnnnnnnnnnnnnnnnnnnnnnnnnnnnnnnnnnnnnnnnnnnnnnnnnnnnnnnnnnnnnnnnnnnnnnnnnnnnnnnnnnnnnnnnnnnnnnnnnnnnnnnnnnnnnnnnnnnnnnnnnnnnnnnnnnnnnnnnnnnnnnnnnnnnnnnnnnnnnnnnnnnnnnnnnnnnnnnnnnnnnnnnnnnnnnnnnnnnnnnnnnnnnnnnnnnnnnnnnnnnnnnnnnnnnnnnnnnnnnnnnnnnnnnnnnnnnnnnnnnnnnnnnnnnnnnnnnnnnnnnnnnnnnnnnnnnnnnnnnnnnnnnnnnnnnnnnnnnnnnnnnnnnnnnnnnnnnnnnnnnnnnnnnnnnnnnnnnnnnnnnnnnnnnnnnnnnnnnnnnnnnnnnnnnnnnnnnnnnnnnnnnnnnnnnnnnnnnnnnnnnnnnnnnnnnnnnnnnnnnnnaaatctgggcataagctccccaatggtagtttgtctgatcagcagaaataagctccctgtacccgttaacaagtcaaaagtccaatctctctgctctggaagtcaaagcagctgcgtttgctcgggcctgcgcttgtgcagcttcgtgccaaagcgctctccattccatatatttgcccatactagggagagcggcttttacaaccgtttgccagtcggcaggagttagtgccatgccagcgagcctgtctaactgcaccaaggtaaaattagcattggttccgtatttacgaaccgactcggcaatttccttaatttgtaagtattctaccggagcatggacacgcccaccctcggctccttcaaagaccggaaatgcctgttgtattttcctttgttcctctctgggaatgaatgagtctgcgcactgcctctctgcgcactgcctctctgcgcatctctctgcgcattgctgacgcactacgcagggcggggactccgcatagggcggaccttgaagccgactgccctgaggccaatcagcaaactggccttcgccagccgcttttggcttttttcttgaccaattagctggctggtaatgggctgcttcttcctcccagtctgtttcctcagaggaggattcttcacctgcttcagaactactaagagctggctccccgagcccatccagcgatgagcacaggctccttttcctagagacctccgctaattgatctttcttcttttccctttttcctctttttcttctaatctctctccaggtattcctacctaaccttaacttttcctcgggttcaagacccttggaaaggcctgtatacttattttgtgtaccatatttcctctttgttcctactctctctccccgctttacttctgatagcttgtcctgaatttcatctagaatcctccctatcttaaccacttgataacatgtgaaaaggaacaaaagggctcctaacaccagaaaaaattcaaggccaaacatattccactttacttctgatagactgtcttgaatttcgttagaaagttcaagatcagacttacctcgtaaagctgtactcactggtactctcgttccccagctgaaaagttctgaattcatacagttgaatccttcttaacagtctgctttacgggaacctttattaccgcgacccgcagttctggttctggaatgagggatcttccttgcgccagtcccgagttttttctcgtcccggaattcggcaccaattgttattagacgcgttctcacgaccggccaggaagaacaccacagaccagaatcttctgcggcaaagctttatttcttacatcttcaggagccagggtgcaggaagcaagagagcaagaagcaagagagcaagaagcaagagagagagaaaacgaaaccccgtccctcttaaggagcattctccttcgcctcggacgtgtcactccctgattggctgcagcccatcggccgagttgacgtcacggggaaggcagagcacaagtagtcataagatacccttggcacatgcgcagattatttgtttaccacttagaacacaggatgtcagcgccatcttgtaacggcgaatgtgggggcggctcccaacagttacagtcaactgtgatctgccacatgggtgctgggaattgagccccagtcctctggaagaacaaccagtgctctgaactgatgagccatctttccaacccagaacctggaacttttagctttcagaactatagtctctgaaacaggtcgcctaggttgtcacaaggtagatgccgggctccttggtgggcactactgcaggtgggcggctcacatcgcacttcatttaaagtgcttcaatgatggcagcttccagccccatgtgctccaggcgtgctcctgcacttgcccctcacagggacagtccatgttggaggacaagaacacttctacatggaaacacagagagtgcttgttattccgaagacagaagacaaagagctagacatgtatgtgtccacacaggacccagcccacgtacaggtaagatccagcaagatgccacaatcaacttcctaactccatcatggtggtcagtctccatagcacaagtggcagccatacataggtagcagaaacttagaatctaaaggttggatatctgtaatgcagctaagaccccagaactattttaactttgttcctgttctcatcaacaataaaagaacaaccctgatcacttttcctttttatatatatatttttttcttactctctgagaatttcatgcatgcaaccaacctatcttgatcatatccatcccttttcctctccagcttaccccagatctccatcacatctcccttctaagctcatgtcttttactttttaaaaaaccattgagtccagttatgctcatgagtacaggggcaactactggagcatggtcaactagttgccacacccccaaagaaaaatgactctcctcttccagcaatatcatctagatccccttcccagcctctgctgggatttttggctggcttgatcttgtgcaggtcttgtccaggtgatttatagcttctgtattcacaactatagcagccctgtcatatccagaagacataattcttattgagaaagtcatgagactttccagaatatccttgaactcactaagtagccacagttgaccttgaacttctgaacaccctgcctctacatcctgagtgttagaatcccagtcatccactattatacaagattttatgcagtgctgaggatggaacccaggtcttcaggcttagtaggcaagttatatccccagtccaagagagatcactttaaattaaaacattcattgctggagtggtggtatcacacacctttaatcccagcaaggggttgtggagcagaagcaggcaaatctctgtgagttcaaggtcagcctgatctacagagtgagttccaggacagccaaggatgcacagagaaaccctgtctcaaaaaacaaaatcaaacaagacaacgaaactacagcagcagcagcaacaaaaaccctctttatttgcagcaggttcagtttaactgtgattggatggcatcactaatttttccccatactctattttattctctaaaatagtcattataggtgatttttaggttcaagacatcactttagaccacatttatacttcgccatgacagacaatgctctaggcttaggtcataaacccatcacccttgttagtaggatgtcaggcggctactgcttttcgctggttatgatcttataggctcaagcgtttgaccaagagtgcagcttccaataagaacccaggactttgatagtttggggaagattaacaatgtttaaaaatggccaggctggaaacaatggtggtacacacctttactcccagtattcaggagacagagacaggtggatctcaatgagtccagcttggtctacatagtgagtttcaggacagtcagggcaacataatgagaccctgtctcaaaaaccagcaaaaccaacaaaactggaccagagtccccaggccaacctgagactgtctccactgccttacagaggtagactcgagtggaccctgctctagagttacatttccggaaacaaaacacctcactgccattttactcttttgaaccttgttgtctcttacagaaaacagtgtcctctaccttaaacatcccgatcagcaggatcacctgccatgtgaaaagagtgggtggaggctttggaggaaaggtggggaggccagctgtgttcggagcaattgctgcggtgggggctgtcaagtaagtctaccttaggggccagaactgtgggagaggctgagctcagaggacagcagtagcctgacaaaccacccctggctgcagtcagaggctcctctagggtcacttcaggcccctttgtgtttctttataaaacatagataattcacacccgccctgctgccctctttggttttgtaaaagtgagctgaacatgtcactttaaataaaggtacgggactttaaataggaaaggtgggacagttgactgctgccgcaacggaacagggggaacccattcctgagcttcagggaagaggaatcggttagctgtggagcaaggcaccctttccaggttcatctttgccccataatgctgcttcagccagagcagggtggagcgaggagagaaagacttccccctccccatccaagcgctgtcttggccacaggagtcttcgggttgatcgcaagagagggcttacatctttgctctccgtggatattcagcactcaagttcagctggcactggcacggctggttcttattcattgtctttggctgggtttgttgtcagtgttggagaacaaagaggaaaagaaacaggaagggggagcagaggaggagaaggagcaggagggggggaggggaggggatactgtttaatatttttgtctgagtttcagtctgcaaagttccaacaccctgcttcctttgacagcctctgtgtagctcagagaaaagttctgtaccctggaacgtgcatcttcatccccagctcggggaggagagaagcacggctgcaatctcatctctacttctctcctctaccagtcactgaagaccttgtgtcttctgcctctcacgtgtggccacacacagttgtcaagtgaagcacttaaatttcaaagcctaggctagccactatgagccctgacatcagtatattctaaaacttgcctgtgacccccctgcgcagccaagtgtggaaccagtgcctcaccatgcatcctgccttagcacacaattgtcagtcgcacgttaaatgacctgagagcagtgttcccaatcctgcctcaaacataatttttttttttaatttaaaaaaagaaattccgggctggcaagatagctcagcgggtaagagcactgactgctcttcagaaggtcctgacaactacaaatcccaacaactacatgagatctgatgccctcttctggtgtgtctgaagacagtaacagtgtacttatttataataataaataaatctttgggccagagtgagcagggactgagcaagcagggttgactggagcaagcagaggtcctaaattcaattcccacatgaaggctcagaaccatctgttcagctacagtatactcatatacataaaataaataaataaatctttaaaaaaatgaaaaaaagaaaaaaaatcccaccttcctatccaaatcccagaccttctgaatcagaatttaataagggatgagtcttgaaactgtacatttaactggcatttttctattgatgttaacattgtatctacccattcacactctccctttacaacatatgcaaaacgggtggatctgggtgaaagtcaaatttgaagccatagggacagaacttagctggaaggtaatattaatccttttagacataaaataagcactgaattgcaaggcacagagaaatcatcaggcaataatccatatcatgcctagaagattgtatacagattaatagatacatgtggaatggatagacagatggagagacagatggatagatggatggatggatggatggatggatgggcagatggacggagaattaaatgaatgatagaaatggatgggaaggtgaagggtagatgttttacatgttgtaaatggatgtgggaagagagtaaaataaggacttgaataagtaggtggatatgtgcatagctgaatagataaatgagtggatggacagatggatgagatgaatggagatctaaactttgttttctgcagaactggccatcccattcgtcttgttctggatcgtgaagatgatatgctaataactgggggacgacacccattatttgcaaaatacaaagtaagtgctacaagtgaagttattaaaatgcctcattttgtttgaggggctttgcccttttctatcattttgattttgttgaaatctaaaaacagtcagcatttaaaatattttacatgaaaatggtatgtattttggatgcccatgacattttatgattagcttttcatttagtgtataattgtaaaaaatggaatgatgaaaataaatttttaagtagtaacttaaaggcattgcttgagggcctggagctatggctcagtggctatagcttgccatgcagacctgaggactgagatagtatccccaggacctacgtaaagactaagagactgaggctgctccctgcagcaaccccagtacccgggaggaggagacagggggtccctgaggccacttgtctagaaagactagccaaaatggtaaggtctgggtctgtcaggaaactctgcctcagtaaataaattaaagtacaatcaagaaagccttctgacattatcctttggcaccacacacatgtgcactcacacatatgtagacacacacggggaaggcgggaaggcactattaaaaggaataaggatttatatttttagagattcctcaaaggagagggggaagaaaaagaaagatgatgtccaaacatcatggctatgagaacagcactttgttgtagaaatatttagaaacaacttgaccattttgcattgcaaaataatctctaacagaagtccactaactggtgaatttaaattattcaagtcactccattttctttcaactgcagtagaaacactgtttaaatatgtttgcagcatctagtagatgatgctattttttgaatttgtgactgcgtccttaggacattctgtcctgatataagtttacaaaacatgctttattaggcattccttgagcatacacagctgatttcctacctggttttaccactgccttagattgctgcaccatccattacctatgccgctatttacaaagcaccttggccacccagtgaggcaagtccagctcatgaattctccaccctctgttcccgcccaagactttcctgtcacagggataacatgattcatctccatgcactctggaatcccagagactttccaatgtggagaaaaccacaaactaaattagaaagaaagccaggacagaatggcggagaatcttacaagagtcaggagaatgagagaggcgatttacattctgggagtggagcacaaacttgaggattccatgctgggtgtggagccagaattgcctgctaaaaagaaaggactcagagctgggcagtggaggcacacgcttgggaggcagaggcaggtggatttctgagttcgaggccagactgttctacagagtgaattccaggacagccagggccacactgagaaactctgtctcgaaaaagaaaggactcagaaaaacttgagttaagaaaggtcttcttggactggagagatggctcagtggttaagagcactgactgctccttgggaggacctgagttcaattcccagcaccaacatggtgactcacaaccatctgtaatggaacccaacaccctcttctggtgtgtctgaagacagcaacagtgtactcacataaagtaaataaattagtaaatctttttatttttttnnnnnnnnnnnnnnnnnnnnnnnnnnnnnnnnnnnnnnnnnnnnnnnnnnnnnnnnnnnnnnnnnnnnnnnnnnnnnnnnnnnnnnnnnnnnnnnnnnnnnnnnnnnnnnnnnnnnnnnnnnnnntatgatgccctcttctggtgtgtctgaagacagtgacaatgtactcacatacatgaaataaataatctttaaaaaaaaaaagaaaggccttcttcagacactggaagacaaggtcacagcaggcaggagccacacaagaacaaactggaggcaaagtctgtctttgatgccttccaacagggaactaaggggtgactcacagttggtaagtacattttaggcaaatcagtaaaatgtccgtcattcggcgacaggtgggattcatgaacagtggacggatcaaagccctagacattgaatgctacatcaatggaggctgcacattggatgactcggagctggtatgtgtgtcagacatcactgtgccccttcagagataacatgcaaaatgtctggttgtgtaaaagtaccttcttatttgcctgatatactggcttattctcagcctctgaatttttgctctatttgacctcaaactaactctggcagtctggtctaatcttctagcttcttctcgttctctggcttgttctctcttcaacctgtctctgtaagtctcccggtaaaactgctagctcgctcgctctctctctctctctctctctctctctctcgcttgctctctctctttctctctgtctctctctctgtctttctttctctctgtctctctctttctctctctctttctctctctctttctctctgtctctctctttttctctgtctgtctgtctgtctgtctgtctctctctctctctctcctgtgcattgttctctctgaagtagtctttcttttctctctgttcttgtgagacttgagcatatctgattctgtcaaagctcctctgattcatcactttgtgtgccactcaattagatatcactttgaaacatggctgcttccttctacaaactagctttaccgtcattgtatgggatgaaaggtatgttctaaggctaagatattccacaactaataacaggtttttccagtaaacacaacacactcttgggattcacagtgtgatcaaatatcctgcaacatggaaagttgggcagtgtgtctaatatgtgtggctatctcctttttctttaggtaacagaatttcttgtactaaaactggaaaatgcatacaaaatccgaaacctcagactccgaggtcgtgcctgcatgacaaacttaccatccaatacagcttttcgtgggtttggcttccctcagggagccctggtaacagaatcctgcatcacagctgtggcagccaaatgtgggcttccaccagaaaaggtaagattataatgaggctcataaccaaggctgataaggaattcgaggaattagctagcagccccagggaacactagaacaactacacaaactaaccctggcttagaatttgagataagagctttagtttgttttttgttttgtttttttgttttttgttttttcatgactgtgatgtggacatgccatcattagttagacactccaggactgacacatatctgggttgtttgctacccagtttagactgttaaatgttactggaactagatagaaggcacagtggctaagagtgcatactgctcttccaggggaccagaattctgctcccagcacccacattagtggtgctctgtaactccagctccccgggatccatcctgcgccctcttctgttctctatgggcactgcatcacgtgcacaaactcacacacatatctacataatttaaaaataaaatcttatgccaggtggtggtggcacacaactttaatcctagcacttgaggagcaaaggcaggcagatttctgagtttgatggtagcctgagtgagttccaggacagccaagactacacagagaaaccttatctcaaacaaacaaaatacacacatacataaatacatccataagtacatacatacatgtacatatatgcataaaatcttaaggtgaccttgaaatggacaccctaatacatatgtgctaaggatacataatagttttgtccttttgtataaatccatttattgaacaaactcacagaaatggaattgctggtacacttgaaggctttttggagatattgtccaaaattaaccatttaaaaatattgttctgtgaagtaccccagaaggcttgtggagtacaagggagttggagcagagtcaggctgactccagcaccagctgttgctgacatcttctactccttacctgttcagtcccacctgagtgtgcactccgtgtctaccctgtctcctcaacccagacctgctccagcaaggattctctatgtgttgtctctggaacatctttgtccctaaattcaatgggacctctgggttttcattggattggcagagtacttcctctgcaccagagaacacctagtcctatatacacagcatatatcagaataataatagatttcctataagacttcacaaacggttcccatgggtacaaaggaggaaaccatctcatcaggatgaagattagggggaaaaaaaaacccaaaaaacaatatccttctgagaagatggcaggaggttcagcctgaagaaaggtagatggagagacgacctaagcaggaaaagtaggaacagagacagtggcctctgtgccctggatgccttggctagaacaagatgactcacttcatagagtttctgaggaacaaataaatttttacaaaaatattcattttcatggagctgaggatgtagctcagtgatagagttaagacagcgttcacaaagccttgggctccaaccccagagctatacatgcaaaaagaaaaagaaaatagattttataacctgcataatctttaaaaatccagtgttgttgctggagacagtacagtattcttttccttctatcaaaataagttggagagagtgaaaccactcccccgggcatttccagctggctctcctttcctggaggttgaagttcccaagatatgatgcagatcctgttcatacacaaatttgaaaagatttaaccatgtattcaaagtacacacacatgcacagacaatataggatagataggtagataaatcatacttagaaagatagataatgggtgaatggatggatggatggatggatgggtaggtaggtaagtaacccaacctcccgggccttcatcatactcccttactagtcactgtcataagttctgatggaatttcacacttgtttcagattagggagaaaaacatgtacaaaacagttgataaaaccatctacaagcaagcgttcaaccctgaccccctgataaggtgttggaatgagtgtctggacaagtcttcctttcacatcagaaggacaagagtggacgagttcaataagaagagttactggaagaagcgaggcattgctattgtccccatgaagttttcagttggctttgctgcgacaagctaccatcaggtaaagttcacacatacacgcatgtgccatgtagtaaataacccttatgtccaacacaatcttggtccaatcactgattctgatgttcgaggatgccacatttccctgaatatacataggagaagtttccagaagcatgatcagcttcatgtggtagtaggagaaaggtcactgtggtaagaagctttggtgacaagcctgaggacatcagtcacatggctgtcaagactggaggttagaagaactggctccagattctatgctaatctaaaggaacaggagcccacaggcccctgtgtgtttcctgaggaaggggtgtcccacctgcagggatgcttgggatacctgccaagtctcaggcagagaagtcattctattgctttctgacctggcacttggagccacctccccaggaatctgttgcctctggtgggaaattgccctggagaagttggcaagaggaggagccaagtcattcccaggcaggagggaggcatgggagagtctcacacacagccaagacctctaaagaggaccgggcctgagccaacagatctctgaactgcagagggtctcagggaccagaaaactggcagaaatctgggaatggctgtccttactcactgctatcaacccaggtcagaaaatgcagcaactgggaaaggctttaagtagtacagcactatgtgcataccatcgaaagcatttctccattcataccccactaatggcagcctatcttcccccaacccctccctacacacagtacacacacacacacacacacacacacacatgcatgcacacatgtacacatgtatacacacacatgcacacatgtacacatgtatatatacacacacatacacacacacactgtgaaaggaagcccctcctaggaaataaaagcagcagttgatccaaacttttagtcaactggagtcagaaaggaaacgctgagacattcttggtctgccgtttgctaggtctgtgacattaaagctgttcagactttctgagctttagctccatcgactgtaaagtgagactagcaataatactctcttaggattaatgaggactggctgagaaaattaatataggtcacttggcaagattccttgaacattctggaagtcaaccagggtaatcgtaagcccttcccaagagagcccagacacatctctcagggctctttctcccctgacaggtaggataagatgccctcagcttatgggtcatatccctgcctgggtccagaatgaccattccatagacaggtacaaggttagttttcatatccactcacttgactgactcaatggaccctgaatggtttttctctgccaccaaatattgtatctttaccagcctaacttgaccaacagctgggtgacaagtagacaggttcgaccatgtagtaactaccctgagttagcatagacctcacaaatcaagggttaaatccacagactatatccactctgacaccagctacaaattcatacttctgcctaaatgattttttttttagctgtaatgattttctagaacaaatcacaaaactcaggaaggctttttatattttattatcattaccagctgatataaatgacacaactcagaagcagccaatgggaaagatgcctaaggcaggacactagggagggacaaagaacttgtcttttgagtgttcatcccccaagaagtgcagagaactcagaaaggtgcagtgggaatggaatacaccctcaccagagcaccactcacacacaaatataaatatacacagtctgacccactcaccctgaacctatcccagtacctcctgaggaagtactgtgccaagaaccagaaacaagacttaagtacctagtttcttttgtcatcaaaatggtcccttctcagcaaaagtacagcccttccactatcatccctgggcgccaattttttatcttggccacattagaagaaagctttacctcagctgatgacttttagcttccccacggagctgtaaattgacatgcccaagaaccgcttggccaggtctggcaagtgtcattccaggtcagctgctgacacagctggaacgcctcctcacaaacagtgggaggcagagtgctacagccagccacaggctacagtgagtaaagactcttattagcaccatacatctccaagctccccaacccctccaagccaccggggagcctcgcctccaggcatctccaggctgggaggaaaaacaccacctttccacccatctaatttaacaaaatctacgtagtgtctctgagtccaacctgctcaaagttctctctaggacacagtcacacagtgcctgccctgcttggagattctctgagcagaacttgccatgcccctggggtaccctgtagtaggtgcagcaaacatagtgggcagctcggaaaaacatatgtgtgtgtttatgtgtatgtttaagtgtatgtgtatagatcctacagttctatagattggaagttcagagttaagctatcagcagaaccactctgtctccaagccctcaggctttcccagcctcttcaggctcctgccccttcctggcttatggcaatataactccattgactgactccagctttatgggccattatccctggtgttgtccccagagtctgctaaggatgccagtcattgaatttgagaccccttctactagtctgatcatcttaaataattatatctgcaaaaaccatttccaactcggagcatgttctgaggctccaggtggatgtgaactgggaggagtgagccactgctgcacccagaacttaaaagaggaaggatggaagaggtgatggggccttctcagatatggtcagatgctgcagggagtcttaagagagtggagactgcagggtctaaatgctggacagatggaaaacagggaaccatccaggaactgaagacagcagagcaggagccagggtcggagaggagtcatggtgggattggacctggacaaggcaagaagagagagtaatgtagtagggtcagggatgagaccagaccctaaaggacagctgtgacaaggggcagagctttcagcaacaggtaaaggggagtcaccttgctcacttctgtcccttgcctctattcattttcatgtcaggggaccctgagcttcacaaggggagttggagctgactgctcagctctcatagaactcattttctacagccttaagccactgagattctgcccagaaatgactggacttcagccagtgtccccaccatcgtatgcctggcttgaagcagcctgttcacgtttatgtgtctagacaagatcagggaaatattccactcagtagcttcacagtcagccctaactcacttgaatttcaagtagttaagaccaggtaggcatgatcatatatgattttaaccctagtacttgggggacgaaggcaggcaaatttctgtgagttcaaggccagccggaaggagttctaagccagctagagatacatagtaagataagaccctgtctaaaaaaaaaaaaattcagattgctaagtagggaaattctttacagttgacttttgatagagtagacgtaagttcaaggacctatgggaaacctcacatctctgacttccctgctccagagagtgaggtttcactacctcatttcttttcctaaatttttagaaattattttatgtgtatgagagttttgcctgcatatatgtctttgtaccatgtgtgtgcattgcccattaaaactaaacaaggaagttgtatttcctggaaactggaattacatttgtgagctgccatgtgggtgctgggaattgatcctgggtcctctggaagatcagccagtgctcttaacccctaagccatctccccagcctctccctcacttcttacattgaacttaccaacaccctcacagaagtgctcctggattgtcttataggcggctgcgctcgtccatatctacaccgatggctctgtgttggtggcacatggaggcaatgaactggggcaaggtattcacaccaaaatgttacaggtaaaatcaagaaaattcatctttccacacattgttgacatgaccgaaacttggaatagcttttaaggtaaatgatgacaggacattcaaatgtaaagactttgactagttgaaatgcttcttgcatataaactacaatgaacgctgtgacagaaatctcatgcatgtataaatgctcctggaacttggacagagctgagaggtggaagagattattagtaaagccaccactcatgagccggcagaacacgatgacagaggctccacactgccacaagagctaacaaggaactggaaagagccaatgactcatcaaataatcaactattaacatgctgttacttactttctctctctctctctctctctctctctctctctctctctctctctctctcgtgtttagtactagggattgaatttagggctgtgtacaagctaggtaagtagcaagtgctttaacactgagccataacaccagctctttttcattaaaaaaaaaatgcatgctggtgtgattgcacacaattttaatcctggcactctgaatatatataggtaggcagatttctgagtttaagtcctgcctaggctatagagcaagttccaggacagacagggctaagcagagaaaccctgtctcaaaataaacaaacaaacaaataaacaaaacaaaaaataataataaaaaaaacccagccaggtggttgtacgtgcctttaatcccagcactcaggaggcagagacaggcggatctctgagtttgagaccagcctattctacagagcaagttccaggacaagcaaggattacagtagcgaaaccctgtctcaaaggaccaaaaaacaagaaaaagaggggagaggaggaagaagaaagaacaaagaaagaaaataaaaagggaagccaacaggaaggctcatttgtgtgtgtttacccctgctcactcatgcacatgcactctcagattctacatgacagatgcagaggtcaggggacactttaggagagtcagttctcgccttccaccacgtgagttctgggtatctaatgtaggttgtcaggctcagtggtaagtatctgctgggccaactaaccaaccctatcctatacttttaaagacatgttctcagaaaaaactgacccctttgaattaaacacaatcaacatgatgatggaccggtcagattattacagcgtagcttcatcactggtcccttagctctcttagaacacgcctctcacgttacacaagttcccaaggactcctcattcaggcatgctcagccctctcctccttgcttatgctcctgccacagacaggcccagtgacccctgaaccccgtcgactgcaggaaagaaagcatatatgattcttgcgaggtcaaccagcctccttttctaaaacagacaagcagccgctctgagagaggaatctctccccaggcattgtttgggaagtaggctgaaggacaggggtcatcagtagtgattctgtgcagtggacacgcctactgactgttgtaaacagtatggtcatggagaaaggaaagcaaacacagagactgagtgaggaccctcatgagaccataaagtcccatgactttacatgcttgtcagccctccagtccccttttggttgttttgctttgtttgaggcaggttctcactatgtgtccattgcttttccaaaggatccatccaattccaagtactcacatcaggcagctcccagcaacctgtaactcccgctccaggcaggtcagacaggcttttgcagcgcctttttcttttttcttctatttattcccacttacttatgtttttctagtctttgctgttcacttttaaattttctgttcttttcctctaagcttctctgagggacacctataaaaattaagataataaagggggggtagcattttcatgggcagtagcacagacacttggaaaagagaagtaagcgaatcttcatgagtttgaggccagcctggactacaaagtgagttctaggacagagcaacatagtgagatcctgtctcaaaagaagaggaaaaaaggaggagaaggaaaaaaggaagaaaggaaaagaggaaggggaaggagggagagagggagggagggagagagggagggaagaaggagggagggagggacggaggaagaaaccacacaatagctgacaagatggctcagtgggtcaagggtgcttgccaccaagtctaaccactggagttcaagccccaggacccatgtgttagaaggaaagaactaactcctgaaagttgtcttctgatctccacatggatgctctggcacatacatacacagtcataaaaaaactaacttaaaatgtattaaaatttgtttttaaaatatattgcttttttccctacgtttttttttccaatggcttaagttcttgtagactcctttattggatttgaactatgtcctttctcacaggtggccagccgtgaactgaaaatacccctgtcttatctgcatatctgtgaaacaagtacaacaacagtgcccaatacaatcgctacagccgcgtccgttggagcggatgtcaacggcagggctgtgcaggtgactgctcgcatctctgtccccggtgacctttaccacacctctggtttcttatctgtacgcggacgctgtggttggcttcagggaggtgatccatcactgaatgagttatttttctactccaggttaacttagagaaagaaaggtttgtgtggggcttatgatgccagagagataagagtccatcgccatcatggcgtggacatgtggcaataggcaggcatggcaactggagctgcagcggggagctcacatcgtggaccacaggcaggaagcagagagaggactaggtatggtgggagtctttgaactcgcaaagcccaccccccagaggcattcttcttaaacctccccaaatagcaccaactggggaccaagtactcagagactctgggagagatttagtattcaaactaccacagttactaaataaaaagttagactaccaatatattgggagcatatatgaattagagcaaagtaatacatagacccagaatataatggttcagatacaaaagtccctttcatgcacacatcggagtccagagggagtctttggtcagccagacatccagactgatggtggcaccattagtgtggctttctatgtggatctgagcttcatttcaactgcatgaggtcatgcatgaggaagactccaggctagacctggaagtgatgcaagccgcttgtactcatagtcccttagtaagagttagtctccggttctatctacatactctacagacaaggaaagttggtgaacagagaagatagggaaggtgtatgcccagctcctgtgaaggagggagacttcatttgagtgaacagtaactctgtttctgggagacatcgaagaagctttaagacccaacagtgtagaaacatacttgtttccctggcctggtgagttcctacaggctgactaactgagcccagcccagcccagcagacatactaattacagagtggccaccagtgcccccaccagaacacccagagtcaccttctcttggaactctttcaattaacatacaaagtaatgggtttcttactaagttaactgatttaggaatactgatcttctaggttgatttgttatcttttttattattttagtatgttactatttttttatgtttatgggtttttttgccagcaggtatgtctgtgacccacatgtgtgcttggtgcctgctgaaggctagggtagggtgttagatcctctggaactggagctatagagttgccacatgggtgccaggaagaatagccagtgcttttaactgccaagccatttctccagcaccgggacgtttctgagacagcatctcactatatagctcaggatgcctggcaacaggttgtatatcccgaactgacctcagactcatgacagtcacctatagaatcacaggtgtgcaccgccacacctacatggatgctcttttgagttagtactcactgaatttgtcatgcttcttccatgacaaacgcttttttcactggagcattgtgggaatgaaattcctgcagatcactataattgccttcaaaccagccttatctatgtgagagcaattctggggagcgggggcacaaaactagtgggttttttttttctcagaacaaatgtatgaaaaagttcaaatccatgagcttatattcgaagtaggctctaacacaagcggtgggcaggccaggcactatggagttgcttaacccttagctaagagttagagcatctagtcttaggatcagaaactgtgggtttatagttctggctttgttcatttggtttgttttggtttgttggaactgtcatggaattcgctgtggagacaaggctggtcttgaactcagagacccacctgcctctgcctcctgaatgctaggattaaaggcatgtgccaccactgcccagcttagttctgttctgttttgttttgttttgttttgtttttagatttactttttattttatgtgtatggaatttttgcctgcatatatgtcttaaaatcaactttctttttttcttttttcttttttttttttttttttttttttttggtttttcgagacagggttcctctgtatagccctggctgtcctagcactcactttgtagaccaggctgtcctggaactcagaaatccgcctgcctctgcctcccgagtgctgggattaaaggcgtgcaccaccacgcccggaaaaaacaactttcttatattctcacttcaaacccaaagtaaaggcctttacttagtggcttcatgagagacagatgaacagatggagggatgggcagagagtcgaatattttagacccaaaaggatagtggcctgtcattgtcacaagcacaaatttgaatgaaaatataatgtttattctatttattttaataactagaaagcacaaagtaaagttcaaagatgtagttaaagaaaaaaaggaagtaaggtctgcatagtctatgaaagaggatttgagagtagagatttgggctattttcataggaagtgaagcaagatggggagaccaagtcccgtagttgatgctaacctcaaaggccggctgtgtgctatcttttgttcccaaaatataagaagcaggggagtacttgctaaccagtggccggcaaaaatcctttgccacgagtcctaaccacaaggctttcttgtttatttcttctagaatgcctgtcaaatccttctcaaacgtcttgagcccgtcattaagaaaaacccagaagggacatggagagactgggtaggtgctcctctttgtttctgtatgtgagaccatctcaggtgccacagcagtgagcagcctcccacataagacagttcctatccacagctttggaaagttttccgagctgggtctctgttagggatgtgttccaggtctgtgtggagagcacacacagggaagggcagtcaccgggaagaggaagggtgtgtgcagagcatcctgaagccccccactcagtttatggaggaaagaagagggaagagccacacaaaacactggtgctctgagagggaagagaacggaagacattgcaaaggaagtgacctcacagatcccacacttctttattaaattattatcacacacgttcactcaagcacactcacatacacttatacactgtcacacactcacaccttatattgttatcactcaaaaattaaccccaaataccttttcttcctttcttccttccttccttcnnnnnnnnnnnnnnnnnnnnnnnnnnnnnnnnnnnnnnnnnnnnnnnnnnnnnnnnnnnnnnnnnnnnnnnnnnnnnnnnnnnnnnnnnnnnnnnnnnnnnnnnnnnnnnnnnnnnnnnnnnnnnnnnnnnnnnnnnnnnnnnnnnnnnnnnnnnnnnnnnnnnnnnnnnnnnnnnnnnnnnnnnnnnnnnnnnnnnnnnnnnnnnnnnnnnnnnnnnnnnnnnnnnnnnnnnnnnnnnnnnnnnnnnnnnnnnnnnnnnnnnnnnnnnnnnnnnnnnnnnnnnnnnnnnnnnnnnnnnnnnnnnnnnnnnnnnnnnnnnnnnnnnnnnnnnnnnnnnnnnnnnnnnnnnnnnnnnnnnnnnnnnnnnnnnnnnnnnnnnnnnnnnnnnnnnnnnnnnnnnnnnnnnnnnnnnnnnnnnnnnnnnnnnnnnnnnnnnnnnnnnnnnnnnnnnnnnnnnnnnnnnnnnnnnnnnnnnnnnnnnnnnnnnnnnnnnnnnnnnnnnnnnnnnnnnnnnnnnnnnnnnnnnnnnnnnnnnnnnnnnnnnnnnnnnnnnnnnnnnnnnnnnnnnnnnnnnnnnnnnnnnnnnnnnnnnnnnnnnnnnnnnnnnnnnnnnnnnnnnnnnnnnnnnnnnnnnnnntgtcacagaaaaaaagctcatttccacctagcaagtagtatacctatctaacctctcttaaatatgcctattccacagatagaagcagcttttgaaaaaagaatcagtctttcagccactggatacttcaggtaaaactcaaaaaatatcttggcttagataagaaaatatgaggtaatccggttgctttgggcctcagtcctcattgataaaaaagattgtattatataattatgggagtatattctaggcccaaaattgtgtaaattcacataagcctctgagtaatatagttaaggaaatgttaaacaattaacaactcaaacaggattaaaggcactggtctatctgctattatttacatttatttgtttgttgattctggggctggggattgaacctaggacctcacacatgataggcaagcactctgccactggcctaccccctcagcccttactgttccttattgtgcgtagtgaatagatatcatcaccagaactaacctgctactcaactctaccaatctccctccctttattataaaaacctttctcctttgaagcaggggatgtggtaaaaaaaatcatttgtcttcatatatgcagttttgattgatggggggaggtgccccaacaaatttatgttcattaaatacagaaagcaaagagaagtgactatcacattcaagaaggatatggcactcctgttacaggttgtccagataaaccctcagactacacaggcatgagcagaaggaagtgctcattctctttagcacaatggcacataaccactgaggtgaatatgagggaacagcttgaatgagcaaaaaaaaaaaaaaaaaaaaaaaaaaacagttgaaacgtgcaccaggcagctgtacaatgctactgtaaaactgtggtggtggtattttttttttaaatgcacagactttgtgttttctgtgccactcccacccctccccccacctaaaggactttattccctcaggggctacaaggccttcatggactgggagaaaggagagggagacccattcccgtactatgtctatggagctgcatgttctgaggttgaaatcgactgcctgacaggtgctcacaaggtaggtcaacgctgccccgggcaagttagatcagaaacccaactggcactgtgcagaaagtggcccagcaccattacgtaattcgcaaaagagaggatagttctttccattccacgggaatttcaagagatccagtcttctcttggaatcgtcacataagataataataacatagcagtcaaaaggaaatggctgtgaccggctggatgtgactaatgtgttaaagttaccattgcttctccgacgacaaagtcacttcccagagttttacctattagtaagttttactcctcaaagagaaacaggtgaggtcatttagctcagccgatgttcatccgtagtcattattccaagaacagtatggatggccaaagggatagactgcggtggggtggggtccgaaaagaatgttgtgcctgccattgctcatcaagaagtcacctgcatagacaaggagaatatctaggccaagtcagcagcttgcaccatacgtggtaaacttgggatactctagattactctggagacaaggacaaaatattaaatagagtaaaatataaccaaagtgtagtaagttgtatcattaggaaaagtataatggctgcaacatatcaaaatacttctatttacttatttcttaacttctcttccacatcaatattattttaaaaaaatattttttgagacaggatcttaggtagcctaagctgcccttgaacttgctgtgtagtcaaagataatctcgaattctgatcttcctgcttccatctctcaaatgctgggcttgtaagtctgttaggcatgtccagtgtgtgcagatgcccacgaccacacccacagccttctgcatgtgaggcatgcactctaccaaccaagccacacccccagcccattaataagattgtttaaagacacagtgtctaaagagaaatgccctcctgtttaattcaggtttccctttaggatatattaatattattcaacgcgtgtttacattgattttccctgggggtggggcatgccatatggcactgtggagatcagaagacagcttatgagagaagactcactccttccacttcatgggccccagggatcaaactcaggctgtcaggcctggcagcaaacacctttaactgcggaggcatcttgcctccctctgtggctccattttcatttgaggtcatttttctttaagaggaaaactcacgtgatcacagactgttcgtgtctcattttagactccatttctggtgcttttcacactgaggcacacatagataatatttgtgcagcagccccggggaaatcaacctggggcctgtctcaggttcccctcaaggcccacaggccagtgtctctgctttcctgagctccgccttactggggagctggtgttgatcagctagtcagtcataagaccctgcccgctgacaggggtgttgccaaatttagcaaataaaagcataggctggttaattcaacttgaatttcaagtaaacaacaaatatgttcccagcataaatatgccccacacaagtcttgggtcatagttattttacctgtcaactctatctgaaggctttaaagtaaatccttaaaaaaacaaacaaacagaggaatcttccagaatacatggtgttaaaatctggtcttttctgtgccttccagtttatacatataggtaaaggttcagaaatttcagtattaatgttgatccctgaaaatagtttactctattcagagacactaaatgactgtcccactgtggccagttctgtgaggcagttgtctggggatgtccagctggtaagcaaaggtttctacctaccatgtcaccatctccttcccctgtgtattaccacagcactgactgctcttccagaggtcctgagttcaattcccagcaaccacacagtagctcacaaccgtctgtaatgggatttgatgctctcttctagtgtttctgaagagagcaacagtgtactcatatacataaaataaataaataatcctttttaaaaatgtttaagagaaaggaaggaagtccaaatgtattcctgagatagcccagagacacttaggagctttctgagactcccagtaaccaatgggctctctctctctctctctctctcacacacacacacacacacacacacacacacacacacacacggggctggatcatttcactgtttctcagacaaggaagcagatccacaaagtctgagaatcagagttggcttcagcacttaacccctcccccctcctaaaaccttgcaagccccttataaacttatacatgtcccggatgattctctcagctacaatgccacctgcatccagcccttgtgacatgctcatgaattccactagagtcatgaaggaagccaggctgagaatcgggtggacaggcaggctcaattatttaccagatgactcactcacacacactagcatgccctggactttggactttttgtcaggtctcttcccagctctgaaaccgagaagactctgggcagtgtttctgggatagcaagaaactctttgtagttcatttcttcactgaagggattgaaggggggggggggacacatacaccccagtacacatgtggtggttagacagcttctgtaattcaggtctgacacatgggttcagggtttgaactcaaggtcactgtggcagcaattgcctttgttctgagctaacctgaaaataaattttatttatttatttgtgtgtgtgtgtgtgttactgaggatcaagcctagggccttgtgcatactagacaaacactctaacactgagctgtatcctccacaccttaaaataatattttatttcaagtttttataaagaagtaatttttttaatctgtctcagaaaatcagaaccgacattgtcatggatgcatgttgcagcctgaatccggccattgatattgggcaggtaggtgctggcccaactgagtggaaaccccttcctaagagtggtcgcagggtacttaaggcttaaaactgtcccctttcagatcgaaggtgcatttattcaaggaatgggcctttataccaccgaggagctactctactctccagagggcgtcctgtactctcggagcccggacaagtacaaaatcccaactgtcactgatgtcccagagcagtttaacgtgtccttgctgccgtcctctcagaccccgctcaccctctattcgtcaaaggtaagaaagtgaaccagccggcccatgtgcagcagcctaggagcatggccagagcaagccaccagacaaaacaaagactgatgctcatggttatctggaccaggccccttggagaccacctgcctaaaaaaacctggggtcaaggaaagagaaatccctccggggaaaaaccctggatcctcatttcattaacaccttcactgactaaaagttatagagcagcttgggcttcttgggagaggaacactttttatttaaaacgttatctatgtctttcttttcttttttctttttctttttcctttttttttttctttttgagggaagtggggttttttgtttttttgagacagtttttctctgtgtaaccctagctgtcttagaacttgctctgtagaccaggctggcctcgaactcatagagatccaccaccagcctctgcctccaagtgctgggattaaggcttgtgccataactgcccagctgtctgtttcatttttagttttttgagatggatcttagggagaccagaatgacttcaaactcaaactcttaatcctccagcctccacctcccaagggctgggatgacaagtgtgtgccaccatgcccagctctcatctaagatctgagaagacgtcagggtctagagaaatggccccagctccagcagtaaggaacttgccttgaaagcacgagagtgtcagctcgatcactagaactcacataaaaattctgtgtgttgtactcttgtaaccccaagactcgggaggcagagacaggaggatctctggggctctcaggccagttggtctaaattaattggtgagctcaaggccagggacagactacctcaaaggaagtagagagcatttccaaggatagtaatttgaggatgccctcactgcatacatcacacctgtgcacaagcacacacacacacacaaaggactgggcagacgaagaaggcaacattgagctgggtatggtagcttgaaccaataaccccaacagagggtaggctaaaacctgccagggctatttagagttccagagcagcacaagttagccatgtctcaaaaaacaaaacaaaacaaaacaaaacaaaacaaaacaaaacaaaaaacaaaaccaaaagaataaatgaacttgaagatatgataccattgaaactgtagatatcagtggactggaggcctgggttcctaccccagcccaccatcctcctttgctcttaggtaaattgcccacctccgagggactcttcagtcaagcccagaaatcaatctagaacagctcttaccaactgtggtgagaatatcctactccctaccaagacagacaggcaggcaggcaggcaggcacacatacatacacacgcatactcgccaggacacacacacgcgcacacgcacacacacacacacacacacacacacacacacacacacatgaaactgataatatccagatgcatttctggctgacacaatttaaaggattttaaggcaatgctcagaggccaagggtatggctaaacagcttcagtatgcaaggcagctcctacaataaatgatcatgtgacttaaaatgtcgatagtgtcaggaagcaaagacactagacaacctttaataactaaaggaaaggaagagcaaattaaaataaaggtcaactttgtttgccttgctttacgtagatcatgacaaaattcagataaaacctcaccaaggagtgaggtataaagtctcccttaagctgggcagtggtgggcagtggtggcacacacctttaatcccagcacttgggaggcagaggcaggcggatttctgagttctagcccagcctggactacagagtgagttccagggcagccagagtgagttccaggacagcctgggctacacagagaaaccttgtctgaaacaaacaaacaaacaaaaagtcttccttaaaaatctttggggagagcctgcagagatgactcagggggttaagagcactggctgctcttccagaggtcatgagttcaattcccaacaaccacatggtggctcacgaccatctgtaattggattcaatgccctcttcacataaaataaataaataaatcttaaaaaaaaattctttggagaaacttctagataggagttgttacatctcaaaccctgacaaatgactaacatttaacataccaaagtagacccggctgccaggttctcccagcatccctcagtattaaaagatatggctggcataccttaaatttctctagcccagggcctggtctgcccttcctatataatacaaccattttggttaccagccccttttggtctaccctctacccctgtggcctattggtcacctggccctctctcttctgtctcacatggcctggtcatgttcactctggactctcccagatatctgcctttgctcaccctttctctaccttttcctaggaacagtcacatctttttttcttacttacttttattctccattcaggaataaattgattttcttttctgaaacaagaaaaatatatctgctggaattccatcatttccaaactgaattccccttcagcctaggtatcgcctctggacttgggttggcgaagccatcacagactcagagggaggggcaccaacaggtccttctgactctggctggtctagaagccatctgaggggggaaggccagaggcagcccagagcctacagagaacagcttcaggttaagagtacccaggcagtgcacccagcatggtaggcatgccggtaatcccaatactcaataggtagatggagaaggaacatgaattaatgccagcctaggctacaaagcaagatctctctggaaaacacacaaggaccaagaaggacatggtgatgagtgagtgcctatggtactggggaggtaaaagcaggaagatatgtggatattcaaagccagcctggtcgactccatggtgcattttacagtccaggttccacagtaagaccttgtctcggaaaccaaaaaatgaaaacaaagattggggataaaagtcagcaagaaaatgcttgcttagtgtgcacacagcccctggttcaattcccaccaccaccaaaaacaaaacaaaaaccacaaatacagaaacttttctgaaaaagaagacggctctggttattttgggtgcgttcatggaaggtaacaattatcagaagcaaagaatggctgtcccctcagacagaccgtggagggggtctctgtctctccacagaacccagttctcctctccttattgtccttcacctgcccgcatggccctcgaattcctgcctgttgcctacacgtgaaggtctgtcatcgcccaagtcttcctctcctacactactgtactatagtatagtatacactactgtactataggttagtatatactactgtactgtagtagagtatacactactgtactatgggttagtatatactactgtactatagtatattatacactactgtactatgggttagtatatactactgtactatagtatagtatacactactgtacttgttagtatgttatccgctaacacaagccagggtcctctgggaagaggaacttcaactgagagaatgtttctatcagactggctggtaggtgagtttgtgggggcattttcttgactcaggatttgatggggggtgggggagccactgtggtcagtcccaccctgggcaagtggtcctgggttctataagaaagcaggctgtgcaagccagtaagcagcatccctcgatggcctctgcattggtttctgctttgagctcctgccctgactcttcttcataatcaggatctgtaagccaaataagctcttcccaaatggctggtgattctgttgtttccccccaacaatgaaaagctcaggcaagtatgctgcttcccttagccccaggggcataatgaggaactatttccccctctgcttatgaagctggcaaggtcaatccattgactgttctaataatggtgcccttctcttaccccacagaaacacatggactgcacgtacatgtaagcaagtgtgcatcccttcccatagaacaaatacttaacccagacagaactgaagatgtagaaagttcccatttaagaagtgatttataaagccaggcggtggtggcgcctttaatcccagcacttgggaggcagaggcaggcggatacagtgctgaacaagatgacgccctgtcccaaagtagcttgttgtctactatagaagcttttaaaacaaatgcactgtagaggcaggtgacctctgtgaattcattctgatctacatagtgagtttcagaccagccagagccacaaagtgagaccctgtctcaaaaggccaataaaatagacaaatgtgttttcttgcagggcctcggggagtctgggatgttcctagggtcatctgtgttttttgccattgttgatgcggtggctgcggcacggagacaaagagacatagcggaggacttcacagtgaagagcccagcaaccccagagtgggtgcggatggcctgtgcagatcggttcacggacatggtagggagctgctctgttcctgcaagctcactgcaacttcctgctcccttggcttctgtgtcagtttgtgacctaacctgtgtctaatcaagctataaagtgatagggcgtggtagtaaatgcttgcaatcctggcagctgggagactgaggctgaattgtcctgtagtggctcagacattcatcctagtctcctgaacacagcaatgaggacagtcatctgcctccaaccagtgcctcctccacggacagaggcaggaaccagacacctctcaactcagggctcctgcatagcactctcctggtcttgctcatcacagggccactgtaagatcaccttgtctcttactcaaaagcttaagcacatgtgaccttcaaaacagtgctctgggtcccattttacagggtaggcatccttttctggagtggacgcagagcaaggaaagtaaacgcacgtaataaagagcgcctcggaaatttcactgctcatccgagcctccttctcagcctcctcacagcctgactgctggaaaatggcctcctgcatttccccagattcagactgtttttagccagcgcgttgtttggcagagctgtcacatacagtgggaaggagtgactcacttagctcttactcacagttcaggccaggcggctgggctccgaggcacatggggtgagacagcattttctgccaagtctgatagttccttgctgagaccttgtcaatacaccctggtggacaccagttgtctactaactatgcaatgcccatcaatcagacacttttctcaatgtgaaagtagtctcaaactttctaaaatattcatcaatggctcctagatatcgcttcatagtagggcctatatttaatattgtaaggctcattttaatagtgttttacattttgtctttataaaagtaacacatgctatgcttgatggagcacttgaggggaagggtggataggcttgtcagttcaaggccagcctggtctacacagtggttcccagaatagcctggtctacataataagacactgtataagaaagagagaaagaaagaaagaaagaaagaaagaaagaaagaaagaaagaaagaaagaaagaaagaaagaaagaaagagagagaaagagaagaaagaaagaaagaaagaaagaaagaaagaaagaaagaaagaaagaaagaaagaaagaaagaaaggggagaaagaaagaaagaaagaaagaaaggggagaaagaaagaaagagagagaaagacatgtccactttagaaaaagagtaagatggaacttgaaatcaaccataatcctttcaaccagaaatgactgtttgttgtgagaatgtgcatgtgtgtttggtacatgtgtgcgtgctcttgtgtgtatacttgtgttcatgtgtgtttgagtgtagaagccaggcctgatactgacactgggcatcttcctagattgatctccatcttacatttttagaatttattttcttacttatctatttgatatttatttatttatgtgtctttgcacatatatgcctgcctctgtgtgcagatatctgcaggcacccactgaggccagaagacagcactgaattcttgggagctggagttacaggcagttgtaagcctgtgagttacctgacatggcgtttggaaatgaaactctagtcctctgagttaaccattgggctatccctcaagcaccattactattacttactgttattataattctaaataaaattccctagagctctctggtcggttggctaaaccagtggtttgcaaacttcccaatgctgcaacctttaatatggttcctcatgttgtggcgaccccatccataagagttgtcttagtcatggtgtctcttcacggcaatagggcataactacgcttctgaaagcccaactcctccagcaaggccccctagcacctctaaatagtgccacttcctaatgactaagcattgaatatttgcgcctatgggagccattgttttgttttgttttgtagacagggtttctctgtgtagccctggctgtcctggaactcattttgtagaccaggctggcctcaaactcagaaatcctcctgcctctgcctcccaagtgctgggactaaatgagtgtgccacccctgcccggctatggggggccattcttattcaaaccactataccctttttgagatcagtgtgagctgtcagcaaagaggaaataactcaaagccagccttgagcgaagtgtcccaaggagagcaaattgacagtgttttacaggaggcaagaaacacacaaaataatctgcaggaaatgtcaatattcctctatccagtgaaaagcagccatgggtacatacttgtgataccagcccttgggggctgaagcagaagggtcatgttttgaggccagcctgggctacattgtcagatcctgtttttaaaaaaaaattgtgtgagatgtgtgtatacaaacacatatatgtgtatgtaagnnnnnnnnnnnnnnnnnnnnnnnnnnnnnnnnnnnnnnnnnnnnnnnnnnnnnnnnnnnnnnnnnnnnnnnnnnnnnnnnnnnnnnnnnnnnnnnnnnnnnnnnnnnnnnnnnnnnnnnnnnnnnnnnnnnnnnnnnnnnnnnnnnnnnnnnnnnnnnnnnnnnnnnnnnnnnnnnnnnnnnnnnnnnnnnnnnnnnnnnnnnnnnnnnnnnnnnnnnnnnnnnnnnnnnnnnnnnnnnnnnnnnnnnnnnnnnnnnnnnnnnnnnnnnnnnnnnnnnnnnnnnnnnnnnnnnnnnnnnnnnnnnnnnnnnnnnnnnnnnnnnnnnnnnnnnnnnnnnnnnnnnnnnnnnnnnnnnnnnnnnnnnnnnnnnnnnnnnnnnnnnnnnnnnnnnnnnnnnnnnnnnnnnnnnnnnnnnnnnnnnnnnnnnnnnnnnnnnnnnnnnnnnnnnnnnnnnnnnnnnnnnnnnnnnnnnnnnnnnnnnnnnnnnnnnnnnnnnnnnnnnnnnnnnnnngaacagagtttatttacagcagcatcctgtaaggaagcctattacatgcaggcgacagtcttacataacccaaactgaccttacatctgctatgtagtccaagataactttgaagccctgggattacagggcctgtgccactgaatgaaaatatgaaataagaggaggaggagaacatttttattgtcgagaaagcaggcggagggggttggggatttagctctgtgatagagcgcttgcctagcaagcgcaaggccctgggttcggtcctcagctctggggaaaaaaaaaaaaaaagacaaagaaaggagaaagcaggcagagggaagagtccaagctgaccatggccagcagataaaacctgaacatgagaggagagagggggagggagagcaagacaggaatcactgcaagacgaaggcagcccaggccatgatgccagaaaatcacacagcaaagctggctgataaagggagcaggcaggaggaaaggaaggagaagctcagctcccaagagagaggggtttagcgtaggggcggggcgaggagacctaggaggagccacaagttctgagtgttgctgggagagctggccagtgtcagctctgatatgtaaataagtacctcagccttttgtccagggtttctgagacctaacatacacaattttttagttgaagatatgctgagctaaagctggggctgtagtttaatagtagcatctttgcctagcatacgcaatgtattgggtttggtctcaagcacagagagaagaaaaaaagaaaaagaaaaagaaaaaaaaaaaaaaagtggaagggatagccaggcggtgttggtgcacgcctttaatctgaattcgggaggcagaggcaggtagatctctgagttcgaggccagcctggcctgtagagtgagttccaggacatccagaagtacacagaggaaccctgtctctcgggggtgggggggggggtgagtccaagagaatatataatgattcacattgacccagaatgctgtaaccatgtctaaaatactatttttttttcactcagatggcatggacaggagaattatatgctacctagtgaattccaggctagccagagctaaaggaagactctggagagagacagagacacacagagagacagagagagcaagacagagaaagagacagagagagacagaaagggacacaaaaaggaaagaaagaagaccctgcctcaaaagagagagacagacagacagacagacagacaggggttgggggagggataaaaggaaagaaaaggttccgagtacttgtattcctgagacccccatccggctgctcacaaccagctccaagagatggagaagtggaacactttctcctggtctctgtgggcacctgcactcaaatatacacagaacataaatagtcgcagattttgtattctgaaataaaaatacaatttgttctaatgactaagaaggtgacgaataactaggaaaggtctgtgtgcaagaacacaggtcttggaaagttcggaacctcctcctttggcaacctcttcctcgtcattagagaaataacaggtcacctggacttttttcttaaacagaaatgatggtaaaatactcggtattttccccttggaattaaatgaaataatgcgtgtaaaaatactgggtaaatatgagtcgccccataaacactagaattaagttttccctgaatacccataactgttaatgaccttcaaaacaggcctcacctacaaggctgatgaatatttccacattaaaccaaggtgacctcctgaggccagaacaaacaggaacttgcagaacctacaactaaaagtcacattttcattttcatggggaaactagtgagaaacttaagaactggattttttttttttaaagtcagggtttctctgtgtatctttggctgtcctggaactcactctggagcccaggctgaccttaaactcatagagatctgcctgcctctgctgggattaaagacacttaccaccgacaacaacttaatttaggatattttgttatcaaaacaaaacaaagctctcaatgagtaagcttttgtatacagagttttgttttccatggcgtttgcttgtgtccatggcgtttgcttgtgtccatggcgtttgcttgtgtccgtggcgtttgcttgtgtccatggtgtttacttgtgtcgcgtttgcttgtttacttcctgtgtgcgggaggctgtgggggggtcagagggtaacttgctggaagcggttctccttttactcttgtgggtccctctcccnnnnnnnnnnnnnnnnnnnnnnnnccccccccccccccatgagccttctcaccagccctatgcagagctctgcttgagtgtcgggtttggtcctttcttggaattaatctctggtgaaaagcagtggggatggttctgctctgaaccggtctgatggccctggacaatggaaaacactatctctgtcattttcgttttggtgatgggaggaagtgaaagaccccctaagggagacccttctcagaaggcgcgcacccagtaagacgctgagaccgaacttgctgtaaccacaagaggctttaatggcacacaaacacaaacaacaaaggagcgctcaagccagcatgctgggatcgaaactcatgcaccgcgcagggggcagaggagtttgaccccggcccaaactttttacaggcttataaaggcaaaaaccacaaaccaaaagggcggagccgaaagaattggcacagttacacatgattggctcatttaaatgtcagtggggtgattacaagttaacagggtagtacgtgccagcttaggtgtagggaggcacatggacttgggatttatggaggtcagcaggggacctggtcaatgtatgatttatggtgggctagagggaggcaccgcctgggaggcgccatcctgccaaatggccatttggtcctgatagccctggccagttcctgcgtttttttctttatcttttatggccggacgttcccagctatagggtgggtctggctgtgcctggacccgcctgggtctattctttacaacatttaaccctgaatttcttgaacttagataccacaatgctataagacccaaaattataagtttttgctcttcagaagaaaaatgtgttttgtataattatttacaattctgcaagaaaaatcccttaaacatatttttaaaaagggaaataataaagtttcaaattagtacttcttagaaacaagattgtaaacacttttaaaagttttttttaattaatttatttatttattaatttcacgtatgtgggtcactgtcttcagacacaccagaagagggcatcctctcccatcacagatggctgtgagccaccatgtggttgctggnnnnnnnnnnnnnnnnnnnnnnnnnnnnnnnnnnnnnnnnnnnnnnnnnnnnnnnnnnnnnnnnnnnnnnnnnnnnnnnnnnnnnnnnnnnnnnnnnnnnnnnnnnnnnnnnnnnnnnnnnnnnnnnnnnnnnnnnnnnnnnnnnnnnnnnnnnnnnnnnnnnnnnnnnnnnnnnnnnnnnnnnnnnnnnnnnnnnnnnnnnnnnnnnnnnnnnnnnnnnnnnnnnnnnnnnnnnnnnnnnnnnnnnnnnnnnnnnnnnnnnnnnnnnnnnnnnnnnnnnnnnnnnnnnnnnnnnnnnnnnnnnnnnnnnnnnnnnnnnnnnnnnnnnnnnnnnnnnnnnnnnnnnnnnnnnnnnnnnnnnnnnnnnnnnnnnnnnnnnnnnnnnnnnnnnnnnnnnnnnnnnnnnnnnnnnnnnnnnnnnnnnnnnnnnnnnnnnnnnnnnnnnnnnnnnnnnnnnnnnnnnnnnnnnnnnnnnnnnnnnnnnnnnnnnnnnnnnnnnnnnnnnnnnnnnnnnnnnnnnnnnnnnnnnnnnnnnnnnnnnnnnnnnnnnnnnnnnnnnnnnnnnnnnnnnnnnnnnnnnnnnnnnnnnnnnnnnnnnnnnnnnnnnnnnnnnnnnnnnnnnnaacaagccagacacggtgatgatgtctttattcccagctctttggaggcagaagcatatggatctctgtgagttcaaggccagcttggtctacagagagttccaatataggaaataaggaaggaagaatgaacacaggaacaaacctgggaccttgttattatcagtagggggaaatcaagtagttacaaagctgtgctctgtctagatgtagggtgtggtacagagctgtggtctgtgtgagggctctggaggtgggtgtgctagcctggcctcacaaggccctaaattcaatccccagcgcaggaagaaggaagaaagaaagaaaacatgagctctaatgggatgacagtgtagaagtgcaagtccagccaagtatcagaccgtttccgtttccaggaagccaagctcacacggctccacctggaaacaaatttgaaaatgtgtttttagttcacagcacagtgtgaatcgcagccttgtcagtgctgagtcagggaggagactcccagccagcagtcagggaaagtcctttccttcttagattagtctccattccaaactgccagccccgccctagacaagccctgttactgtgtaggtgactgacctagtttctgaagcctttcctttcacttgcaaaccctaagggcattcccagccaacgactccccttcctctccagcgcttgccatctccgtatctcatgttctctgcctattcttttctggatgccaaaactcagtgacccttagtaacattaatggggtcacctactccattaaagggagccccttcctctcagactgcagcggagaagaggtgagaagataatgccctgcccagtgccccgtctacctatactagccgctcagtacctatactagctgcttagtatgaggtatgctggaccctcattctatacagctcaggttgctctgcactagaggagttggtactgccagccctataggactacattccacttcctggggtgcatatactgcatcaagtagaaacatgcggccctcagtgtgttctgctacaatcacagccacagataattagcagggccctggcccagcacagacatgcctcagtcacacggattcatagggccagaaggcagaaggaagctgcaggactggactgacttctcagactatagtgtccccagagtactgaatctagtctcctgagacgcatggatatgcatgtgtgcacacactcattcttcacattattctctcagctcttatgctgtcttggaagaggtttggcacatagcttgttgaccaagcccgctcagtcaacaggttctccagcacaggagtgaggattgaaagaaaaaaggcaataaggcaacattgcagcatgaccccagccaattctgaggctgaagctaaggctgaggcaggttttattttatttttcccaatctgcttttataccattttaattacatgcaagtaataaggtcagttctaggttaaggaacaagcaagacaataaacacagtctaggaacaagcaaggcaataaacaaagtctcgtgatcactcctacaatcactgtttctaagggcttaacaggatgaccaagaaatctgagcctacttccctgtcctagcccaaagtcatattcttacccgaagcctacttctttgttctagcctaaaattacattcctacctgaacttacttccttgtcatggcctaatgtcagattcctgcctaaagcccatttccttgtccttggccaatgtcagattcctgccaagcgccccccaaagctctccacagcttgtaaaactggttctgctttaaacatggatgcctaggatgcaggaactgtatttgcccgctgcaggaactgttgacgcttgacacagcagttgttctactacagaatcggtcttctctggcattgctttggtggtcatggtggagatggtgtgcagtgggttttattgcagtgctagcaatgagaagcaggcctttcatacaggcttggtgtacactctacatctgctactgtttttgaatatatatataattttttaatttaaaaaattcccctgctggcaaaaggatcagaaggttatggtcatgctcagccaaaatgaatttgaggcaagcctgggctacataagaccctgtctcagagagaaaacaaaagttccctgccctgaggtgcccatctgaagagcatctggtgtggtccaaaccagagggccactgagtacagaagtcctcatttagttcctgctggcttaccaaagttaaccttgaactgtgctgtcctagttgggtagctatcctaattcagaaaaccaacctgttttcctgtagtctgttgatttttttttcccccacaacagtgtgtatcagtagcagcatcttgtctgaaataaagccattcatttggaaaagtcagttgagaggtagtgagatggctcagcaagtgaaggtctgtgtgtctgtctctaacaaagggctatgctttctcttttactgaactgcacagaaagcatcacacagggaaaagaatgagggacactttacagaaatcttctacagagtgttacaagagattaggtcattgactccaaatgaccccaactgaccagataacaattatccttgtttatcagtggatacccataagtgtggtgttcagctcttatggtggctattcattttagaagattgcttttgacttcagtattcaggacagagtatacatgcattgttctaagtcagggacatggaaaagtacataattaaagacggtagctatgcattcatttagactgtaaaagttgacagtgcagttgatcgtcctgttgttctcttaaaagcaggagaaacaaatgggctgagtacacttaagggtttttttgttttgttttgttttttggggtttttttggtttgtttgtttggggggggttg

SEQ ID NO: 586 - DNA, 3348 bp, Mus musculus
atggcatgcctggtgcccctgtgctccctgcatggggctgctgtcaccaccgtggaaggtgtgggaagcatcaagaccaggctccaccccgtgcaggagaggatcgccaagagccacggcacccagtgtggcttctgcacccctgggatggtgatgtccatctacacactgctcaggaaccacccgcagccctcagaggaacagctcatggaggccttgggagggaacctctgccgctgtactgggtatcggccaattctggagagcggcaggaccttctgcatgatttgcacgaagctatttgtgaaagacgagttccagcccttggacccgacccaggagctcatatttcccccagaactcctgaggatggctgagaacccagagaagcaaaccctaaccttttatggagagagaatcacctggatcgccccaggaaccctccaagaactcttggtgctgaaagctaagtaccctgaagctcctctcatctcgggcaacacagccctgggactgaccataggtgcctgctgcagcctggctcaggtgaaggacatcttggctgagagcatctctgagctcccacaggagaaaactcagacctaccgagcactcctgaaacacctccggagcttggcgggacagcagatccggaacatggcgtccttaggaggacatgttataagcaggcattgctactcggacctgaatcctatcctctctgtgggcaacaccacactcaatctgctgtcagaagaaggcccgcggcagattcccctcagtggacattttcttgctgggttggcaagtgcagacctgaagcccgaggagattctggggtctgtgtacatcccacactctcagaagcgggagttcgtgtctgccttccggcaggcccagtgccatcagaacgccttgcctgatgtaaatgctggcatgagagtcctgttcagagaaggcacagacgtcattgaggagctgagcattgcctatggaggggtggggcccaccaccgtcagcgcacaaaggtcctgccagcagcttctgggccggcgctggaacgcactgatgctagacgaggcttgcagactgcttctggatgaagtctcccttccaggctcagccctgggaggcaaagtggaattcaggaggactctgattgtcagcctcttcttcaagttctacctggaggttctgcaggaactgaaggctgaccagaagctgcccccggagtccaccagagtagattctcaccaacctctccaagatccagttggacgtcccatcatgcacctgtcaggtcttaaacatgccacgggggaagctgtattttgtgatgacatccctagggtggataaagaactcttcatggctttagtcaccagtaccagagctcatgcaagaatcatatcaatcgactcatctgaggtccttgacctgcctggtgtggttgatgtaataacagctgaagacattccaggcaacaatggtgaagaggatgacaaattgctggctgtagataaggttctctgtgtgggccaggtcatctgtgccgtggtggcagagactgatgttcaggcaaaacgagcaactgagaagataaaaatcacctacgaggatctgaaacctgtgattttcaccatcgaggatgccataaagcacaattcgttcctgtgccctgaaaaaaagcttgaacaaggaaacatcgaggaggcctttgagaacgtggatcaggtagctgaagggacagtccatgttggaggacaagaacacttctacatggaaacacagagagtgcttgttattccgaagacagaagacaaagagctagacatgtatgtgtccacacaggacccagcccacgtacagaaaacagtgtcctctaccttaaacatcccgatcagcaggatcacctgccatgtgaaaagagtgggtggaggctttggaggaaaggtggggaggccagctgtgttcggagcaattgctgcggtgggggctgtcaaaactggccatcccattcgtcttgttctggatcgtgaagatgatatgctaataactgggggacgacacccattatttgcaaaatacaaagtgggattcatgaacagtggacggatcaaagccctagacattgaatgctacatcaatggaggctgcacattggatgactcggagctggtaacagaatttcttgtactaaaactggaaaatgcatacaaaatccgaaacctcagactccgaggtcgtgcctgcatgacaaacttaccatccaatacagcttttcgtgggtttggcttccctcagggagccctggtaacagaatcctgcatcacagctgtggcagccaaatgtgggcttccaccagaaaagattagggagaaaaacatgtacaaaacagttgataaaaccatctacaagcaagcgttcaaccctgaccccctgataaggtgttggaatgagtgtctggacaagtcttcctttcacatcagaaggacaagagtggacgagttcaataagaagagttactggaagaagcgaggcattgctattgtccccatgaagttttcagttggctttgctgcgacaagctaccatcaggcggctgcgctcgtccatatctacaccgatggctctgtgttggtggcacatggaggcaatgaactggggcaaggtattcacaccaaaatgttacaggtggccagccgtgaactgaaaatacccctgtcttatctgcatatctgtgaaacaagtacaacaacagtgcccaatacaatcgctacagccgcgtccgttggagcggatgtcaacggcagggctgtgcagatagaagcagcttttgaaaaaagaatcagtctttcagccactggatacttcaggggctacaaggccttcatggactgggagaaaggagagggagacccattcccgtactatgtctatggagctgcatgttctgaggttgaaatcgactgcctgacaggtgctcacaagatcgaaggtgcatttattcaaggaatgggcctttataccaccgaggagctactctactctccagagggcgtcctgtactctcggagcccggacaagtacaaaatcccaactgtcactgatgtcccagagcagtttaacgtgtccttgctgccgtcctctcagaccccgctcaccctctattcgtcaaagggcctcggggagtctgggatgttcctagggtcatctgtgttttttgccattgttgatgcggtggctgcggcacggagacaaagagacatagcggaggacttcacagtgaagagcccagcaaccccagagtgggtgcggatggcctgtgcagatcggttcacggacatg

SEQ ID NO: 587 - protein, 1100 aa, Mus musculus
MACLVPLCSLHGAAVTTVEGVGSIKTRLHPVQERIAKSHGTQCGFCTPGMVMSIYTLLRNHPQPSEEQLMEALGGNLCRCTGYRPISGRTFCMICTKLFVKDEFQPLDPTQELIFPPELLRMAENPEKQTLTFYGERITWIAPGTLQELLVLKAKYPEAPLISGNTALGLTIGACCSLAQVKDILAESISELPQEKTQYALLKHLRSLAGQQIRNMASLGGHVISRHCDLNPILSVGNTTLNLLSEEGPRQIPLSGHFLAGLASADLKPEEILGSVYIPHSQKREFVSAFRQAQCHQNALPDVNAGMRVLFREGTDVIEELSIAYGGVGPTTVSAQRSCQQLLGRRWNALMLDEACRLLLDEVSLPGSALGGKVEFRRTLIVSLFFKFYLEVLQELKADQKLPPESTRVDSHQPLQDPVGRPIMHLSGLKHATGEAVFCDDIPRVDKELFMALVTSTRAHARIISIDSSEVLDLPGVVDVITAEDIPGNNGEEDDKLLAVDKVLCVGQVICAVVAETDVQAKRATEKIKITYEDLKPVIFTIEDAIKHNSFLCPEKKLEQGNIEEAFENVDQVAEGTVHVGGQEHFYMQRVLVIPKTEDKELDMYVSTQDPAHVQKTVSSTLNIPISRITCHVKRVGGGFGGKVGRPAVFGAIAAVGAVKTGHPIRLVLDREDDMLITGGRHPLFAKYKVGFMNSGRIKALDIECYINGGCTLDDSELVTEFLVLKLENAYKIRNLRLRGRACMTNLPSNTAFRGFGFPQGALVTESCITAVAAKCGLPPEKIREKNMYKTVDKTIYKQAFNPDPLIRCWNECLDKSSFHIRRTRVDEFNKKSYWKKRGIAIVPMKFSVGFAATSYHQAAALVHIYTDGSVLVAHGGNELGQGIHTKMLQVASRELKIPLSYLHICETSTTTVPNTIATAASVGADVNGRAVQIEAAFEKRISLSATGYFRGYKAFMDWEKGEGDPFPYYVYGAACSEVEIDCLTGAHKIEGAFIQGMGTTEELKPEGVKRSPDKYKIPTVTDVPEQFNVSLLPSSQTPLTKSKGLGESGMFLGSSVFFAIVDAVAAARRQRDIAEDFTVKSPATPEWVRMACADRFTDM

SEQ ID NO: 588 - DNA, 62154 bp, Homo sapiens
gaaagaggttgtttcagttttgccatcagccagaattggactttataaaatactcccagactgcacacacctcccagacattgcatcacacctttgggctttgtgatgcaatgactagaattacccacagcgtccctaggagctcattctgaattatctggaaataagccagctggaacttgggaagagggcttcacctcccttctctagtgggaggggcttcaccaaaactcagcttcccagggaaccagtgactcctcacccttgactggagcagctgtaacttttcatgggctccacagttcagtgaggggtggcagcattcccagacaactcctgtgtattaattatacatatatttgagtgccaattgcaccccaaatccagacttcctggtgccagacaacttgttcattccccaatcaagtccactttctcatgcttactctatgaaaagggcacccatgatagggtcggggtcccccctctagaatgcagacccacactgggacccaagacctccttacttgagaacagagatctccccaggctgccctcttggaagaacagagggcagaagccttactgagccaaatgtcctggtatctggagaagggcaagcgcaacatctcattttgagaggggacaagtggagatatccctggtttggtcagctgaacttgaagaccaaagccaagagtaactcattcaatgctggttactcagtgacccaggttccaagcaagtctctcacaaagctttaatgagtacctgcccctagagtaaagtaatgaagacaataccgagtgctgtatgggtcatgcctcacttaacaacagggatatgatctgagaaatacatctttaggcgattttgccattgtagggacatcatagagtacattttcataaatctagatggtatggcctaccacacacttaggctatacggtctagcctattgttcctaggctctaaacctgtgcagcatattactacactgaatgctgtaggcaatgataacataacggtaagtatttatgtacccaaatatatctaaacatagaaaaggtacagtaaaaacctggtataaaagataaaaaatggtacacctgtataagactaaaagttgctctggctgggtcagtaagtagtgagtggatgtgaagacctagtacactagtctagactttataaacactgcacacttaggctacactacatttattttaaaaatatttaggtctggtgtggtggcttacacctgtaatcccagcactctgggaggctgatgcaggctgatcacttgagtccaggagttcaagaccagtttcagcaacaaggggaaaccctgtctctacagaagaaaatatgaaaattagccaggcatggtggcatacacctgtagttccagctgcttgggaggctgagttaggaggatcacctgagcctgggaggtggaggtttcagtgagccaagatcatgccactgacctctagcttgggcaacagagccagaccttgtctcgaaaaaataaagttaaattaaaaaataaagtaattatgccacaacactatgacagctatgatgtcactaggcaataggaatttttcagctccattataatcttttgggaccactgtcatatatgtggtccactgttgactaaaacatcattatgccacacatgaatgtatttaaaacaacccttcaaagtaggtattactgcccatataattcaaacaaaaatactttggagagcaaagggagccattggcattaatacaaagacaaccagtgtaaacagggattgtcctgggcaaagcaggctatgtggtcacctggttctggtatctccaggtcacagacaagatccccacggcatggagagtataagtcatccacatactgagaagaagcagagctattcaatcacagggatgtctgactctaaaactcacatatctctacacaccacgctgcctttctctgtgcctgtgttcttgtgttcactgcctggacaggggttttcatagccttgctaagtatgcagcaaatcctaagtggaacctcaacacgtaaaacacatagaaacagagccattttggttgaactgggcaaatggatcttgcattctatctgtcctccctctagcctccacttttacctcctgggtgaaaaagccccaccttggcactggttccacagggaaaaccagagtcagccccttgtccagaggtggagacaagccacatggaaggtatctgcaggatgcaggaaggatggtgattgttgcagggtgagaaacacagttgagtttgaaatgtttccccatttaattatctgccagtcttctgtccttttccacctgcagaatacctgccggaccctcgtggaatgccttgaacctattatcagatggagtactagtggcacctgggagaagtgggtgagtatcaggtgtggctgaagcctgcagagctcctgtggggccactgagtggaagcacctgttcccaggtaggctgcatccctgccacttcctcctcctgtcctgtacaacctagggcatcccctccccagtcatcagtgagcaggcagatcacctgggcatcagttaaaatgcagattcttattctgtaggtctgagtggggcctcagagtctgcatttctgtcagcctcccaggtaacgctggcactgctgaaccacgctttaagtagcactcctggcttttggatataaaatggatagtatctccatcataaggaggtgactaggagctaggaagaaaggcattcatatattggtccagaaattaaagattagtaagctgagttcataagggacagatataaatcagtcattcaccttgcaaccagatcttacgaaacagaaatctctggttcatctggctatttactcacacctggagaaatagctcagtaacagtgttaaagccattcatatttaaataccacttagtgtgtgtctggttattcgctaaggaagatagagcctacatcatctaaagttcacttttggaaatttgcagagaaaaaagcaatacatttaaaggaagttcttgcaggagaagctgttatattggattacattttgaaaaacatctttagttaaagctacaaatgcttgctattttccatacctgcatttcaaacattcctggggaaaactggatagtctttgggtggtagttcttgttcttctttcagaataaagacttcattttaaaacatgacccagatttttaaaaattgaggcagcagaagttctgcaaggcccctgagtatttaattagtgctgttagaaagtctcctggtgattttgaagttttgtgggaagccctcagggagcggcgatggatgggatgcggtagcagtaacttgagggattaccaaacttgcctcctttatctcttagtttctctgaaacttaaaaatatatacatattccaaccaagccgaagctccacccagactgtttccccatatatggagacaggaggatggagatccttggttagactttgtttgggaaccctgaatttaaacttccaccacagatgtttaccttcatcgctttttcctttgctctttaaatagatccaccaaagcagtgacttagcaattatcctgggcatccttagcaatcatcctgggcagagaacccacttgggcactctgcttgttcactcaggaaaataacattcccaacaataaggaaaactatgacatctagaaaatggttattttcccatgttttgcttttgtccagctgtgtatttttcctttcatcatattcttttttgcaggctaatgaagcttttgctcaaagcactagtttgtctgccactggcatattttaggtaagaggtatctaatactgtcctaaaattattcccctttagaatggaaaaggaactttgaaaaggtgtgctcagttgtttatatttttaatattgtctattattatcaattttatttttttattgaaaggttttcattagaaagagaaatgttatattatcagaacaggaaggcagacaattttgagatgagtcccataatttccttcctgcaatgccttagtacacataaacctgccacaggtttataggttgatattaaatgatcctgtgaatagtgagaacagatcaagatagagggatttttgcaaagcttttagtgcttcccagcatggatttagtgcttatgcctttcagtcttagtgtctaataggatgcagcactttgggctttctaatatttcttgctctccagaaatcttgccttatatcctgcctcttgtgaccctcttctcttgtctaatgggggattggttataaaagctgtgagtcaaaccagggatgaccaaaacagccccatacaaatagcatgggaagttgagcaaggtaccccatcagacatgagaatttgtccaaataaggaacagggagatctcactggaagtgacaagaaactaaccatccttttaccatattgagcatatgtgggcacatcgcctaggcttattgggagggcggtctagtatcctgatggcatctataaatacaaagctcacatctgaaggtaggttggatcttcttgaatggggaggccatgcctagtttcagtaacccagaggaaggacgtgaatttaggaaactagaactgagggagctcagattctgttggtctcacaggtcaaccatggaagtcacaggcacccctggccagtgggtataaataatagtaaccatcatgagaaggtagaccaggaaccaggaagaacccatttattggttcaacaattgaagagaagtaagctgagttgtaaagatcaatgaaattgtctctttttcttgtccttttgtttcctcctgtcatttatccaattcttatatgaacattcttactctgatcagtcggtctacagagaatcaacccaagagtcctccgtccagtataagaaaaagagagggaaacagtgccccgttagaccaatgtgtcaatggtaggatcagacatagatcccaaaggaagtgagtcttgggtgaaagccaaggccgtatggaccacccagtgccaactctgaggttctgaactttatttttactaagaaaagtgcaatttcctcacagcactaggcaaaaatggaaagctatcctggcacacaagtatagaatgccaccagagacaagcagctggaagaaaaagccaggccaccagcaacagagacaaagaactgtgagcttgagaggctatggcagatggtgagggaaggacagtgagggagaaagagactcagatgcagcagaggctcagtggctagacttaggacccagccagggcttattgtaaaataagcacttggtaactttttatatctttgccttggcaaccaggaaactcaaagttaaattttatgcttcatttagttttggcttttgttgttgttgttgttcttgttgttgtttgcagagacagagtctagctctgtcgcccaggctggagtgcagtggtgcgatcttggctcactgcaacctctggctcccaggttcaaacaattctcctgcctcagcctcccgagtagctgggactacaggcgcatgccgccacccccatttaatttattttgtattttagtagaggcggggtttcaccgtgttgcccaggctggtctcgaacttctgagctcaggcaatccacccacctcggcctcccaaaatgttaggattacaggcatgagccaccgcacctggccagtttttatcatatataaattcctactctcttattattcatttcatctcatttcttgactctcatcttttacacttattttaatgatttgactattgtatttgtatttaatatgaatgctttctataaatagactcatgtaaggcttgtttaggaaataagtgaaattgaattaaatacgtatgtctaacatgaatctattaagtttctcagcagatgaaaaagaccttccttataacaacacttgtcatacctgaagaacattatttagccagttcttaatcttctctttaccagaattgatcacaaaaattttaactcatttttagcttttgaaacaatgacaagtttacagaaaatttgcatgtacagtacaaagaattttttttaccctgaatcatttgagagtaaattgctgacctaatgccccaaacccctgaacacttaagagtttagtcctacacactatacaatatacccatcagaatccagaaattaacagcagttcacaactactatctaattatcagactccattcaagattcgccggttgtcccaatcaagtattttatagcaaaaatattcaatacagaatctcacttttcatttagttgtcctgtctctgaggtgtcctggagcaggaatcaggtctcccctctctctttgacatcatgactttgacacttcggaagagtttggccagttatcttgtccaatgtctcccattttgagtttgtctattgttttgtcgtggttagatcgatgttatgagtctttgtcagaatattacaaaagtgactctgtgttcccctcatggcatcctgccaggtgacacatgacttcgacatgtcccacttggttaagatggtgtctaccaggactctccacagtgaggtggtttttctccttctgtagttaataaatattctgtggggagatactttgaaactacgtaaatatattgttcctcattaaactttctgtttattttttattattattattattttttgagacagactcttgctctgtcgccaggctggagtgcagtggtgcaatctcagctcactgcaacctccacctcccagattcaagcaattctcctgcgtcagcctcccgagtagctgggactacaggtgtgcgccaccacgcccagctaatttttgtatttttagtagagacagggtttcaccatgttggccaggatggtctcgatctcttgacctcgtgatccacccgcctcagcctcccaaagtgctgggattacaggcgtgagccactgtgcctggccaacactctttttgttactgccattctacccctcaggtccaccccacagcctgtccaattagctatgtgagttaactgctcagtttggtctctgcaaagcagagctaaaacaaacaatgcgccttcctttagggctcttaaaattaaagcatgagtaccctctagtggcttgcaggaaagtttccacgattctcgaacttttcctaagtcccagatgagtgaaggacactggcaggggtgggatgtactggagccagatgtgttccccaccagcacacccaggaaatacatttttgcacagctgtaattttgacttaaacatttgtttaaggtttgcatgctcaatcatatgacctacatgtttggctcagtatacatttgttttctcaaaatctttagtatagtgagtgctccagaaagtcattgcatgtttacctcatagacccatgaactctgaaaagcatagagttccactgaaatgccctttctgagaatcaaagttgaagttcttttcacttgcattggaagaaacctagattttgtgaccagagatggaataaaatatgaatagaaccacattaagtagaatgttctcagtatagcctggcagaaggtgtgtcgtgcctagcatgaggtgacatggtgatgtgtgcaatggaaatggagttatttggcttcaaactgtgtttgaactcttatgaggattcaggcaatagagcagacagggatacttcaatccccactggggttgaactgcccttttccctctgtgtcaaataagaggtggtgatgctggtctatgtgatgcttctgaccttaataataattatgtttttttgtttctggtttctcctccactaataaggctctgggtcttctccttagggagaaggaattgtatgactgaaaaaaaaaaaaaaaaaaaaagcttgattttcctagtactcctgcaacgataaggcaggccaggaccttccagaagttaaaaaacaggctccattgaaacctgtgataaggaagcaacagaccatcactgatgggtctgggatgaaattagatcccctgttacagagtacattttaggagacgctaaaacagaaacagggtgagaactccaggctgagacattccagcggggagggatagtttagatttgtttagcataaggataacaaggagcagctcacggttcccttatcaactaaattagctgagattactgaggcagcggggtgttgcatgagtatgctggcaaggtgggggaggtgtcatgccaagtacattcttaatattgataaaatacagctatgtaggagggtgaaatattctcaaagattagtcaacaagagataaatcaaagcccaacctgataaaaacagactaactgcaattagaaccagcccagctagtaatgtcaaatcactctacgttagtgtttcattctgcaaaccccggggtgtgaaggattaattttaaaaggctgcctaactcatctcctgggggtttgggtgactacttcactttttaagactgatttgaaccctttcatccttactgaagaaaaaccctgaagctcatgctaatatcctgccaatactcacaacttatgactccaaagttggttgaaattttgaattatttccttgccagttagcaaatagcattacttcgatcgctagatgctctcccattacttccctggacccttcccaggagcccccaacttcctcatacccagtaacgctcaacataaatggctggggcagctccttacatgggccaattgaccagtgcccctcacaaaactgattgttgaagattttgagtatcgggtgcaaaacctgaaatccaagcattacagattttagacaacaacctggggaattgaatgacctttgccttattgtaatgccattcgatttatcccccttaatcacaaagcaactttgcatagcttcaccacaatcagtcaggaggaggtcatggaaaattctggtaaggtctgccacctgcaagtttttgctgtcattccttctctctagcctctatttccttgtgtctgtcaaaagaagaatgtggaccagcccaggagatctcactctggctgtgtaaaaacaccttgaagccttttaaaaatctgcagagatccaggctgggcgcagtggctcacgcctgtaatctcagcactttgggaggccaaggcaggaagatcacttgaggtcaggagttcgagaccagcctagccaacatggtgaaacaccgtctctattaaaaatacaaaattaggctgcgcaggtggctcacgcctgtaatcccagcactttgggaggccgaggtgggaggatcacctgaggtcaggagttcgagatcagcctgaccaatatggagaaaccccgtctttactaaaaatacaaaattagccagacatggtggcgcatgcctgtaatcccagctacttaggaggctgaggaaggagaatcgcttgaacctgggaggcggaggttgaggtgagccaagatcacgccattgcactccagtctgggcaacaagagcgaaactctgtctaaaaaaaaaaaaaattagccagggctatggcaggtgcctgtaatcccagctacttgggaggctgtggcatgagaattgcttaaacctgggagatggaggttgcagtgagccaagattgcaccactgcactccagcctgggcaataagtaagactctgtctcaaaaaaaaaaaaaaaaaaaaaggcagcagagattctaattgaattgatctgggagtggggcatctgtgctgtttttgagttcccagcgactctctgtgagccaatgtggatactcactgcactggccaaacactgaggtcctggtgccatgattacaattcagctgctcctcttatgtcaccagtaaaaacaagttgctttccaggactgacaataggcgctggctgcagcctggcccagatgcaggacatcttggctgagagggtagctgagctcccagaggagaaaacacagacgtactgagccctcctgaagcacctgaggagtctggcaggccagcagatccggaatatggcggtatgttccctggtttcaaccactgggcacaccgcacctatttctgaacctcactgaaatgttgagatatgcgttggcagaatcagtatgcaaaaaggtctcagcagattgaagcaacaggcgcagtaaatgtttaaaattaataagcattatttaataaaaatatttaagaaacaactataggctgggagcagtggctcacgcctgtaatcccagcactttgggagaccaaggcgggtggatctcttgaagtcaggagctcgagaccagcctggccaacatggtgaaacctgtctctactaaaaatacaaaaaatagctgggcatggtggtgcacgtctgtaattccagctacttgggaggctgaggtgggaggattgcttgaacccaggaggtagatgttgcagtgagcagagatcatggcactgcactccagtctgggcaacagagcaagactttatctcaaaaaaaaaaaaaaaaaagaaaagaaaagaagaagaggaagaacgataagtcaagctcaaaagagtggctaagcagcatcacaggtgagaaaaggatgctatggttttgctagtttcatgataagcttgtccaagaacttagtttagtcttaggctgcattaacaaaatagagtatctaaaacaaggagggtagccttctctactctgggctgttcaaaacacagctggagaaagatggtcagatctgggaggcatacttgaagatctggttgattttgatctcaaaagaaaggaaaagagaaacagttaggtttttgaaacacatatgctccttcccctgcataccctcaattgtatagcagaaatctttgggatatggaaaaccagggagggcatgtttcctttaaaacagctctcaagtgatttcaaaatgttctctccccagccaggaactctgacgaggtacactggtgaggagaaggtggcaggagaatgaggggttggaaaccaccccaaaaagaggactaggggtgggaggacaggcaaagggaacatgagagctgccttggactatgtctagactcctgaggtctgatgtgttattacatatgagcagagagtagaagagtaactgacagatgaggatccagggagccagatttcagctcaggggaaacaaaaaaaaatgtaaaatggaactgctcataaaggaatggggattccctgtcctcacctgtgttccagtccagaccgcagcaaccaggaggtcaccgtagattccttccctatgctgggaggagaatcttgagttcaatggccagtcatttccctcccaagttctgaaatgctacaggctccatcagatctgagtgagggctcccaaaaaagagtgaaaaggcaattctctgtccaactgtgtggatgcctcagaacactgacacagcccatgtgaagtctggccatttcagaagcccacaggagatgaggctgagaccctttgcaccaaggcaagatggcacctctgcagccaacaccatggccatcttcactgttgccagggctgagtggggtggctcactcccgctgagcctccctgcttgaatctgaatcccaggcctgccccttcctagctggggacattggtcaagtttcataattgctctgtacttcagtgtcttcatctgtaaaatagggataacaacacccacctcactgggttgttgtgtcaggggttagacagcgcgtggaacacaccggtgttaggtaagtgctaggcaccctcgagtcctcttcccatccaaagaagccagtgggaggggccctccctgacaagctgaacccacaccctctgcaaaagagagaaagactgaactgacttagattcctcttgaccctttcatggccactaagaggaccatcagcaggtgccttcggggtagagaagctgagagatggaatgactgagctgtaactctctctccttagtccttaggggggcatgtgataagccggcattgctattcggacctgaatccaattcttgctgtgggcaatgctaccctcaatctgatttcagcaggtaagctgcctccaaacactctgaacagcacctagagatcttttgtcttttctatttattcttttaaggaattgctttaagtcagagcccaagtctctagttctcaattcaccatggggagcccagctcatgagggaaggtgcactgatccaaaaggcagctggtgtttccttctgacaccacacacgcacacaacctgggaccacacactcagttagctcacatgttcgcccacgtgtcttgcttgaccagtaaacaccagaggtgatgtgcagaggctaagctgagggtgaggttgcagtgcgcactctccctatgggccaagggactgctcctgctcccccattctcatcatgggctccctccgccaacacacagtccgaggcccccacacagtgccctcaaagttgcctccctaccccccagttgctgtgtaagaagctacaaggctggtgtggacacacagtggacatccacacaggttgtggtgggcccctgggaaggggtaggcagtgattgattttaattgctagctgagaggaacgttcccttgcggtggctgcccactaaacctccctttcatctccccaagcaccctgcacactcacactgcccccaactgccccccagatactaataccaccttgactggatgcaactacatgccaggctgtgctggggcgttggtcattaccattggctgaaggtctgctttcccagctcagctagagccatctccacccagagcacagccctggctccagcaaaggcagtagatcagctcgctggcccagcaacagggaggggccaggcagagatcaaccgtgggagcctcctttggggcaccctgcttcctcacaagcatacctacattccaaccagcacagcgctcactgtgccagggatcaaacgcatgtcacagtccccaggccatagtttgatctcctcactgcactcctgtgggccagagggcacagttgtggtccccaagagggggcaactgggctagaaggaggtttcagaatttttcactttgttttaaaggtgtaagtgtctgtctcaagagctgacaacagcaggaagaacacaaggcaaagtcagtggcttgaactgaactgaatagttaaaagtgcaaacaaaccgtgtgctggcttaaagttgttgacttaacaagtgatcataagcactgaacaggttctatgtagttaaccacaggcccagtgagccttcaaggcagaagagaccccagttcacatagcatatatgctgatgagaaaatagtaatgtcattacggtgccaccacctgggaccccatgatgggaccctgtgactttgccgtggactcagacctcagccttgctctgtgtagaggaagctggcctttccttctccactgctgacatttaaaagaacagaataatcttgctctccttgttgtgactgtgcagaaatatcattctcttccacagaaggtacgcggcggattcctctaaatgaacattttcttgctgggttggcaagtgcagaccttaagccagaggaaattttggaatctgtgcatatcccgcactctcaaaaggtcagaattccgctggttgcttttgagggtggtttttcctttttcataactgagtccagtcatctttagaaatctaaaaacagatggaaagaaaataactctgccctgcaaacctgtttcctgtccaactgcagattgggccagcaccaaggccctccgacagccaagagcaggcagctccgggtgtggatgtggggctgttgttctagctgcagggtggagcatgctgagggcctgtggtcacaccaccacacccctcatggccacgagttcaagctctcgggctgtcaaatggagtgtctctaactgacccacagggagatgggggctagggctcagctgtcccacaccccactctagccaatagttcatgggcgcaggagggcctctagttgttcgctaactcagaatctctgcggctgatgtagccacccagccggctatggagttgaccttctgtcctcactgcctgctccctgtgcctctgccaaagctgtacctgaatctaagaggatagtcttcccagagagaggcaatgcaacacacacacacacacacacacacacacacacacacacacaccccctagctcagcccccaaagtcccagagaggagcagccaagactctggggcaccaggatgaggatggcccactccccatccggggccttctgctacagtagcagtaatattcttctacaggggcattggtcgttaccattggctgaaggtctccgctttcccaactcagccacagccatctccacctggagcacagccccggctccagccaaggcaatagatcagctcaccggcccagcagcagggagggaccaggcagagatcaacagtggggggctcctttggggcacccctgcctcctacaaccatgcctacattccaaccagcacagctctgactgtgccaggtgtcttgttagattgtgtctgtgtgattaattaatagcatcaaaagccggggggcagcctggttatggagggagtcataagttatgctttcagccatgtgtgatcttcattagtttttcctttggaatggaaactttgaaatgtgttcccatttaaatccatgaaaaggcagcagacggaaaaacaagcccactcaaacatgtgcacccttcgtggcggcacagatggaaatgcacaaaggggcacaggccgtcttcatggaccccaccttggctcaccaaagatcatggtgccaaggggtcagctgggacagccatcacctttgactcttcctcctgacacaagattccctagccactgctggaaagctttgctcggctcccttctgtgctttgccaagtggaaaagcaatcatttctacaagccaagcaatgtggtgggtctcctttgcacttttagcaaatcacctttaaaagcccctgcattaggagggctcctccaacctcatggggaaaaggtgtctgaaaactggagggaatggcccctggcaatgccagcacatggacgggtgtccaggcgtgagttcccacagcatcccgtgcagaggcatcctggcctccaagggagagtgcgcggtggtccctgttccttgagggtgtccgaggccttgagagtgggccttggggaggacgctgttctcactttgaacgagaagtcagccaaggtgtcctctaattgtgccaactgtctttggtgtcttgttagattgtgtctaagtgattaattagtggcaacaagaagcataaaccatgttcttagttttgacatatcagataaccccaaatggtttttgtctccacagtgggaatttgtgtcagccttccgacaggctcaatgccagcagaatgccttgccccacgtgaatgccggcatgcgagtccttctcaaagaaggcacagacagcattgaggacctgagcatcgcctatggaggggtgggggctgccaccatcagtgcacacagatcctgctagcagctccttgggaggtaagccaagagcccgcaccctgagggggaagcttgctgttaaataaaacaagtggagatctgtctctggcaagcatcagtaaagccctgggaagatggaaactattacatgaaaatcactgcctgttctttctgccattttgctaaatgaattaaaccttatttgactttgattaattggatgccagtctttggatgaggtatacaacaaaagtgacctggcctgagttcagccagcaggtgattttttcccatctgccctcgttctcttacacagatcgacagcctagccatcctgatgccatggcttatgcctataatcccagcaatgtgggaggccaaggcaggaggattgcttgagcttaggaattcaaaaccagcctgggcaacaaaacaagaccctatctctactatatatatatatatgttttttttttttttaattagctgggcatggtagcatgcacctgtagtcccagctcctcaggaggctgagacaagaggatcacttgagccctggaggttgaggctgcagtgagtagcgatcatgccactatactccaacctaggtgacagagcaagactgtgtttcaaaaaaaaaaaaaaagtctagcaaacccaccctgggcagtgtccaagcagcacctaatgctcccaccgttaagtgcactctattacttcctcagtgaagtcagtctccaagtctgagtcccgttcagttcacaatggaattggccctagtggtctgttttgttgttgttgtttttgagatgaagtctcactctggcacccaggatggagtgcagcggtgcaatctcggcttcactgcaccctccacctcctgggttcaaagtgattttcgtgctcagcctcccaagtagctggaattacaggtgtgtgccaccacacccagctaatttttgtgtttttagtagagatggggtttcaccatgttgcccattctggtttcaaactactgggctcaaactatccagctgccttggcctcccaaagtgctaggattacaggcgtgagctgtcattcccggcctgcactgcttatttaattcttgattctagcatgtctggctgtggaacatgttcatgtttaagttgcaggtcccattctcaccctgccatgacccttgggccactcgatgcagcctccccaggccttggtttccctaagcagcttgattaggtgatttctgagtttccaaggaaactctggggtctctaaaaggtcactatcccatatcatgccatgctagaaactgccctctaaccaattccttcctgccttcaaccctcccaggtgctggaatgagctgttgctggatgaggcttgcaggctgcttctggatgaagtctcgctcccaggctcagccccgggtggccgggtggaattcaagaggatgaggaccctagtcgtcagcttcctcttcaaattctacctagaggttctgcaggaactgaagaagctggtgaagctagtctctgtgcctgtgggtgctctggtgtattcgctggctggggctgctgaaacaaagtagcacagcctgcctggcctgaacaatagaaacatgttccttcacagttctggaggcgtcagcaggcctggttccctctgagtgctgtgcaggggactctgccccctgcctttcccctagctcctgctggtttgctggcaatcttgggcactccttggcttctagaagcatcaccctgatctgtcttcatatgaagttctgtgggtacatgtgtgtccaaatttccccttctcacaaggacatcagtcatatgggattaggcccatcttaagtagctcattttaacttgattacctctgcagtaaaggccctgccttatttggataaggccacattctgaagaactggggctggagtgctgggacttcaacacagatatttagaacagacacaatttgacccatagcatctggctcttatgtgttccttgcacccataagctcacagctttcccatcactttggcaaattgtctcgtgcacagcctgtgctgttacctgtcacctgctctgagtcaggcctcgtcagttcccagccggccctcctcctggaatccagccctgaggggctacatgaggctcatggcgccagactctctgcagtccgcaaatgttgactgcgtgccctgaacactgaaacactgtggtgtccctgctgccagttttttcttttaaaatcaactttattgaagtgtaatttacacatcataaaatgtacctatttaaattcagcgcatgttgacaaatgtgtatatctgtgtagctaccacctcaaattttccattatcccaaagagtatcctatgcccccttgtgtcaccatcttgcccctggcccaggcaaccaccaatcactttgctggcactagagattcattttgcctcttctgtaattttatgatcaatctaaaacataaaataatattttatttttcaaaacaaccaaaactgcccaggcatggtggctcacacctgtaatcccagcactttgggaggccaagggaggcttgggcccagtagttggagaccagtctggggaacatggggaaaccccatctttataagaaatagaaaaattagctggccgtggtagcacatatctgtagactcagctacttggaggctgaggtggaaggatctcttaagcttgggaggtcggggccacagtgacccatgtttgtaccactgcactctagcctgggcgacagagcaagagcctgtatgaaaaaaaaaaaaacacacacacaccaaaaactgatgtgtatgctaatgtttaaatagctttctagattcttctgattgtaaacttttggaataagctaagcaaagcaaaatatattatctctctctctttctctctctctctccttctctctctctctccacccctcccctgaccatgattacaactcaccctaccttgtattccctgttccccaaccacagctcaccccaagagcctgctgttctaaggtatctgattttcacagactcagatgaagaccctcatcaaccacactcaccaggataatccttgctgccatttaatttctgaatcaagacacttgacaagtttcagtgacacccagagcaccctccccacctctaccgctctcccaggagagttgagttcctgagaaaagcaatctggctttgagtccttttgtgtgcaatggatacctgcttattctgggatggcttatctagcccattttccttgcttctcctcctgcctctacccctactctctggcaggcctctgcctcctcagggtggcttgaggatcagattccaagcagtcagtccaggtcctcattatgtggagggaggaggggaacaagaaacattcataaaacatgaagccggggcaggcagtatggatcctggttatgcacactatgctggatacattagccaagtcagtttcacgtaaaccaaagcccagtttaactgtagctaaccagcttatctttattgttttgaatcacctttcaggacagccgtcatcattctgaaatttcagaccaattcctaagcgctctcgaagatttcccagtcacaataccccagggagtccaaacgtaccaggtcagtgagtttgatttaactgaaacctgcaaactagagctgtgctgagcgagcaagcttttcagagctgtggtttcaagtctgacattctagtcgtggctctttgcttagtccgcgtcagggagacgctggaatctgaggtcaggcccaagctgctgctagatgagctcaaggctgaaccgtccagctaatctacagtctaatcattatagtctcttcaaagtgatattctctgggcatttgtttgatatttactcagaagagcaaccgagccagaaggttcagcccccagctctgattgcaaatgtttaatctccagtcagcaaacaaatgccctgcgagtaacttaactcaccgttctggcaggacagtttagaaattatggattcttgctacagcacaacgcctctcccaccccacctccacatacatgcacacacacacacacacacacacacacacacagagcttccctgagaggagctccagaataaacactatctccacctccttacagcctagtgatgtttttgtgccactcccaagggcagccaggacaccttattctggatctggggggactctgttgccatcccccaaaccctgtgccagaggccccaaacaagtccatacttgggcttcgggcttggattttggcatcccaccttgggaactgtatcactttaccccccatcatcatgaggacagtacccgtggacagactgatcattggaaaggtgaggaggcaggacagcgagacccctgagaacaccaccagggaaaagaaaatgccagaaggagaagctggggtgccccttcacctacttcgccatttattgccacataactgaaataacaattcactgttctagtggcatcatcaatgtgtcacactcatcatctggcccactccagtgtttgtcacccgagggtgaccatccgatttctcaatcctagctcaggagtgttggtgataggccaggccacttctgaaaattaaaggcttctgaggcaactcttgtcttccctgtagagtgtggatcctcaccagcctctccaagacccagttggacaccctatcatgcacctgtcagctcttaaacatgccactggggaagccatgttttgtgatgacattcccatggtggataaagaacttttcatggctttggtgaccagtagcagggctcatgcaaaaatcatgtaagtaaacgaagagctttcaagagccttttaaaagcacacttggggacccctcagaggaatgcgcccatgctcctgccatgtcctgaacttaaaggacctaaaatggaaagaataaagaaaaggttgccagctccaggaggaagggagagcatctagaaatgaacatcatggagagagaataaaaatcactggctaggctcagtggctcacatctgtaatcccaacactttgggaggccaaggcgggcagatcacctgaggtcaggagttcaagaccagcctggccaacatggtgaaaccctgtctctactaaaaacacaaaaattagctgggcatggtggcacacacctgcaatcccagctactcaggaggctgaggcaggagaatcacttgagcttgggaggtggagtttgcagtgagccaagatcgaactactgcactccagcctgggcagcaaagtaagactctgtctcaaaaaagaaagaaaaatcacagttacaagccttttgtttccctcctaacctcacaaaacctcagctccctgctacagcctcagacatgactcaaaggcacaaccctgatagagagctggtattgaggtggtggtgaaatacccacttcatgcccaagaatgaatggcccctgtcccaaccttcaagaacgccccttgccaaggccacactatcccttctccacctcccaacccccaacagctaaagtgttgtctcctggcccagcaggagtctcttggaccctactccttggcaggtctgttctgattggtcaggacctaagctggatttgttgtcatatattccgattttcaaccatgttctatccctccctcaaatttagggccctcaaagcttgctgatttctacttcctctttttttaatttagagacagagtctggctctgtcatccaggctgggggcagaggcaccatcatagctcactgcagccttgaactcctgggctcaagccatcctcccacctcagcctcctgagtagctgggactacagacatgcgccaccaccacacctggctaatttttataattttttttgttgagacagagtcttgctatgttgcccaggctggtctcaaattcctggcatcaagcaatctctcccttcttgaccacccaaagtactgagattacagacctccaccaccctgcccagagtgatttctacttcttaaatatctcttgtttagatcaattgatgtgtccaaggcccttgaactacccgaagtggttgatgtgataacagctgaagacattccaggcaccaatggcgctgaaggtgacaaattgctggctgtagataaggtacgtctgggacatgctcttctagatgattctgtgtagacaatcaccaaggtacccctcctgccagctgttcagctcccagctcttcctgcctttgggaggtggaagcgccgagccttctggcagctgtctaccctgcctttattcagccctactagtccggagtcaggaaataacatagtaaaaggaaatgtattacagaaaagcaacaagtcctagttctgccactgtgtgctcttgagtccatatgaatttttagaaacacaagtcagtacacaacaggagccccactatacaaaaactttatctttaaactctaaaatgtcatgaaggcaacatgtgtcaaccaagctggacagaagacatggtagattcaggttacggccaacctcacatccactctgagccttacgttcactgagttacatggccaatggaactgtctgtattatttaaattattttttcattaaacatattttttagccaagcgtggtggctcacgcctgtaatcccagcactttgggaggctgaggtggatggatcagttgagtccaggagttcaagaccagcctggccaacatgatgaaatcccatctctactaaaaatacaaaaattagccgggcgtggtggcacgcacctgtaatcccagctactcaggaggatgaggcaagagaatcatttgaacctggaaggcagaggctgcagtgagccaagatggcaccactgcactccagcctgggcaacagaacgagactctgtctcaaaaaatatattttttttaatttttagccaagcagatgtagtcaaatgcgactccaatgtggttactattgctaaacagcgacatctaagacagcagccactgctaaggttgaactaagcctattcccacccagaattttgtatctgcttcatgtgtgtactttccacaggtagtctgtgtgggccagatcatctgtgctgtggttgcagaaacagacgtacaggcaaaacgagcagctgaaaagataaagctcacctatgaagatctggaacctgtaatcttcaccatcaaggtaaacagggctggccggtctctccctaaggttgtagaattaaaagtacctttgtaaaaatcttaatgaaggatctaattgtttttccttgccactggtttgctctggaaaaatcaactttctttggaaaacattacttgcatgagctgaaattatctttggttccaaggagtggaaaagacagaagtttctcacattcaaaaagtctagaagtgggcagtccaggacttctatggcattctgtgtgtttaggatccagccttcttatatctagtcactccatcatgcattgcttcctggagggcacatttggtccacaatggccacggaagctctagctgttacatccacattccagacagctgagaaaataaggtgatgaagaagggtgtgccccctccctttaaggacacttcccagtccttaaagggaggcatgtacattgcacatgccttcctccatctctttgtttggaacatggtcgcatgccacacctaactgcaaggggagctgggaaatgtggattttattccaggtggccagaaaaccactacagatcggagactctatgacttgaggaggaaggtgaggatgcatactgggaacagtaatgttttcaaggtagagcccaaatgcagtggaactttcatggtggaattccacagaaacttcactctcgtttctgagtctagataatgatattcaaatggtatttcggggaagataacggagtgaggacagacaattcaggtgtggactggggttttcaggttctgattcagtgagggacaggttcagagtcaatgacttgagaaaagcttacttgtttgtgtgcttgtgacagaacatcaaatgtgtccagaggctttcatgaaccattgggacattttaaaatgtaactaaatggtacaaattgctcaatatttaaagtgtttttttaaaaaaaagtttcttgatcttcctaaaccaaatcaactttgttccaaattcccatttgccaagtttgcaagaatccaggccatttttcttggctcattcctcttccttgggttgaactaggatcctaataagggtttttgaaattgcccttctaaccccactttcctcaagggggaaatggcacccagaggacacacccacgaactattctagaattcagaatgggtagggatttagagttccctccgaacaagactgtccagagtcatcaaaacaaaatcctccacaagtcataaaattgtcatatatataataccaatagtgcttcatccatctattcatttatttatatgactttatagatcagaggcaacatagggtcatggttacaaacacagatcctagaaccaaactgccagatttgaatagtggctgcaccacttactagctgtgtgaccttaggcaagttatttaacctctctgtgccatggtttcctcatctgtaaaatggaggtagtaataatacgtatctcattagtttgtcataaaattaaatgagttaacaggtgtaaagcacttagaacagtacctggcacatggttagcactcacccaatatagcctatgttataacaatattatactgtctttgttgggcatagtggctcatgcctgtaatcccagcaccttgggaggctgaagcaggtggatcacttgaggtcaggagtttgagatcagcctggccaacatggtgaaaccccgtctctactaaaaatacgaaaattagccaggtgtggtgatgcatgcctgtaatcccagcctcttgggaggccgaggcaggagaaccacttgagcccaggaggcggagttgctgtgagtcgagatcacaccactgcactccagcctgggtgaaagagcaagactccatctaaaaaaaaaaaaaaagagattatgctgtcttatgacacatttacagtatggcaataaacatactttcacatgtaccaggatggcttctgagatcttagtataacagaaaatgaaaaaattcagctatattgttccttgtctgctgctttgaaaaaatcaagtgttcatcattagatagtatgtttttaaaaacttagcctgggcttgaacacttcctttatcacttatttacagtgtgactttgagaaagttcttttaacctctctaagcccagtttcctcatctaggaaacagagatcataacagaatgaacgtaaggatacaagtacatacgctgttattgcacagtgcttagcacaaagcaagctctccatcaatattagctgctcccaggagcatcatcagcaagaaaggctatggcatctgaggccatcagagcctaggaaggcaggagacaggtgtcattcagaagtatgaaaaaataccttggttctaaaggctaaacaaggatccgctgtcagtaggtcagtccacagaaccagtctttatttgtaagtcagttcatgttattgtcagggggaagaaaaaaaaaacatagaacaaagagctagaaaagcccttatgagatgatgccaaatactcaaagaaaggaacaaacttcctattaggttggtgcaaaagcaattgcaaacttttatagcaaaaactacaattgctattgcaccaacctaatacaatgtgtactgggcttttctgccccagagatgtgtaataacttgtgtcttccctctcaagacagcctcagtatttttcagatccctgagtgagaggttcttgtacctgagctacctaagtagtctaacacaagcatttttcttcaaggaaaaggtaaacgaaaaaaaaaaggcagattcccaaacctcacccatcatgcacatttgacttatctcatgttccctggagagtcacatttaaataagaaattagtattcatcgtccgggatcatcatagtgtccccagccctcagttatgaacgtagcttccttctgaaggtttcgctaatccttcttgctggttttctctgcaaatctagaagacctttccttggacttcccatctctgcagccagcctaccgctctaattctcccttgcttgtttgacacctttcatctgtcccgggagacagtgattttccagagcatactggcttttaagaaaaaactaacagtggaaggaaaagtcggaagaactggcttttatgcttttttgtttttctgcaatttaggatgccataaaacacaattcattcctgtgccgtgaaaaaaaaacttgaaaaaggaaacgttgaggaggcctttgaaaaagtcgaccaaattgttgaaggtgagctcccagggatacttaatagactctgcctgattctattctgaagcaaccatcaaaagtgtatgatttcccctcagaaagtccagcctctaaagtcttggtgctttgccaaatttctcttacatctcttcctttcaaattgtgtgtgtgtgtgtgtgtgtgtgtgtgtgtgtgtgtatgtgcagttttggcgttggtgggtagggagcaatagcataaataaaagaaaatctctaagattttggtttgggcagagtaaggaacaaaacttggcacttttaatttgtgatccagaactattgtctctgaaacagattgccacaggacaaatgcctggttccttcgtcaggataaatccaggccagccaggcagggcacggtgactcacacctgtaatcccagcactttgggaggccgaggcaggtgaatcacctgaggtcaggagttcgagaccaacttggccaacatggtgaaatcccatctctgctaaaaatacaaaaattagccagtcatggtggcaggagctgtaatcccagctacttgggaggctgaggcaggagaatcgcttgagcctggggggcggaggttgcagtgagccgagatcgcgctgctacactccagcatgggtgacagagcgagactccacctcaaaaaaaaaaaaaatccaggccagccagtccacatcttactggcttttgaattctccaagacggtggctctccaagacggtggcttcccaccagcacacaccttaggagttgttctgtgcttatgcttaacaggagaggtccatgttggaggacaggaacatttttacatggaaacacaaagagtgcttgttattccaaagacagaggacaaagaactggacatttatgtgtccacacaggacccagcccacgtgcaggtgaggtccaggataatacccacgtccccaccttcctaattccatgatcacagtcgatcccacagcctcacaatcactggccattttacctgcagaaacctggaatccaagcattagacatcagacatcaataatgcagccaagacctcagaacctttttttttttttttggtcttttcaagtaaataaaaaaatagtcacagtaattttaggtttcaagagtacgttcatttgcatcatgcttagatgagctctgtgatgagatggcatcactaaactatttctgtacttgatttttctctaaaataatcatcacagataacctttggagtcaacacatcactttatagtacattttcatttccccagtcacaaagtgctctaggtttagctgcaaacacatcatctccttggtaggttgtcaggagttcgccggctttcatctccttgggactttagactaggaacccagcttctcacaggaatccagggctctgacagttttccttctggaaaataccatttttctgctagaagggctgctctgtgcggaccaacggtgtttacgagctaaacagagccccaccagacagattcagactatctccattttttttaccaatggtagatgtgaatgaattctgctgggatgctgtttcaagaaacaaaaagcttcttttccatttcactcttataaaccttcttgttatctcacttttacagaaaacagtgtcctctactttaaacatccccatcaacaggatcacctgtcatgtaaaacgagtgggtggaggttttggagggaaggtaggaaagccagctgtattcggggctattgcagctgtgggtgctatcaagtaagtatggttggggatgcttagggatacagaatggcatcaaatgcacagagctgagggcaaatcagtggctgacagtcatctgggctgccatcataaccatgtgtgtgtccttgggcaattcagcctcctgtctgtttctttaaaaaatgtaaataatcatacctaccctcccacacttttagagttattgcaaaagtcaaatgtacacaggactttgaatagctgacatgctattgaaaggagcagtggtactattagctgaatacctcctgagcttcagggaaagtgagccgttgaggggtggggcaagtcaccctgcccaagtggagtgctaggggaggctgctccctgactcttctttcctgctctcagaccaagaacagggtgaggtaaggaaagaaaggctcttcatcctctgcctccctgcacctgggaagggctgcgtcctcagagtctgctcaatggacagatgactcatcctcaaagacagctcccaggctgacctcagcggaaggctcactcctttgctgttcatgcctcagatttgtatttagttggtgctgctttttctgttaatggttcattttctgtggctaagtattctgtcagagccccagagggcatgcaaagtttacaggccctgcttcatttgacaactcttgtagttcagagctaggtcctgaaacactcagacatatgtctcagtcctcagtgagaagtgggaaaaagcaggatctgaatcccatctccaattctttccataattaaatccactccactcacacccactggggattcagcacaagataatcagttcattgaattccccccaggcgttgtggctttaagacttctcaaacacgactgcacgttagaatcatctgggcagcatttaaataccagtgcccaggctgccccatactgacccaggcatccgtatattttaaaacttcctcagtggttccactgtgcagccaagtgtggcaaccagtgccttaagatacaactctaccttggtacccaagggccatgcattaaatgatccccagagtaatgttcccaaacctaatagtaagtaagagttgcctgatgtcatagaaattcctgcctcagctgggcatggtggctcatgcctataatctcagcactttgggaggctgaggcaggaaaatcacctgagcccaggagttcaagatgagcctgggaaacatggtgaaatcctcatctctacaaagatttaaaatagaataaaataaaaatagctgagcacagtagcacgtgcctgtggtcccagctactcaggaggctaaggcaggaggattgcttgagcccaggagatcaggctgcagtgagccgtgttcataccactgcactccagcctgagtggcagagcaagaccccgtctcaaaaaagaaagtcctgcctccccatcccagcaccactgaatcagaattagcaggggatggacctggaaactgcatttccctgatgttccagattgtcctcacaattagggaacaccaggaaaccctgcactagaatagtgattttcaacatttgcctgaagacacctgaatcaatatcactcagaaaaatgcattctaaagcccctccctgacccactgaatccaaatcctagtacaaaggcccaggaatatgcattttcaccagcgtgccagaggattcttcagcactccaaagtctagaagcctctgctctggagatggagaaaagctgaggctcctccctgaatgagagcccaacttggccagcatagccttcacggatgagaatggagacgctaacccagacatcctaggatgagtgtttggccttgttttcccagtagggttgttaagtttgcatttatctgttcacattctttctcttttgtaaatagtggtggagataatgcaaatatctggatctgggtgaaggtcaaacttgaagctatagaattcaacttaaccgaatgtgacattaatacttttaacaagatctccaaccattgagttatagaccacagagacaatgaagatttagtcatatattaataattcacgttagtgtctagcatattgtatgatattaatacatttatatgggataaatgaatggatggatggttgaataaagagtgggagaatggatagtggatggatggataataggcagatacattgatgggtgggcagatagttaaatgaggggatggataaatatgagtagataggtgaacgagaagatggatggatggatggatgggatgggtggagaacctaagatttattttctttagaactggtcaccccattcgtctcatccttgatcgtgaagatgatatgctaataactggaggaaggcatccattatttggaaaatataaagtgagtattaaagattaattattaaaatatctcattttggctaggcactgtggctcacacctgtaatcctaccactttgggaggccaaggcgggcaaatagcttgagcccaggagttccaaaaccagcctgggcaacatggggagaccctatctctaaaaaaaatacaaaaattagctgggtatggtgccacatgcctgtactcccagctacttgggaggctgaggtgtgtggatcccttgagcccaggaggtggaggctatagtgagccaagattgcaccactgcactccagcctgggcgacagagtgagaccctgtctcagacataaataaataaataaataaataaataaataaataaataaatagataatctgattttatctgaatggctttgttcttttctatcattttgattttgctaaattctaaaaacaaacttagcacctaaaatattaaatgaggatgctgtgtatttgaatattcataacattttatgaggaacttttaataattctagtaaataattgtgaagaagtttaatgataaaaatacaatttcaaataatgatcaaaacactccttgaaggaataaggatttacattagtggttcctcaaaaacaaacagacaaacactgatagaaggtacaaacattgctatgccaaaccttcttgactatacaaatatttttcagtagaaatgtttggagacaatttgaccattgaccattttaactgcaaaatcattttttagaagtgtttttaccaagtggctatgatactgtcacaaaagctctttgcatgtaggaaaaaataatacagtaagtagtgaatttaaaattgtttcagactgcatttactgcatttttatataactataatataaacatcttaaaaatacttgctggcctcgagcttacaatactacttttcaaatttgtcattgagctgttaggatcattctaatgtaatctaagtcgtatcgaacatactttacgtgggaattgcttgtagcatatacatagttagatttcctatctgattttgttattgtcttagattatcttccctgtattactaaagccacagttttctatagcacagaacaattttatttcttccattggcattaataatttttataattagagagggagatcctctctaatagttggccgattcaactgtttatttgctttcaaatgcacagatattaatagtcacagctattattgtcttctaggaccgagagcaatgtagagacacactgctaagattggagcagttgctgttgtggtgatggctgtgctcttatcaaagttatgagattcttttagtactaatacttgttaagaagattctagactgttaatattttggtaattatagtaatataaagtataaaagagggaaatagattttttgaaaaatccaagttttattttatattttggctgggtgtggtggctcacacctgtaatcccagcactttcggaagctgaggcgggtggatcccctaaggtcaggagttcgagaccagcctggccaacatagtgaaaccccatctctattaaaaatacaaaaaaataactgggcgtggtggcatgcacctgtagtctcagatacttgggaggctgaggaaggagaatggcttgaacccaagaggcagaggttgcagtgagccaagattgtaccactgcactatagcctgggcgagagagcaagactctgtctcaaaaaaaaagtccaagttttattttattttttaagaaacaatttcaattccaatataatatatataaacaatttcacttcatatatacatatatatatatatacacacatatatatatatatacacacacacatatataatccttcagacacagctaacaaagttttgcttggttattcagaactatttgtaaattaggataacatgtgtttatgtttaaatagtttcttccaaatttttgaaaagtttatatgaaatagtttaaggattctgctaccttatttatagtactattttgcttagcagtcctttcttcatgaaagtcaaaggtaaacttcagtcaaagtctaatgttaaccctatagttatatatatagtcgtgtggatccttcagttgtatttatccctgctttcagaaaggcaaagggacctggatcaatcctcgtttggtagaactacagtagggagtggggatttttcttttctttttaatgtggactgtatagacaaaatggtctggatgggtggaggggagtggcaacactgaaagaatgcaagctgccttaagctcttcccaaacagtaacaacagcacgagctcaggtttgttaggtcaggtaagcatatacaaacatcttcaccacctagtgaaatgagagcagtccccatgcatccattcagggacctcagcttcagaggctttcccataacaggatacactgtgattcattccaacacattctggaattccagagactttttcaccagggaggaaaccacacactaaattagaaagaaagtcagtaaaaaaatgaaggggaatcttccaagaataaggatgaagagggtggcaattatagtccaggagacaagcaaagtctttagaatcccatgctgactgtgaagccagaaaatcacatgttggaaggaaagagctcagcaaaattcagctcagaagaagtctccatcagtcaagcaaggcatggtacaccataaagcaaacagggagctgagtctggcctctgtcctgccctgtgggggaactgggctatgtctcacaattggcatgcaaattttgaacatctcagtaaataactatcatttggtgacaggtaggattcatgaacaacgggcggatcaaagctctagacattgagtgctacattaacggaggatgcacgctggatgactctgagctggtacgtacaccagaaagcagcaacgtgcttgaccatgagtagaatgccaaatttctagatgactctttatgaagtttatttcctaatgtagttaaattctacaagccgtttgactctgtacttgactttcagagaaaagaaaaaaaaagtgatgataaatgtgaatatccctttttaggtaacagaatttctaatactaaagctggaaaatgcatataaaattcgcaacctgttcaggttccagggccgtgcatgcatgacaaatttaccatccaatacggcctttcgtggatttggcttcccacaaggagccctagtaacagaatcttgcatcacagctgtggcagccaaatgtggccttccaccagaaaaggtaaggttgcaacaaaggccataaccaaagttgctgatgaaccagactgggaaacccagcttctttgacccaaggaaacacactagaagaaccacatgaattagccctggctcagaattcaaagtgaattaaaagctacctaaaaaaactcacctcaccctatcttcctccttccttacttacgcaaacatctcttttttttcatttgtaccaaaataattactctacttaaaattcaaaccacaccgaagtaatcaaaaaaagggaatgcccctttttccacccccatccctcttggtcaagggtaatcattgttaacaattccatgtttattgttctacccctttttctatctttggccacccatttgtattcatacacacatacctaaacattgacatataacatatatgtgcacacgtatggttatttaccagaatgggaccatagcatacatattactctgcccctttcttctcctacaggacagtatgccatggccatctttctatgtcagtagaatggtctgcttcattctttttcatgactgaatagtactatgtaatgtgcacgtaccataacttatttaaccactccactattaatatacattctggctgttaccatttttggccattaaaatgatgttacaataaacatcttggtacatatgtacccaggtatatgtttgccttatttatctttaggataaatttacagaagtggaattactggtgcacttgaaaacttttaagaaatactgccagaagaacaccctctgaaaatactgtttttcacaatagaccagaaggtgcacaggatgtacagtatgctggactagagagaggcagcttctggaattgagatcatggtcaataacttgcttccactccccacacattccaatcagagcccaccctaccttttccatttctgtcccctgtttccccaatatagaccccctactccagcaagaactctcctatgtattgtccctagaactgctttgtccctaaattcaacaggaattccaggtttgtgattgtcggggtacttcctacaaacaagagaacacctaatattttgtacaaggaaggcagtagttatcctaagagaagtcacgtacagtgttccacgggtaccagagaaggaaggcatcacgttggcatggggagaggggaaccaggaaggactttctggagaagatggcacttgagataggccttgaagaataattggcacagatgttggaaaggtgatctaggcaagtagaacagcatgagcaagagtgtcaatgtctgtgtagttcagtttccttatctataaatgactcacctcacagagttcctgcaagaatcaaataatttaacattcattacaatatttgttttataaactggatagtattattccaacgttgttgccaataataataattcttttactgtgattagaataaaatggagatgatttaaaaaaaacttctaggcaaatctcagcaggctctcctttgtcaagtgttgcaagtttccaggacatataacataaaacacaccttattcaaataagccgttttttttttctttctttcttttagagatgaggtctcactacgttgcccaggctggtcttgaactcctgagcttaagtgatcctcctgcctcggtctcccaaagtgctaggattacaggtgtcagccaccacacgaggcccaaagaaactgcttaaaagatttacccatacattccaaaggcaattaaaagacttagaggggatctgctattatttgcaatgctattcctccctggcaggacaaatcttcagttatgacaatgaatccttgctttagtgtactgcccaccagctctgctccatcctctgaaccttgtagaataaaaagaaaagaaaaatctacctccctaggcccctacatcccactgcctttcatggaatagtctccacctgctaccttccacttctagtaaggagagaccctaactggtgcattgatgaagaggtaaaaataacctctactatttttgcaaaagcatgtaccattcaaagaaaaaacagaccctgtcttcccttctctacagcttgtgctttcgtggagaggtttttcaagtctctatttggccatcagtttctgccttaccataactactgaatttcccacctgtttcagattagagagaaaaatatgtacaaaacatatctacagatatgtagataaacatatctacagatatgtagataaacatatctacagatatgtagataaaaccatctacaaacaagcattcaaccctgagaccctgataagatgttggaatgagtgtctagacaagtcttcctttcacagcagaagaatgcaagtcgaagagttcaataagaagaattattggaagaagaaaggcattgctattattcccatgaagttttcagttggctttgctgcaacaagctaccatcaggtaagacttgcatataggataaataaccttcatgctagacacactcctggcccaatcagcttttgtggactttgaaaaatatctcatttcttagagcattgagctcctccctgccaacacctaagagaaatatacagaactgtccagagcagcacccctatctgcaagcatttttaatacagtgcagtatttgtttccttcttgggaaacaaatccctaatcaactgaagtcaggaagacctgagaaatcctcggctctgtattgaccagctgtgcaacattaaattattcaacatctctgagcctcagctttcccagtgataataacaataatagtaataacaataactctgtcttaagattgatgaggactcagtaagatagtgaatgtagagcagcacttggctgggttcctggaacactgtggatgtcatccagagcatcactaggcccctcccaggacagctcagacacacctctcagggctcctcctcctctggtgggtaggatgagaccccctgaacctctgggtcacatgttcaggcccagcatgccccttctataaacaggcacaagaaggttaactgtcatgtctgcaagctagatgcaatcaaaggctgtgacatcagagaaacttgagagctgcctgtgtggtttcctctctgatgccaaatattgtcttttccaaaccaactccaacaccaagtgggtgtccaaccattctgttctcacactaactaccagagttagtgcagactccacagatcaagggctgagtcccacaagaccgcccctatttcagacaccagcttcaaatggagggccctagctactcacactcctgcctggccgactactaatttggaggttttcactacccccattcaggtttgataatttgctagaatgactcatggaactcaggaaagcactttacttatgattattaccagtttactgtgaaggatatgactcaggaacagccagatggaagagctgcctggggcaagggatgggaaggggacagagcttccctgacctctccaggcacacaccctcccagcacctccacatgttcaccaacccaggagcccccagactgcatcatttggggtttttatggaggttccactatacaggcatgattgattacagcattggccattaatgattgaactcaatctctagcccccctcccaagaagatggggaggaggactgaaagaccaatgcacaccgcctccaagcccccatcctaaagctacctaagccctcctcatgagtcgtctcattaggagaataaaacagtaaattccaaggctttacgaactctgaaccaagaaccaggggcaaagatcaaatatttactttttattataacacacttcccttcacctgtacggccacaccgcatctaaaccacagcctacgctctaccatcatccatgggaacaaacatctcatctcatcacaaagaaaaccttcaaatcaagcaatgattttaagtctccatttgaatatcctccagctgctccacagagttctaaattgaggcaccctagaatcacctggctaggaatagaagggtgttattccaggtcagctgatgactcacaaagctggaacacctaccctctaaattggcagtgagagctctgtcctcagtgggagtcaaaagacccatggtgagtaaatcctattattagcagctacaagccttgatgctcccaagcccctctgagccaaccctgggcctccaggcatctcgagacacaaatgggctgaagccttcgttcctccttctcctggaaagaaaaaaataccacctttccctttgtccagtttatcaaacattgatgtagtgtccctgtgatttttttttttttttttagacagagttttgctcttgtcacccaggctggaggctggagtacaatggcacaatttctgctcactgtaacctccgcctcccaggttcaagcaattctcctgcctcaggctcccaagtagctgggattacaggcacctgccaccacgcctggctaatttttgcttttttagtagagtcggggtttcaccatgttggtcaggctggtcttgaactcctgaccccagctgatccacccgccttggcctcccaaagtgctgggattacaggcatgagctaccactcaaggccaggacctgctcagaggtatttacgggacacaaagatgagttaagaccaggtgtctctccatggcaacactcagagaagagcctcttacctccaggattccttacctgtggctgctcttacaaagtaccacaaactgggtgattcaaaaacaacaaatttattctctcacaattctggaggcctgaagttcaaactcaaggggtcagcagggccgtgctgcctctgaaggcttcagggaaggatcttcccttgcttttccagcttctggtggctcctggtattacctggcttgtggcaacataactccagtcgctgctgcctccatcttccatggccctcttacaaggacaccagtcattgagtttagggcccgcacaatccagtatgattttatcttaagtagttgcatctgcaaagactacataaagttccatgttgaggtttcagacagacatgaattttagggggcaggggagggacattcttcaacccagtattcctgtaaggagaagtacaaagaaggaggtgattgatccttcccagatggggatgagtacaggcgtgagtcgccgcatccagccaagtgaggaagttttaacagaacatagactgcagggcgtggccctgcaggctgtgcagacaggtaaggaacaggaggagaagccggccaggacaagagattggacagaagcaaggagcacaggccagaaaggagctgcagtggggccagactcagaggcaaggcagggggcgacagggactgtacaagagaccaaatcccacaggacctcctagtggaataaggagccgagctttcccttacaggctgtggggggtttgcccaccttgcccatggcaaagccttcttcggtctgtgattctgttctgttgtcacttgtcatccctgagcagcacaggagttgcacctgtcctcccaggtctcccagggccccctatgccactctcattatctcactgatcatcctacactacagtgacttgatctccagcctgcctttccaccacattgtgagcagcttgaagaagagccatgtcttgttcatctttatgtatctggagctgagcacacttggtacacactatgtgcaagtacctaaaacatttaaataactagcttaatggtcagccagtgattttaagcatgagagtgactttcaaacaattggaaccaacgctctcaactcctgaggtatccaaaggggctcctatgaaaaccaggaggaatgttctttacaggcgactttttgcacaaaacagaactaagcttcagcatcccaccaggaaagtttgcttctctgaccccctccactccctaagactggtgtttcactaccttgtgttttatattgaacctcaccaaatgctaacttgcactgagctatgccttccggattcttttactaggcagctgcactggttcatatctacacagatgggtctgtgttggtcacacatggaagcaatgaactgggacaaggtattcacaccaaaatgctacaggtaaaataaataaaattaaaccattattctctatatacattgttgaaagttaggattcatctattagggtaaatgttgactccctgtattcaaacactgagatcttgactatttagttggacggcttcttacatatcaaatagaatgtagaatggctgaggtggcagaaatcccacgtgtatgcagacagtcctggagcttggccagggttcatggatggggtgatcattagtgaaaacgccactaagaaacccatggagccctgtggtgggagatccaagcaggcaaccaggagcaggagtttctcagctagttttaatgtttacattttagacaacaatattaggttgctaatgttttattttgacaagtaagaacaagtatttcatcaactgccatcatcctacaatttttataagatatttaacacacatacatacacaccaattagtacgaatataatctcaggagaaaaacaagaataattctttaaataaccctgtgacaaatgtattagatttctatagcgcattagatttctatagcgcacatctgtagcttttgactatccagccccttagctcatttggagtactgtacctctcacatgccatatattcctgaaagactcctcaatttggatacctttcagctccatccccatccttactcccacgcctgctgcagatataggcacaagacccgcctctggtcagtcagggttccggaatcccactgactctgggaaaggacacatgattcaagcaaggccactcagagcctttcctgggactgacgtgtagatgctgggagaaaggagccatctttcccctgtggctgtttaggtactatactatagggcaggggctgccacaggcagttctgtgccatggatggaaccggccatcgtagaaagaaaagcaaatgtgagaggctgagaggagaccctgacgagaccacaaagcccctagatacacatgtacttcacactagctccatctatcctgcccagttatatgaaccaacaaattccctttggattttcaccacccagaaacaacaaagtcatccctttttttcattttgcttctttctggagaaacttcatattgaatgacattagtcagaagattagcatttgagaacgggatatcatgagaaggtgttttttgcaaacacaaaaagacaagagaagccaaaataatgttttttcctttccctttcttctttttcatctctttccttgtcatttcttgattaaatatcttcatctccacatgtgtttgctagagaaactggaaggaaaagagcagaaaagaagccaggtgcagtggcatgcacctgtagtcccagctactcaggaggctgaagcaggaggatcacttgagtccaggagttcaagatcagcctggacaacacagtgagaccccatctctaaaataataataataatcttttaaaaattatttttaagaaccagaaaaaatgaacagcaaatactggaggaatataagcaagggaaaacaaatagaaaacagagggggaggataagagcaagaaaaaggtcctcagggtcattccaagttcatctgatactgatatcgaaagatttcagaccaaattctgagccagtctcatctcagtctcccctctttctctctctctctctcttcctctctctctctctctccctccatccctctttttcttcctgccactgaaccaaataagtgcctgaaaatctcaatttggcctacttcctacacatctaaaacttagaaaaaaggaaattcttaacattctaaacggactcaatttgaaaagaaccactgtggaatattaccaagaaaacgctgtaaaaatgagcatgaggccttacaaaaaaagtagttttgatgcttataaagtacattattttagtcttaaaagggtaccatggatgtaataacaaataatttttattaagaaaaataatgattcaaatcttcatagaagtccttgctggacttgaaaatatttatgtttctcataggtggccagccatgagctaaaaatacccatgtcctatatgcacatctgtgaaacgagcacagcaacagtgcccaatacaattgctacagcagcgtctatcggtgcagatgtcaacggcagagctgtgcaggtgagtcttcctgtctctccttggtgtgcctctcccacatccctggtttttatgactagatacaggtacaatagttgacttcagagaagtcatctgtgtcactacacatagtctgaggtaactaaaatgttgggagagtgtatttggagtaggctaaattgagatgacagacccaaaatgtaaaggctcaaacacagtaaaagtccctttcttgtacacatatcagtcccgagcattgtttggtcattcgagcacccaaattgatggaggctccaccatcttcaacatgtggtgtgccaagttgccctgggtgtcatcattccagtgagcatggaggagccggtgtggaagactctgagccagatctggaagtgatgcaagtcatttccacacacagtccattagcagaaccagtttcgggctatgtctaactgcaacggaggttgggaaatgtagaatagtgggaaaccgtatgtccagctgctatggaagaaggagagaatggattttggtgaacaggcagtctctgttcctaggagacacagcaagaagaaatttggctaccaagtaatgcagagctgtgcaagtttcctccagcataaacaagtgcttgcaggcagataggcaggcagaccccagccaaggagacagggtgcaatagaagcattgtcttcagtggtattctaccgagtacttagagcttttctttgtacttattttttaactgaatttttttaaattgctaaattttcactgtctcagaatagaatcatgacttcatattccttaattcaaatatctgattgcatgtacttttgaaatatatctatttgtcatgtttctgttgcaaactgttcacttttccactgggatattgtggtgagccatattttcccagaatgctgcaatgataccaccaacaggaacccctttcaaatcagtcctaattttgtggtgatacctcttaaggaatcaaaaagcaaacactcttttttgctcagaacaaatgtgtaagaaacctcaaatgcatgagatctaatttggagtagggtcaaacacaagagaggaacagctcagagtgtatgggagttgtcagcccaaaataagtgtcaatccatcttctagagtattaagttttaggtttctgttaaagatcagaaaatttgtggtctaggtcattataaagtaaatttaattgttttctcatttcatacccaaagccaaggactttgttgtagtagtttgatggtggtcgaatgaacagatggagggagagatcagacacagggggattctggcatgtcattgttacagactggaaagcacaaattttaatgaaaataggatgtttattccatttattttaatagccataaaatacaaaagaaatggtcgggtgcagtggctcacgccgtaatcccagcactttggaaggtcaaggtgggcagatcacgaggtcaggaaatcgagaccatcctgcccaacatggtgaaacctcgcctctactaaaatacaaaaaattagccaggcatggtactgcgcgcctgtagtcccagctacttgggaggctgaggcaggggaatcacttgaacccaggttgcaatgagctgagatcgtgccactacactccagcctggcgacagagcaagactccatctcaaaaaaaaaaaaaaagaaatatacaaatatacaaaagatgtaggaaaaaaatgctaaaggccaggcacagtggctcatgcctgtaatcctagcactttgggaggctgaagtaggcagatggctcgagctcaggagttcaagaccatcctggtcaacatggtgaaactctatctctacaaagaagacaaaaatcagccaggcttggtggtgagtgcctggagtcccagttactcaagagactgaggtggaaagattgcttgagcccagatgttgaagttgcagtgagccaagatggtgccactgcactccagcctggttgacagagtgagaccctgtctcaaaaaaacaaaccaaaagaaaagagagagagagagagaagttaagaacctgaatattctaagaaagaggttctgagagtagaaattcagctgaacccatattttcacaggaagtgagccaagaaggggaaaaaataacctccagtaactgatactgttatcaagggcaggagttgtgttaccgatttttcaggatcacgcactccatagcacttgctgacctaatcagtgaacatttgttcacacaaatggtaaccaccagaaccactgggctcttctctaatgtggattccattctttactacttcaagaatgcttgtcagatccttctgaaacgccttgagcccatcattaagaaacatccggaaggtaaatgggaagactgggtaagtgttccactccctttgaaatgagaaaacaatgtaaaccagtactcagacagcaccacagcatgcacagccatcacacacagagacagttcctctaagtgtcacagtgatggagcatgccccctgtttcttccccagttgaatggatttctgcaaataggcaggatctctaaaggttgagaaggctactccaggatgtataccaggtgtgtatggagaaagcacacaggaaacagcaatcactagaaggagaaatagaagtgtatgaagaatacactctgctcaagtaagaaataagaggaaaagaatgagccttcctaagccacacacacacacatacacacacacacatgcaagcacgatgttttgggtaggttaggaggaaaactaaaaggcctatttgctcttgaatatggctcaaaggagatgactaagttaatccaactttacaatatcctgtgacttttttcattggagcaattatttcacatttacacacacgcttactgtaaagttctaacatttagaaatgaagtccaaataccttgtgcactgagtccctatctcatggatgtgcagcaggattctattttatgtttgttcaatccagacttctaaactcaatcagaaggaaattgttagtgtgccaattaaggaaaaataatatgatgacgagttctattattggtagcaaagcaccagcaacaattatgagatgtcaattttagattggacatttctgttttcacctagcagatggtatatttgtttcgctttaactaaatatgcccattctgcagatagaagctgcatttgaacaaagaatcagtctctcagccactggatgcttcaggtaaacatcacaataatatcttgacgtagctaagaaaataagaggtaactcaatcactgttgatggctgttgtaatactttggttcttgtcgtcttagtttaaaagaatttaaacaagagacacagcaaagcaaaacaacaacaacaacaaaaagagacacacagcaaaagatgtgcagcatagagtaatttattgcaaaaaaaaaaaaagaatattttgaaaatgaggtgcagagtagacagtacaccctgagagagaattcagggcaggctgtccgtaaggatgagacagcaaaaactggtattgcggacgctccctttatggggatcttacatgattattcatattggtgggaagaggtgttactagtaagcacgttctggatggtcttctgggtgcacatgtgcagctgtacatgcgtgttcatacatcacatgtctcattagtatcttaaatctccacccagaggtgtgttttttactattaaaataatttgattttacctgaggacaggtaaaatcaaagtgtgcatgccctctacaggggaaattccctactgaagataactttgtttgaatgagtgcgattacaatggaaatgctgaagctttcgtgttgattgtgccgtcaccacagtgctggtgctgcgtccagagaacgtggtcactttcttgactatctatgctgcctcaactctgggccgcaggtccctcatttgtaaaatacatttttattgtatgattgctgaggtcccttctaggcccaaaattctatgatttcacataggcctttcagttatgtccaaaaaaaaaattaaacaataaaacacccttattggggaaaaaaattagatgcttgacttacaacagctaatccttataatcattatttactatttatttaatcattacttacaatatctaatcattatttactattctttatcatgaatagtaaaaatatattatcattagaaatgacttgcatctcaattttacaaatctccctccttttaccataaaacctgtctattttgaagctccgtactagacaagggagaatgggtggatgataatcaccagtcattgtcaaattcaaaaagcatgtgacattagttttacagtctaatgaaacaaaccaccaaacaatagatacacacacacacacacacagagaacagtaaagcaaatcctcatgaagaatgaggaaataaggaggtaacagcccagcctagagccttgtacctaatgagttctaaattcctaagttcagttacctaagaagagagcaaaccagccctctatctgaatatatcttctattataaattaatgcattgaattaccagtccttttttaccaaccctgaattaccatcagctccctgtgagtttggttagcactatccatggggtccctttgggaagagtggtcccagggggactactgataaaattcaactgaggttctcagtgggcaggcaggctaaagctcaaatcctttgtggtcaagatacaggcacactgtgaggtccggtcccaaacaatctattggcttctccctctttttgacatcctaactgtggcacaaggaatgtcctctttaaatgagtttaaaaggcaattgaaatgaacataaatcaaatgaaatgctgtacttacctggcaggggagatactgtgattctgaaggtggttttcctagagtgaggcttatcttacctattttactccagaaatgctgacccctgtgatttccccaaatgtaggaaactcaactgcataatttatgataatgggagactgtatttgtgccctccctggcaaaaaaagaaaacgaaacactaccataaaaccttggtaacttttaaaataaatcaacattctatctccccagctcaagctaaaaggctttatttcttctgtcaggggctacaaggccttcatggactgggagaagggggtgggggacccatttccttactatgtctgcagagctgcctgttctgaggttgaaattgactgcctgacaggtgctcacaaggtaagtcaagtctaactttcctcttggcaaatcaaaacaacaaaagtgtgttgtatagtaaatagcccaattccattatgtaattctcttataacaagaacaagattctttcaattccatgggagggtccagagatctagccttatcctgaatttccacttaaaaagacaatatagtagtcaaaaatgaattgctgatgacagtctaaaatgtattaaatttcttatttcatttagacaacaaaatcactttccaagatttctcccccaaaaaagcttctatttataaagaaaaaacacattttctaatctgaaggaataactaacttagtaaatagtcttgagcaaacattttgaaagcacatagcaatgtgctgtttctccaaagtcaattatccaaaaagtattactggaacagattttgggggaagagaggtattaaaataattgttacattttctatttaattgaacagccaagaaaccacacattggagacagggaatcatacttaacccaaaattaacaacttgcattataaaggatgcaattttacccaagggccttggaataaatccctaaagatatgaaacttatgaggatcttccagaatttatgatgctagaaaagtcaaaatgtggtcttttctgtgcctttcagtttacatttacagtttaaggttcaataatttcagtatcactttgatcccttaaaatagtttatttcttaaagaggcaaaacttcttttaactaaagagaaatcagagaaattcagtgacaggcctgttgcagctggccatttgtggttggtgaactaaatcatccatcaactcagtgttagtgcacagccatctctttccactgtccagcacttatagtgcaaaacacaccaggtttcaaggtagaagtaaactgaaggcccactctgaggtgtgtccaatctccctccctatccaggttgaggatagatgaaggctggtcccaatgcccagagtaggttgtccaagaggccaaggtttgagtcaaaagagaattgccaagtccaaaaggctagatagaaagtaggagcccaggtattgagcccaaacagagaatgatgatcttgtcagagcaagcactgggaaatggggggcagaagggaagccctgagacactccggagataggccacaggcacttaggggcttttagtggctccttaataacctgcaggcccatgcccagtgccaaaacaagggccagattcatgtgatgcttctcagagaaggaagtagattagcaaatcaaaggtggtctcaacatttgccatgaataccttccaagatcttgcaaatccacaaactcatacatgccagtatggctctaggattttcacagtaaaatggcaatagtaccacctgccacagattatcatgaggactacatgagctcataaattatattccaacaacaaattcaggttgagaatcagatgaacaaccaggcacaacaattatttaccaagtgactcactcagacacactagcatgtcatggactttggagtcacttaagaggagtcaaaaccatgaatgtacaagatcttccagggtcatggacagtcctggcactaaatttgaagagttcagcaggcatcttaacagctctaatgttgacagggttcaatgcagtgttaattagccagcaggagttctggaaaaactggagatcatttgagtatacctgaaaatgatacttttaattcaaatttttatggtgaggtaatttttattttgggcagaaaatcagaacggacatcatcatggatgcatgttgcagcctaaatccagccattgatattgggcaggtaggtgctggcccatctgggcagatgccccttcctgggagtcatttcagggtaggtaaaggccttctaaaaatgacacaatgtcacaaagcttgaaattgtccccctccagattgaaggtttgtttattcagggaatggggctttataccactgaagaactgaaatattccccagaaggtgtcctgtactctcggagcccagatgagtacaaaattccaaccatcactgatgtcccagaggagttcaatgtctccttgctgccatcatcacaaaccccactaaccatctattcgtctaaggtaagcatccaaacctaccactgcacggtgtcatggatcgggtagcacaggacagatgaaagcaggtggacaaaatagtaaatcaatgttaactgttatcaggaacaaatcattatagactgctagaatttggagatgactcacccatggcaatcgtgagccaagaattttaataatttcctctttcactgaaaactctaaaactcgccaaaaagctttgacttcttaatagaataacacttttacttaagaccctgaagactataatattaaacaggattggaggcgcaatgcgactgaaatcctagcagtggcagcatggacagaaccctggactgaggtcgcagaagacctgcgttcctgccacagccctatcccctccccatggtcttaggcaaatcactcacctctgaggggctcagggtcctcaccatacccagaaatgcatctagaacagtggttctcaactgggagtgggggaagtgggggaagtgattttgtacaaggcagcccccgaccccattacaaagaattatctggcacaaaatgttactagcatcagaaagcaaagacatcaacccttaataattgctaaagtaatgaaactgcaaattaaaataaagatcattatttgtttgccttgctctatgcagattacgtgaaaaccaccctcagagtaagaacttcatctagggttgagatgtattgttaaagtttcttgactcctcttaagatattaaaatctttcctggccatggtggtgcacatctatagctccagctactcaggaggctgaagcaggggattgcttgagcccaggaattcaagaccagcctgggtaatcaataaataagatcttttgggagacttcttgctagtacccatcctccaaaaaaaaaaaaaaagtatccaactccatctgtagaaatttcatcatgtccaaactggatcccactgtcagcccaggaacaccaggaacttcctctagacctatagtgatgaggtcagggcaaacctgaaaggaaggacaatcaatggggcctttggattctcatcgaactggaaatcactctaaggggaaaaggcaaaagggagctaagagcccacagagagcagcttttaagccaccaagagtaacacagggcagaaaggactcttgagtccttgtagttgcagacagccactcacaagcagacactcaggaaaatcatgggtttgcaggtcccacatggagggtactatgtagaaacaacagagagctaccaggcaccgggagctgtgctaggtgcttttgcgtttcctgatccttgcaacacccaataaagttggcatcactgcccacacttcactgacaaaggaacagaggagattatctcacttacccagagaaacatggggagtaagggccaggattcagactcagtctcactaacttaagggtcacaaattggtggtctactggctaaatctagcctgaagatgtacttttctttggcctacacagtgtttttacaagtcagggaattttactttaaaatacagatatctaaattctcttgagaaaatggatgatctggtaattttggctgcattcttggaaaggcaacaactaactacaaccaaagaacagctgcccttatagacaggacatgggggtgctcttcctcaccttactttccactgctccttattgtccttcatctgcctgcatcactcattgacaatacctgcctgttccttgcagatgatgggtttacaacctttcatctggtatcaaagtctgtactctttcttctagagtaccctgcctatcctgaccctgaagttaaaaaaggcatttttctctctgctgataaaactggctagttcaatccattgaatgtgttttactaaatagggtactttcccattaccacgcaaagacactcatacacacacacatacacacatacatacctttcctagggaacaaaatttaacccagacgggattcaagatctgggaaattcagattatgctgggactttttttctttgtctttgcttttttttttttgagatgtaatcttgctctgtcacccaactggagtgcaatggcattatcttggctcactgcaacctccaactcccgggttcaagcaattcttctgcctcagtctcccaaatagctaggactacagacgcgcaccaccacgcccagctaatttttgtatttttagtagagacggggtttcaccatgttgggcaggatggtcttgatctcttgacctcatgatccatccgcctcggcctcccaaagtgctaggattacaggcgtgagccaccaagcccagcctatgctgggatttttaagactactcaagcttctgattcagtcagtaagtcagccaacaaacatttattgagaagattttgtgtacaaaacactgtgcaggggttggggacacaatggtgaacgagacctggcccctaccctctagaaacttgtagtgtagtatggaagtttcttaaaccaatgtgccttcttacagggcctcggggagtctgggatgttcctggggtcatctgtgttctttgccattgctgacgctgtggccgcagtgcgaagagaaagagacatagctgaggacttcacggtgaagagcccagcaacgccagaatgggttcgaatggcctgtgcagatcgattcacagaaatggtaggaaattgtttattttcctaaaaggtgatttgtctatttcctgcttcttagacctcttgggtaaatgtataacctaagctgtgtctagctaatcaaattatgaaatgaaaaaagcaaatcacacaaatacaccttgtatacatgtagtaattttaacttttaaaaaagtatttcccaagtgttaatttgatcatcttagcaaccctgaagtatgataatttattaatatcatgctgcagccaggcacggtggctcacacaagtaatcccagtactttgggaggccaaggtgggcggatcacgaggtcaggagatcgagaccacctggctaactcggtgaaaccccgtctctactaaaaatacaaaaaattagccaggcatggtggcacgcacctgtagtcccagctactcaggaggctgaggcaggagaatcgcttgaacccaggaggcagagattgcagtgagccaagatcacgccactgcactccagcctggcgaagagtgagactccgtctcaaaaaaataaaaaataaaaataaaaagtatatatattaaaaatgctgcaaaaactaatagctaaatggaaaggaactgactgatttctccaaacagtggttaagtattccctccctctatcctaccaactccatcctgcccttcaacaaaaacaaacacacacatacagaaatccatgtgtcatatagccatatttgataatgtcactttctgtgttccctatacagagagtatacacagactgcctgtcatttagaagtagggtgatcccattgcaagctactgcctttctccttcattctgtttcataccaatgcctccaagcccgggagagggaggcctagggagttatccatggggatacacacatggcaaatcccacctgctgaaggttacagataagcaacttcccagaggtcatcgagcctcgcctttgccaatttcctaagcatcctaatttaagtaataccaggtagcattacgtgactgagcaccaaactaaacattttacacgtattagtcattacagcaactctatcaggtaactgctggtattttcttcattttactattgaggaaataggtgcaataactttcccaagatcacacacctagcatttgggggccaagattcaaacccaggctgcctggcttcactataatatatggtctctcagagagaaaagagttgattctccacttcttaaaaggcaatttctattttcaaatctatattaaaagaagcccaaatacttaactgacctcttcaaaataaccaaccatagagtgaaaagatcttatagaaatattgcttaaaaggaagtgtcataattattaatttccttcccctacataacctattcctatttccatcttcaaatctaactcaacaatatttcttatactccaataataccagtcaccctgtaatttccctccaagtcttctcccagtctatggatctgaccctcatctgattccattgtctacagcaatgattacaatcacctgcctctggacagatgccctcctcagatgggcagggccgggaaaccagcaccctccacccactccaggaactcctctgtgcggatcttggcctagaggtcagtcatctgtccgttcctgactctgctggtgacgtgatcactgtagaatggtgtcatctcataccccaaaagcataagcacttctgacctttaaaaaatgttcttattcacattttgcaataataaataccctcttctggaatggggcagattaagaaaactaaaaaacacaaaaaacaaaaatatacttctaatcttcctttcttgcctgaggttaatgttttcagtcttccaatggtctggctcctagaaaatgaattccttcatgtctaagatttcaggctgttttgaatagtccagttgtctggcaaagtagctctgtcacatacaatggtaagaagtgaaacactttgatttcatttaccatttgggacttagcttcttagctacctggtccatatgatgaaaccatattttctctcaagtctgatggttccttgataagactaacatatctttgcagatataaatcatctactaatttgtgcccatcaatcaaatgctcaatgttagaataacctagcattttctaaaatactcgtagataaatggtttataaatatcacttcatgttataacctatgtttgctattttagacctccttttaataacatacattgcatttcgtctttgtaaaagtaacatatgtccgttactgaaaaattagaaaatgctgaaaagaataaggtgaagttaaaatcagccataatcccaccaaccagaactaactataaccatgttttggagtgtgagcgtgcatgtgtgtgtgtgtgtgtgtacatttttaaccatcctttaatttatatgtttatatgtacaatatatcttatttgtaaactcatttaataaaatcaggatatccctgacgtaagtcttgaaaagatttgaacagtataattgggaatgactctgctgagcctcagtcacagaaaaatctggattgggaatttcatgggaaaagtatcccatgaagcatcactcaaaaaatagttgcttaaacacaaaaagagaatacctggccaaactcgtttatcctacaactcttaatctttgtctatagctactggaataaatttgaggggtgagggcaggacagaatgtttaacttttcaataataagccccttgttattaaggctacttagaccatatggagaatgatcatttatgctttttttttttcttttggagacagggtcttgctctgttgcccaggctggagtgcagtgttgcaatctcagctcactgcaccctctacctcccaggttcaagtgattctcctgcctcagcctcctaagtagctaggattacaggggtgtaccaccatgcccagctaattttggtatttttagtagagatggggtttcaccatgttggccaggctggcctggaactcctgtcctcatgattcgcccacctcagccttccacagtgctgggattacaggcatgagccaccgtgactggccataatcatttatccttcatactgataattacctacaatattcctaaccattgcactgacctcacatgtatttgaaacaatgaaaagaaagccctctccaaatacatgagaagacttcagttagtttgttcgagcctccagaccctgtctcctcaactgttcaccaacagagagaaggggctggttagaagccagccttgattgggacctcccaaggagtgcagagaggaggaagtcctgggtcttagtttaacagaggccaagaaacacacaaaatttagattcttctactattacctgttgcaggaaatggcaatactcatctatctatacagaaacataaacaagaaacccaggagccatcctggcatttctctccctcatactcagtagctagtccttcaccatgtcctgttcattttcacccccaacaatttcttgacccagtccattttctccatccttaaccactatattattcattcatcccacaaacagatgttgagcatctaatgtgtgccaggcattgttctacagaacaattctggggctacagtagtgaatgaaacagagaccccctaccttggtggagtttagtttctggtgaccctgaagctacctaccatctctccaccctggatcaaagctgcctcctggctgatctctctacaccccctgcagccagaagcttgtggtgtggcaaagcagaccatgccacaccagcacacacattggcaaaaagcttccctttgctcataggagacagaaaacttcttaacttgccttcttgagcctacaaaccttcagagtccagcatggccaaccccacccacctctccagccacccatgaccccacccagccacacttgtcttcttctgtcattcctcatgttaaggacagagacgctcactcctgctttagggcctctgccatgctcttccttctccttggaaccatcttcttctgttcaacttgttaactcctactcagctttaatcaaattcaacaaattcatttgatcccttcctttctgcatagtttgaggtcccaggaatataaggtccctgctctcaaggcatttatagtctagcagggaaggaagacagtgactgtgaattataagtgcttggctgaccctggggtatactactacatcccacagaataaaacctttctgacttagcctcgctcttttcttgaagtcagaggggtcatagatgggatcccactttggttactcgtcatgcaattgttcatttatctaacatatttattgagtaccttccatgtgccaggcactgctggggaactaaaaaaatagtggtgagcaaggcaatctctgccggcatagagcttacattctgtgggggaagccagacagtaagcaagtaaacaaacgcacaatataattgcaagcagtattgaatactgtgaaggaaaattgaagagaagggagctagaaagtgatggagagattatttgattatagtttcttggggaagttccctctgagagtgttcacatttgagccaaagcctgaatgaagcaagggaccaagtataaagctggcaatgatacagtccaggccaagaacagctcatgcaaaggccctgcagcttcagaagaatcaaagccacttgggactaagcagccctcaaaagtggcccttttgtgtctgatttgcccctctggtagaaaagtgtctgatttgcctctctggtagaaaaatcttacaattgttgttctccatggctgagagataaaatagaatttgtggccacaccatttattttcacatcagcgagtgaaacctggatagtccttcttccaatcagcaactttcctagtctttatcatatgctttatcacacttcaggtctacttctttagatctttagtgactataattaattcatccccttagaagccacagcaggcctcctgaagttcttatagcctggctgctcacacagaccaatttctaaagcatcttagaacaaatctgaccccatatcagaatttactcttttttttttttgagacagagtctctgtttcccaggctggagtgcagtggtgcagttttggctcactgcagcctccgcctccaggattcaagcgattctcctgcgtcagcctcctgagtagctgggattacaggtgcacgccaccacgcccggctaatctttgtattttcagtagagacagggtttcaccatgttggttatgtctcaaactcttgacttcgtgatccacctgcctcagcttcccaaagtgctgagattacaggcatgaaccaccgtgccagccagaatttacatttttaatacatttgatcaaattacaacatggtttttaattgaaatatataatgattcacactggtacacaatgctgtactatgcaaatgtgtatatagaaagagagaaagaataagaaacatatatattaacagtctttgcattgggcctttgaatgcccttgtcaaaacacaatttgttctaatgaataagaaggtcagggagtcagagtgtctgtatactagagcatgagtattgaaaagttcaagacctcctcttttaataacctccttatagccataaggtaaataacagcccgactagatctatttcttaaatagaaatgatggtaaaacactcagtacttttccctcggaattaaataaaataatgcatgtaaaaatactgtgtaaatatgagtcactctgtaaatattagtgttaaggtcatcaccaaaaacccataaactgttaatgaccttcttcaaaatatgcctctcccaaaaggcttgaaaagtgtttccacattaaatcaagttgacctgctgaggccagaataaacaacaactcttctaactagcagcttcattttcatgggtaaattagcttcaaaaaaggcaggcattggtaagaagcctaaggcatgtttgttaccaaaaaaatcatactgtatgaatgagcatttactatgtcaaaaggttttttttttttttttaacatgtttgggtttgtttaaccttaatcacagcctaatgctggctgccatttttgcatggctgtttctcaggtggttaatttctggtgaggacagtgttgctggtttctactctgagcccagcaggtcagtccggctcaactaggcgtggccagaaacatcatctctatgtaatttccttttcggtgatgggagaaagaaaaatatgtatttcctggaaaatgtgttttgtacagtcatcttaaattccacaaggggaaaaaagtaaacttcctttaaagatatacatatttaacactttcatatgaggacttctccttagaaacagtgatttcatttaaaaaaaatatatatttaggattcagagacatgaagggttccataccctcaaaaattagaaaaatactgccttggagaatgtggaataggcagacattttttacatgttatcttaatatcaccaacagcaaaacgttatttattgagtaatcaccaaatgtggtctatgtgggctgccatagtgggaggccatgtagagccaattaacagcttcagtttccatctcctggaagttaaaatcagacacctcagcttggaaacaggtttataagcaggtttcagcttaccccacttctgaaggggcagcctggaacacgctgactcataagaaatctttgcaatcataacaaatggctcatgtcctgcgttaggctgacgcatgatcttatcgtaccctagtgggaaaagtccttcattcttagatcagtcctcagttccaaatggccatgcctgtccttcatagaatctgctattctatgagactgaccaatggctagtttctaacggccttcaccttcttcctacgccgcaaaccctaatacagtctccatccacggactcccctcctttacagcactgcgtctctcacatccccacgtctcattttccctccctgcttcttttgcatttctagatgcccagactcagtgagaactggcagcattaaaagcgccacctgtttagttcagtatctggagcccttcctccctgctgaaggaggagaggcacgtgaacattttgcatgctgccagacgcctggtttacccactcctctcgggcagttcactcccaaacactagccgttcaagatgaagcctgctcaaccccatactctatacacagccctggatttctctgagctgggggagacatctaccagccctacaagactgtattctatttcttggggctcatttaccacaacatgtgaaaacatgaaatctccagcctgttcagctataatctcagctacagataattggtagggccttagaccagcacggacatgcttcggtcacctggattccttgagatggaacacagagcagactgcacggctcaggacagactgagagtagagtctcccatggtgtcttcctcagaatgctcaacctattgacctgttcccatgagacacatacacatacatgcatgcatgtactcacacagacacgcatgtacgcacacagacacacatgcacacgcacactcagacaggcatgtactcattcttaaccacattcttctagcctctcatgctgtcttggaagaggttttattggctgtgaaactgattccacattgaatatgtttgtcccaggatgcaggaactgaatcatttccctgcaatgcttggtgacatttcacagagtagccattcttactcctgaagggagagtctctgatactgttattgaatgtatatttttgtatctaaaaactctcctatgtgatctcttcctccttaggtttgtaggagcagaggaaagggagagatagggagaacacctaaaagggaagaggcaaaagctggaggcattcctcagtttaagggaggaaataagagatgcagaatataaaacaggagaaaagagagccatctcatcctgccaaggagaagagttacaatgaactattttagcttagtgcttgagacaggccctgagtagagtgaatctgggtttcaattccagctctactttttttttgagatggagtcttgctctgtcacccaggctggagtgcagtggcacaatctcggctcactgcaaccaccgcctcccaggttaaagtgatcctcccacctcggcctcccgagtagctgggactacaggtgcacaccaccatacccagctagtttttgtattttttgtagagacaaggtttcaccatgttgcccaggctggtgtcaaactcctgagctcaagcgatctgcccacctcagcctcccaaagtgcagggattacaggcatgaggcacaggacccagccccagctctacctctgatgctttatttaagttctctgatcactcagttttcttatctataaaatgagggagaggtggggtagtggagagaataactctagttactttacaggattgttgtgagaattgaataagataatactaaagcagttggcagttgttgcacatagtaaatggtcaatacatattgatgatgatgatggtgaagatgattgagtcagggatccctaagaccacccttaggtttaaagattcgctagaagtggccaggcacagaggctcttgcctgtaaccccagcactttggaaggctgaggcaggaggatcacttgagatcagaagttcaagatcagcctgggcaacacagcgagacagataattggcagggccttagaccagcacggacatgcttcagtcacctggattccttgagatggaacatagatcagactgcatggctcaggacagactgagagtagagtctcccatggtgtcttcctcagaatgctcaacctattgacctgttcccatgagacacacacacatacatgcatgcatgtactcacacagacatgcatgtacgcacacagacacacatgcacgcacacactcagacaggcatgtactcattcttaaccacattcttctagcctctcatgctgtcttggaagaggttttattggctgtgaaactggttccacattgaatacgtttgtcccaggatgcaggaactgaattatttccctgcaatgcttgatgacatttcacagagtagccattcttactcctaaagagagagtctctgatactgttattgaatgtatatttgtgtctctaccaaaacccaaaaaaattagccaggcatggtagcgcatgcctatagtcccagctactcaggaggctaaggttggaggatcgcctgagcccaggaatttgaggctgcagtgagcttgattgtgccactgcactccagcctgggtgatagagcaggaccctgtctttaaaaaaaaaaaaaaaaaaaagagagactaaaaattccataactttagcagaatagtagacccaaatctgccacagctaaactgaggaattttgccctgtgtccagcccagaccttgcagaacaggctcattctaaagaagagagccaagaagctcccacagggacagctaagaagagaatagggaaggccctttgggaaggcaaacccttcgtttacatttcaatacagagggcaaaaagtaagaatagaatttaggaaaatgtcctgaatggtagactggtgggtgaattatttggcttctttttgtatttttgtgaaataaatacatattaggaggggggagaaagctttttggaaccttcatagctttccatcattggggaaaagcttgctttgctttttaacacatttgtaactaaaagccaacacttcaaacaaaaacgtagcaggggagaggagagatgtgtgttctgctttgggcttgaacctaaggggaagaattccccaaagaggagacaggcattgaggaccacgaaaaaggatgaataattctcggagctt

SEQ ID NO: 589 - DNA, 2946 bp, Homo sapiens
ggactgacaataggcgctggctgcagcctggcccagatgcaggacatcttggctgagagggtagctgagctcccagaggagaaaacacagacgtactgagccctcctgaagcacctgaggagtctggcaggccagcagatccggaatatggcgtccttaggggggcatgtgataagccggcattgctattcggacctgaatccaattcttgctgtgggcaatgctaccctcaatctgatttcagcagaaggtacgcggcggattcctctaaatgaacattttcttgctgggttggcaagtgcagaccttaagccagaggaaattttggaatctgtgcatatcccgcactctcaaaagtgggaatttgtgtcagccttccgacaggctcaatgccagcagaatgccttgccccacgtgaatgccggcatgcgagtccttctcaaagaaggcacagacagcattgaggacctgagcatcgcctatggaggggtgggggctgccaccatcagtgcacacagatcctgctagcagctccttgggaggtgctggaatgagctgttgctggatgaggcttgcaggctgcttctggatgaagtctcgctcccaggctcagccccgggtggccgggtggaattcaagaggatgaggaccctagtcgtcagcttcctcttcaaattctacctagaggttctgcaggaactgaagggtggcttgaggatcagattccaagcagtcagtccaggtcctcattatgtggagggaggaggggaacaagaaacattcataaaacatgaagccggggcaggcagtatggatcctggttatgcacactatgctggatacattagccaaagtgtggatcctcaccagcctctccaagacccagttggacaccctatcatgcacctgtcagctcttaaacatgccactggggaagccatgttttgtgatgacattcccatggtggataaagaacttttcatggctttggtgaccagtagcagggctcatgcaaaaatcatatcaattgatgtgtccaaggcccttgaactacccgaagtggttgatgtgataacagctgaagacattccaggcaccaatggcgctgaaggtgacaaattgctggctgtagataaggtagtctgtgtgggccagatcatctgtgctgtggttgcagaaacagacgtacaggcaaaacgagcagctgaaaagataaagctcacctatgaagatctggaacctgtaatcttcaccatcaagaaaacagtgtcctctactttaaacatccccatcaacaggatcacctgtcatgtaaaacgagtgggtggaggttttggagggaaggtaggaaagccagctgtattcggggctattgcagctgtgggtgctatcaaaactggtcaccccattcgtctcatccttgatcgtgaagatgatatgctaataactggaggaaggcatccattatttggaaaatataaagtaggattcatgaacaacgggcggatcaaagctctagacattgagtgctacattaacggaggatgcacgctggatgactctgagctggtaacagaatttctaatactaaagctggaaaatgcatataaaattcgcaacctgttcaggttccagggccgtgcatgcatgacaaatttaccatccaatacggcctttcgtggatttggcttcccacaaggagccctagtaacagaatcttgcatcacagctgtggcagccaaatgtggccttccaccagaaaagcttgtgctttcgtggagaggtttttcaagtctctatttggccatcagtttctgccttaccataactactgaatttcccacctgtttcagattagagagaaaaatatgtacaaaacatatctacagatatgtagataaacatatctacagatatgtagataaacatatctacagatatgtagataaaaccatctacaaacaagcattcaaccctgagaccctgataagatgttggaatgagtgtctagacaagtcttcctttcacagcagaagaatgcaagtcgaagagttcaataagaagaattattggaagaagaaaggcattgctattattcccatgaagttttcagttggctttgctgcaacaagctaccatcaggcagctgcactggttcatatctacacagatgggtctgtgttggtcacacatggaagcaatgaactgggacaaggtattcacaccaaaatgctacaggtggccagccatgagctaaaaatacccatgtcctatatgcacatctgtgaaacgagcacagcaacagtgcccaatacaattgctacagcagcgtctatcggtgcagatgtcaacggcagagctgtgcagaatgcttgtcagatccttctgaaacgccttgagcccatcattaagaaacatccggaaggtaaatgggaagactggctcaagctaaaaggctttatttcttctgtcaggggctacaaggccttcatggactgggagaagggggtgggggacccatttccttactatgtctgcagagctgcctgttctgaggttgaaattgactgcctgacaggtgctcacaagattgaaggtttgtttattcagggaatggggctttataccactgaagaactgaaatattccccagaaggtgtcctgtactctcggagcccagatgagtacaaaattccaaccatcactgatgtcccagaggagttcaatgtctccttgctgccatcatcacaaaccccactaaccatctattcgtctaagggcctcggggagtctgggatgttcctggggtcatctgtgttctttgccattgctgacgctgtggccgcagtgcgaagagaaagagacatagctgaggacttcacggtgaagagcccagcaacgccagaatgggttcgaatggcctgtgcagatcgattcacagaaatg

SEQ ID NO: 590 - protein, 802 aa, Homo sapiens
QLLGRCWNELLLDEACRLLLDEVSLPGSAPGGRVEFKRMRTLVVSFLFKFYLEVLQELKGGLRIRFQAVSPGPHYVEGGGEQETFIKHEAGAGSMDPGYAHYAGYISQSVDPHQPLQDPVGHPIMHLSALKHATGEAMFCDDIPMVDKELFMALVTSSRAHAKIISIDVSKALELPEVVDVITAEDIPGTNGAEGDKLLAVDKVVCVGQIICAVVAETDVQAKRAAEKIKLTYEDLEPVIFTIKKTVSSTLNIPINRITCHVKRVGGGFGGKVGKPAVFGAIAAVGAIKTGHPIRLILDREDDMLITGGRHPLFGKYKVGFMNNGRIKALDIECYINGGCTLDDSELVTEFLILKLENAYKIRNLFRFQGRACMTNLPSNTAFRGFGFPQGALVTESCITAVAAKCGLPPEKLVLSWRGFSSLYLAISFCLTITTEFPTCFRLERKICTKHIYRYVDKHIYRYVDKHIYRYVDKTIYKQAFNPETLIRCWNECLDKSSFHSRRMQVEEFNKKNYWKKKGIAIIPMKFSVGFAATSYHQAAALVHIYTDGSVLVTHGSNELGQGIHTKMLQVASHELKIPMSYMHICETSTATVPNTIATAASIGADVNGRAVQNACQILLKRLEPIIKKHPEGKWEDWLKLKGFISSVRGYKAFMDWEKGVGDPFPYYVCRAACSEVEIDCLTGAHKIEGLFIQGMGTTEELKYSPEGVKRSPDEYKIPTITDVPEEFNVSLLPSSQTPLTIYSSKGLGESGMFLGSSVFFAIADAVAAVRRERDIAEDFTVKSPATPEWVRMACADRFTEM

SEQ ID NO: 591 - DNA, 51698 bp, Mus musculus
ttgtgtgagcatgtacatagggttatttagtggaatgtggccaacttaccagtggctagcaatagcatatagaaaaatgagtccacactgaggagatagttgataaagtgcttaccactcaagtttgaggactttggtttgattcctagcacccacaaagaaaaaaaagtcaggtgtagtggcacacacttgtgatcccagttctatggaagtacagacaagtggaaccctggggctcactagccagccaaagtcacccaatcagcacgctccagaccagcaagacactccacctcgcaaaataaggagggcagatcctgaggaagcatactgaaggttgacctctgacctctacacacatgtgcatgtacacacatacacaccaacacaaaataacagcaaatgaataacagcaaaatacattctaaaagaaaattactcccccttcccaggagccattagttgtcaatagctcttcagtaggctttgacgttagtttaggaagaaaatgacagaatttttttacattctgttgttttaatttctttatttatggtttttgagacagggtttctctgtgtacctctggctgtcctagaactctttttgtagactaggctggcctagaaatcacagagatccacctgcctcagtctcctgggagccggaattaaaggcatgtgcttgtttgtattgtaattttatcatattttaaaatacagaaccatccgtttccgtattggatgcctgtgttgcatcgtgtcccgggtcataatgcctggactcggttccagctctgttccagctctgtacaggactgtggatggactcatcaggtcctcacacctcagcttcattaactattaactacaagatgaggcagaggaacatctacttcttagagctgtcaccgagattcactgagtcagaatggggaagcacttaaaatggcagccagcagagcttcaagccccgggtatcagccactctcgagtccccagctgtccaactcagcatttcccctgcagcggtccctgtaacacactagtctgttccccttcctgggtgacgtcatgttccttttcctgtaagtgcttgtacatgcttctctagcagcctggctgatcgctatttttaaaacaactagacacttttctcatattgatccattttgaagaatgatcgtaccaagtgctagcaagagaaagggtgtgtggctggagagatgactgagaggttaaaatcaggtacagaactcttgcagaggaccgaggttttgttcccagcagccacatgttactccatttcctgaggactgacactcttttttggcctccaagggctcctgcatgctcgtggtacatacatgtacttccaggaacacatgtatatacaaaaaaatgaataaaaacaaacataaaaatatttaaataaatctttttggggggagagtttcgagacagagtttctctgtttagccctggctgtcctggaactcattctgtagaccaggctggccttgaactcagaaatcctcctgcctctgcctcccaagtgctgggattaaaggtgtacgccaccactgcccagctaaataaaaatatttaaaagaaaccattttcaggtagagatatataatatgatacaattaataaaagcttatttttgttttgttttgtttttttgctttgaagagagttgggtcttttgctttctttttcattctttttcttgttgtttgaaaccttctcatagcccagggtggcctagaactagccacagagttgaaacaaagccttgaactcttaattttcctgccttcactgtccaggaaattgctgagatttcaggtcaacacacttaggtttttatactgaagtggaaatttaagggttctttggagagtgagatgtgttgaatagtgttttgctggggtaaactcatgaaggagtgttttcctgaagtggacacaggtgaaaggctaagggagagtcgtgaaggaatgtttcactgacgcagacacaggagagaggatgttctgctaaagcaaccatgtgacaagacgcatggtgaaggattcctcactaacgacacttgtgtatcagtccgccttacattgtgtagtcaagctgcatttgtcaggacttcatagagagaaatgcaccaaaattcttctggtgatgtgctgtagcttcttgcctcttcctcggacttgggctgattggcagagtgacgtcagctgagacagatgcacatgctgaggtaaacacgtgctgaggcaaggcacatggaggacacgggatgtttggagggtataaaaaggacccgatggatgtggctctgtggcgcaatggataacgcattgaacttctatgggaacaaaacacccatggaaggagcaacagagacaaaatttggagctgtgacgaaaggatggactatctagtgattgccatatgcagggatctatcccataatcagcttccaaacactgaaaccattgcacacactagcaagattttgctgaaaggacccagatatagctctctcttgtgagactatgccggggcctagcaaacacagaagtggatgatcacagtcagctattggatgggtcacacggcccccaatggaggcgctagagaaattacccaaggagctaaagggaactgcaaccctataggtggaacaacaatatgaactaaccagtaccccggagctcttgactctagctgcatatgtatcaaaagatggcctagtcggccatcactgcaaagagaggcccattggacttgcaaactttatatgccccagtacaggggaaccccagggccaaaaagggggagtgggtgggtaggggattgggggggtggggtatggcgggacctttgggatagcattgaaaatgtaaacgaggaaaatacctaataaaaaaaattaaaaaaaaaaaggacctgatggatggtgatggaggctgagctaggcttgcttatagagctatctgtgcaatgcttgtggatctcgagtcttcactgatatttgtataatccaaaataaatataagaccacctagccccttccacctctgaagggacttcccaaactacactagcaggccaagtacagacccagataaggaagctggccgactaaacaatgctgagaaaaaaacataaaggcaggcagagtgagggactaggccaaaggtagtcatcctatgcaaaccaaccaatgtctgaaatggttagttgctacaccaattagaataagccagctagacctgttgcctaaatctgccccttagaagatataaaaagtgtgttctttgtttgtttggggactctcctcttgcctgcatgtgaggggggtccccaatgtgttggaaaaaaaaaaacctctttggtttgtagtaatgttggtctctgtggtctttgtgagtgagggtcttctggtggactccatcatcttcacttccctgagagaggcacagctaagaacttgaaatcctggtgttcctcctggtccctcctgctgacatgagccaaggctgaggcatggctgtcctgttaggtcctgccaccactgctgctaatccaactctaccgaactggacagctggtgtatccatgaagtgtttacaagtgaattgagctgcctgctgacctgtgaactgaactgccagtttccaaacaacacagccgggagttgttccaaagaacctttctaaacaggtcccacttctcccctatcctttctttcccactacctctggtgggtggtgggctaaaagagaggttaaagcttttttttttttaatcttttttttaaagatttatttatttattatatgtaagtacactgtagctgtcttcagacactccagaagagggtgtcagatcttgttacagatggttgtgagccaccatgtggttgctgggatttgaacttcagaccttcggaagagcagtcgggtgctcttacccactgagccatctcaccagcccgaggttaaagcttttaagaacaatcattaaaaataggttttggaaaaaattaaattacagtctactgttctagacacatgcatacagaataggagcacagattagaagcacacgtgggaaaggtaaatgtcaaatgcaggtcatggttatattttctagatttctaggaggaagcagagaaagggctccatttagatgggcctgatagaacacctcaactttatttcatattttgttttataatttatttttattttatgttcatttgtattttgcctgcatacatgtgagggtgtcaggtcccctggaactgtagctacagatggctgtgagccaccatttgggtgccgggaattgtacctggatcatctggaagagcagctagtgctcttaatctctgagctgtctctccagccccctgtatttcattttttaaaagccctgaaatacgtttataaatgttaaatttcaagaaagctgggtatttattcccttaatcataagttgaaagagaccaaaaccaagacaaagtacaaagtacatggcggggggggggggggggaggggaacgggaaataaagtgggggaatggctaaaagtctgtgttcaaaacctttagaattcttggtctccaggcagtgtgcaggctctgtcccagccatccattccacacccaccccttcctccattcccaccactggagattatattatctgcatagaccatagcccagtagaaggcagtaggaggcacaaggctgctggggctcaaaacattctctcatccttagcaagccattcagtgcttgcaatcaaatttcttttttttttttaagtgttttttctttctttctttctttctttctttctttctttctttcttttttttttttccattttttattaggtatttcgcagcaatcaaatttctaagcctcaaatagtctcctagtgactcccaatgccccatgctggctctcaacatggaggatattatcagagcactatacaatgaagcccattagtcctacacttctcaagaaaaaaaaaaaggcatgctattctaggagtcttcttgttttgttttttttgagacagttttatgtaatccagcttcatgcagctcaaacttattatggatccgaagatgacctttgactcctgattctctaacctcctcctctggaatgctggaatcacaggaatatgttgtgtcatctcccccttcccccattgacttcacaggattgttttgtcctgtttgtttgtttgtttgtttgtttgagacaaagtctcttatagaccatactggccttgaattggctatgttactgagggtgatcttgaacttctcatgccttatacctcccaagtgttgggattgccaaaacatcaggtttcaatgggatcctgggagtcaaacccagggcattgtgcatgcagggctacatacatacacaacctatcacaggacccttaatgaaagacatataactggatgtagttcaatcctttctgaactgagtgcttatcagaacactgataatgccctgtggcgtatctattaataatccaaccagaagagaaaagaaagagaaaaaagaaaaagacccaaaatccaaaaacaggaactacaatatagtacaataaatattaaaagcaaaaaattgaaaaattaaatttcatactatctggggtgtttgtttgtttgtttatttgtttattttttgagacaggtttctctgtgtagccctggctgtcctggaactcactctgtagaccaggttgaccaggtgggctttgaggtttccaaagcccaagccaaacctagcgtctctctctccctgctgcctaagaatctggatgcagagctctcagctatgctccagcaccatgtctgcctgcatgctgacatggtccctgccagatggcaatggcctaaacctctgaaactgtaagcaagccccattaaatgctttcctttatgatagcggcatggccatggtgcctcttcacagcaacagaatgattactcagacagggagtgatgcttcagtgggtagaagtgattgtcatgtaagcccctaatgagctggctttgactccaggaacagaccgtggaagaagaaaacggacttccaaaaatggtggagaccttttgacctccccatgcgcgcacacacacacacacacacacacacacacacatggattatattaaaacaaaactttaaggattttttttttagatttatgtgtatgagtgttttgccttcgtgtatgtgtactacatatgtgtggtacctgttaaggcctaggtaaaatattaaggcctatatggaatgttaaggcctaggtagctgttacctgactagcctgacattttgtgctgttactactgttataagtaaactctctcatatgctgtttctgctgttactagggaactttctcatgcccaaattgattccatattctgttatgttctgtacccttggaaaccaagcacgatagaagtcagtagaactggtttgtatagttacccacactaagcttggaccacagcctgagacagacatctgcaccaatataagaaactatttggaataagacttccattttgagtaggggtagagtaaacttgacgcttccaagacctccctgggaactgacatcctacttagctagaaaaaaacatgtaagtgggtaactgacatcctgtgaatattatacaagtcccttcctggaaacaagttagaacctgagtattagataaagcaagtcccctgccacagttgaatacctcaaccaataagagcaggagaagtttataacaaagacttgtttctaaggaaatcccttatccctaaatcctgattggtggaataacttgacaaagatgtttgtggattttaggcttaaaaatcctgtaggagggctagtgagatggctcagtggttaagtgcactgactgctcttccggaggtcatatgttcaaatcccagcaaccacatggtggctcacaaccatctgttatgggatccaatacactcttctagtgtatgtctgaagacagctgcagtgtactcatataaataaaaatcaaaatgataatgacaaatcttttcacactccaatatccagtacaaatacatactaaggatcagaatagtctaaacttgctgcatagtcaaagtgaacctaaaacttctgttgtcatccttctacctcctgagtgctgagattatagttactgctaccaggctcagtgctggggatgaatccaggatgttgtgaatgttaagaaagtatgctaccaacagagttatagcccttcctttatatacacatttaaaactgtatgcatattgttttagttaaaaaacattaatgttcaaatgtttgaatgttgtggtagaaaatgtctgtaatatcgtaaagtttatccgctgcccacaggaaatcggatttcggggctagagaaggctctgaagactgaggctcagttaagggcatgtgttgcccttgcagaagaccagagcacccatatggtggctcacagtcatctgtaacttcagttccagtgtttccaataggcgcacatgtggatgtggtgtgcatacatgcacacaggcctgtgaatcacacttattcacacaatggcacatgatcacacttttcatatccttcctgttactttgaaagacatatctgaaaacatgtcaaatacacacacacacacacacacacacacatacatatattcaaattgtataattaaaatatttgtttgtttgttgttactgatttgggggcaggtttctcacacagcagcccaagctgtcctgagcttacttcttagcccagggtagactcaaactcaccatgatcctcctggtcagcttctgaagactgaggcataggcaccatgtcctgctttaaagacttttattccttctaaacaattgtgctgtggaatgggatgtttggggtaaggtgatacaggcaatgtttgtaggtgttctgaccaaatcgggtccatatttgctcatttcgcagtatatcagtcattgaatggccttatttgctaaaatctgttccttgggcaacccagtgtggagtccagaagagggatctcagggatatttatggaataaggaaggaagtagtctaaggattgggctaaggtgactcaagcaagaaaaagcaagtaagaaccggtaggctgtgctttccaaagcaaactttacttctcttcagattgtgcatgctcagaaaagggcagcacaaataccttctaagggtggagtcttgtccctctgtaggtgacaggtcagctgtcagaaacctgcctaaacctgaggggcctatggcctcagtgtgagaaagacgatgctgttgtcaacttcttgaaaaaaaaataataactcaggcaaagattagacacgtcgtaggtgtcatctttagcaaagctagtgggactctattgcttagcatacacatttgtgctttggggtttgagagatggctcagcaggtaaagtacttgctaggcaaggctgatgacctgactttcatcccaggattccacagtggaagaagataaccaatgtccaaaagctgtcctccagcctccactcaacaaccacgatgcacatgtactctccctataataataaatcttagaattccatatttgttcatttgctttgagacaagagacaaggtctcaccatgcagttctggcttgcttggaacttgctgtgtagaacagactggcctggaacacacagaaatctgcctgtctccacctcccgagtgctaggattaaaagtatgcctcaccacaagcagcaaaaaagatttttttagagacaactgaaatgaagtaagaaaggcatattggtgtgaactgagaatcccagaacttggagacaccaatacatgttcaaggctagccagagctacagagcaagtccctctttcaaaaatctggacaaacagggccagggcgtggctcagcaagttgtgcctgttgttaagcccgatgacctgagttcaattctcaggatccatgtgttggagagagaagggaactgactaccaaaaggtgtcctctgatcaatatcaaacaaaatttttttttttattgcatggagaagaggcttaattaaaattgttcctggaagagaaaaaagtggaaacatggtacccaagctgaaaggacaggtggcggtggcggcacttaagcaaagaaataaaggtatgacaggaatccctaaggcccatctggattcctttcctttattgcccaataacaacgtggaatttattgcgtttttgttgttgttggttttttgtttttgttttttttttttttttggttttggtttttcgagacagggtttctctgtatagccctggctgtcctggaactcactttgtagaccaggcttgcctctgcctcctgagtgctgggattaaaggcgtgcgccaccacgccgggcttttattgcgtttcttttagcagaccataagctttagaaggtcaagtcctcatctattgcattaatcactgtatccctgggaaggagagatggccactaaacagtcgctggcgaagaataggcacaacggtgctgcagggtagccctaagcacggaatgagcaaaaagcacccacaagttggaagcaagggatcccccccaccccaaacaagcttcttaagggggcttctgaaataatatcggaagggtggaatcaggcttctggaatattcgcgaaaggggcaggtggattgtacggacaacggggaatgacaggtgagcgtaggactctcctggtcaggaggagcggggcggcgtgtggcgcatgcgcacgcatgccctctgcctgcctcctcaccgggacgcgcttgcgggcgagtgcacgcgcgaggtcgaagcggaaatggcgccgcggggccgcgcgtgcgggcggcgagcggaagtgggtgtgagagcggaagtggccggctggagccgggggctgggcggggaccgggatcgtcaagtaaggcggcggcggaggcggcggcggctcggcaggcgggttgaagcttcgggggccaggtcggtcgggtggtggctgcctgctacaggcagcgcgtgccgggccagcgcgtgtgtccgcctctccccaccccgctccccgtccccttctcccctcacctaccgcacccagcccccctcgtcaggggcagcggggccgctccctccgtcctaccctcgattgcccaccctcaccgcccttgtttctccttcccctgcccggggcagccgccgccatgatcctgctggaggtgaacaaccgcatcatcgaggagacgctcgcgctcaagttcgagaacgcggccgccgggtaagcgcacgccgggaggaggccgagttgaccccagctaaatcccgggtggcgtccagctccccagccctagagggggacaaatcgggaacctggcgcggcttcagggtttccctggcaggatggacgtgggaagccacggggcgcggtgagccgagggcctgagatgcgtggggagaggctgagatagggatgcggaagcagcgagaggacaggggcaaggcgtgccagagaacaggagacctgtaggacgtgagggcagccgaggccagaagtcacgcccgagagcctacggtcctcaggggggaagagaggggtgcacttccctctgtcttttccgtcattgtaccgaacccagagagacccttttggggaagctggattgaatggagttttcaggaattcccagggcgaggtgggaagaacgtgtaggcccagatcgccaccagcattctgcttccccacccccatctctcgagaccccaggaaaagcaggaggcaagactgaaagcagacccaggctgctaggggggtaaaaaaaatctctaacctactgtgaaactagccattttgttatatatcctttaggcaaagccaacggttctccatccacactctctttagctctcgagacaagcttgctctatttacttattggttgtgtgtcttaaattcttatcaaagaccccggtctttgatttcttctgtagtaatgccgactgggttaatagctgcttctgctcccagaatctataaagttcttaagataaccatttataacatcagcatcttaatatatgggacgtatttccagccctctctgtcatacacaaaaaagcaaactcctcccttaaagccgcgttgcctctctaatatatttaaaacctgagcagaggaattgggttttaggttctaatttatggtggcctgtggccattcctttgcctcatttcctcattggtaaaggtggggcttcacattttggtttcacagttaggaaataagtgcaggctgttttctgtgaactaggaactagaaataggaaagtgcttgccgatccacagagggaagaggactgggagagggggaattcattcattctccccctttaattctaagcatttgtaatgaacttgtggttcacagacatcgaaagcatgaacccactacttactcggaatacattgtctgctccgtctcttttgtaaggttacagattttacctgcaaaacaaaatgggacattccttgaattggtgcattcagtgtcatgctgtttcctgccctggactgcagttgagcatttgtgcacctcacttgtttcttgtctgcagcttctttgcattttgagttttggagttagtcaacacagggcacttactgtgggtgaggggggtgcgtgcttttttttttttttaattagtgtagcacaaaggaggaagttaaaataacttctgcattttcactgctgatcttaatacatacattctcaagtcttgactagcaaagaatgagtcctgggtggttacaagctgatctacaagataaatggctgtgtgtgttcaagtggaggcatgcctttaaatggaggaggactttcacacttacttattaataacttgattctaagatgtgacccattattcagaactttctgtagccctttttcttttagaaaactctccttaaagttctgtggttggtggtctatgcctgtagtccaagcacattcaactgtaactccagctttcaggagctcataggagacaggaggaacaaaagttctaggccctagtgagactttgtatcaaagaaaaaagaaaaaggcaggccagactgggtgtgatgtgcttgtaatcccagtgcttgggaagtggaagcaggaggaccaggagagcaaggccagcctggtctaccctgttgcaagtaaaaagcttactctttcagaaagattaaaatagggttttaaatttggagggcataagttagaatttctttggggggaggtggtaagggtgctcactgcagccaggtaaaatgtctgaggaggtaggaggttttgtcttattctagctcatccttagaatgtatgacttaacaaatgcactcaaaacattgtgttaaaaatactttgatgtctttgagaagagactatggagggcggggattttctgaaattggctgtttctgtggggtgtaatggcaccctcctataatcctagcactagggaaacaggcagaagggtcaacacaggttctagtccagccagggatatttagtgagactttatttcaaaagaaaagaaattaaaagaaaagcctacctctgaaaaaaaaaaagtgtttccaggtccgccctttaagatgaggcagcactggggtggttacagaggtcaacaaggatgtctagtgtgctcatcataaacatgggtgcgtctcaccagagcccaataccaggcagcagctgaaagcatggggcccttccgaagagagcctgttatcgaagttagggagggactgatgtatacgctatattgggagaagataacgagcttaaagagaagaagcccggagaccccagagagatgagaggctgtgcagggtggaagtggggagagctgagccccacactgctctttgcacttggcagaagagattagtcagggaagttatgatcatgtagcctttgccagagggattctttctgttctggagtgtcctgtaccatagccacttactatatgtggcccgttatttaaataaaaagatgaagtaaaactaaaatttgtttcctgagttggactagctgtgttggatctttagactccattgccacttggggcgagcgactgctgtgtttgcccactgttcgagcttgttactgcagacagttccgttggacggtgctggtcgcctactgacaatgaaggtgtgagctggtttcctctggggagggtgtttgagtcctcagggccttgcacatgctgggaagcactcgcctgcactgcttcccagctctcgggaggcgttcttcaaagatgttagagtagtgcagtgcacactccagagtgacgttgcactggctttccttttcattgtttcactttatcttttttatttttaatgatcccttgggttatcttgctgtatctttttgcctatagcatcagactgaaagcttaaacttgtatttgggtgagacttctgtaaaacaactctttaagcatacagttggccacaattatttgtaatttaaagacaattttaacaaagtttcctattctttcctgccatactcctgagaaggagtattggatctctctgtaaatgtcttcataaagggatgcaggaaagtaactcctgtcagatgacacagtctctacactatgactaattcaaaagctacacccaacactgtaaataatgtcctgcgtgagtcttatcaacagcactgccttttcacttgggaattcttgcccagaccacaattaaagcagaagtaatctggaaatttaattgacttcttttgttactacatacacaccaagaatcttttatcctcagaagcaaggcctgtcaacttcgcagttacacagtccagagctgaggaatgctgttagatttgagctgctgctggctttcagtgccttctggctctttaccacagcctgtgcatattgtgggagccgtggttctgtgagggggagagctcagtgagcaagcagcactgagtggggtgggcgagggccgtgggaggagaaatttgagaaaagaacacattaaatcttgtagctaccgtgttctcattcccaaatatgccacatatgtcctcagagagacagactgactggcttaagagattcggaattaggacattgtttaaacctatagatgtagtgggatgtactgtctgattgttaagatcaagttgatctttttataccgtcttgtgattgacactttgctacctgtcctctggcccctgcattgtctttggggaaggagtctctaaaactgaggactattgtttcagccatttctgtttcctcagaagagagagatctgctcagtaagtttatcttgaaggaataaatgcagactaagagattcttgttttctttaaaagcttatctccctccccttatttttgagagagaggaagagggaatgagagccatcatacatcagagaccagagaagaaatgtcgtaatgtgtgtcctaccgtatcgctgtctcattcctttaaaactaggtctcttgctggacttggaattagtctggcagtcagcaagccccagtcatcctcctgtctcagcctctgtagcactgaggttataggctttttccgtgggtcccggggattctagctcagaccctcaggcttgcccagtgtgcgctcttcccacttagctatcctgcttcagtggcagccttgctgttgctgtggtgctgagacggggtctctagcccaggctggcttcaaactcatggtgctccttctgcctcagtttcctgccccacttttctaagagtgtatgtcagcttttattttcttgttttttttttctttttaagatttatttattttatgtatacgagtacactgtagctgtcttcagacacaccagatcccattacagatggttgtgagccacaatgtggttgctgggaattgaacccgggacctctggaagaatagtcggttctcttaaccactaagccatctatctctccaagccctattttcttgttcttttgaagggtggtttagggaaaaaaaaaaaaaaaaggtggggtttacttggaaagaatgattggaactttgtagaggacttaaagtaatcagaaatcttcaagctgggcgtggtggtgcacacctttaatcacagcactcgggaggcagaggcaggcggatttctgagttcgaggccagcctggtctacaaagtgagttccaggacagccagagctatacagagaaaccctgtctcaaaaaacaaaaagcaaaaaaaaaaaaaaaaagaagaagaagaaatcttcagtgaacacaacagaagatttctctaattgagggtagaagggataaccagaagagggccacaggtgccccagtggaaaattatttccaggatgtatttagaagtaaaaactccacctcacccaaaaaaaaaaaaagaggtgatatagttgctaatagtactttactaactgttaacattctagaagcatcttcagaaaagtacagaactacaacacccaattttaagaaagtatttgggtgcaagagcgatggttcaacagtttagcagcattggctattcttgcagagttcagttcccaacctacttgagatagctcgcaaccacctgttaactccagatctaaaagaaatgatgccttcttctggccaccgcatgtgtacacacaagcaaatacatctgcaaaaaaatttccctaagagatttattttcattttatgtgttttatgagtgagtgtttgcctactgcatgtatacatacaagaccagtgccggtggaagtcacaaaaagatacctgatcccctggaactggagttacagacagtgtgagctaccatgtgggtgctgggtacttaagtcttctacaagagcagctaatgctagagccatctctccagcctccttttaagagattttaagaatatttcttaaaagtcagatgtggtatctcatgtctgccatcccaggttgtgattctagcacttgggagggctgggcaggaaaatcagaagcccagatcatcctcagctacgtattgagtttgaggccagtgggttgcatgggactctgtttcaaaaatgaaaataaagctgtgtgtttggggtggggagggaggaccaggggttgggggggaggaacatgccttaatcccagcacttggaaggcagaggcaggggttgaacttgagtcctcaggcttggtagcagtgcctttactcactgagtctgaagctcgagcagatggtaagcagtaaatgtttcatcttcttagtctattacatggactatcactatgattttattttaaaccataaagcagaacaagctagctgtagtgtatccctgtgacctagcatgtaggaggtggaggcagctcaaaacaagcctcagctacaaaataggtttgaggaagcctaggctacatgagattctgtctcaaaaataaaccaattaaaatacagtaataatggaggcagaggcaggcagatctcaattcaggacaagcagagaaaccttgtcttgaaaagtagaactaacggggctggcgagatggcttagtgggtaagagcactgactgctcttccgtaggtcctgagttcaaaagccagcaagcacatggtggctcacaactgtccgtaaggagatctgatgccttcttctggtgcttctgaagacagctacagtgtgtacttatatacataatgtatatgtataataaataaatctttgggccagagtgagcagggactgagtaagaggagttggccagagacagcggggctgaccagagcgagcagaagtcctaaagttcaattcccaacaaccacatgaaggctcacaaacaaccatctgtacagctacagtatgctcatctacattaaataaataaatcttttttttaaaaaagaaaagtagaattagcttgctcgagctctctcgctcctcccatctctgccccccctccacacacacacacacacacacacacacacacacacacacacacacacacacacacagaagcagaggaggtgggaagggcactcctgtgcttggggctaagcaatgattgtcacagtgttttacattcagcattttccttgttggggcacagagcttacagatctccagctccagctctcctgttctttagcccagtaccttagcagcctttctcctccaaaccttttgtgtagccatgaagagtaaactaaaatattcatggtggtggtttgatatatattcccaaatcatatagcaagccacttagactggatcttagcagtgttccccagtggagatccatgctcaggctgctttcttgctagagagactcaaaccttcagggtttatgacttagaacattaaggttcttcttaagttgatttttctcaggtctgttgatgaaatagtaaggtggggactctcctggttttgttcaagcctaagggttagagggaaaacagcactcctaatatccctccctcccacccgaggtaagtcagggagggtggtccctgactataggacggacagcctatcaggtcccaagagtgtgtttgcatgcttccttcctctaactggcatcatgttagtattttatttaaatggacttgttaaaggttatgtatactcttggtttttaaaggtgaggaaagttgtattgttcttcattgccctttgtttgttggctacatttggaagtgaaagctcaggagcagctccagctttctcctttttggaagggcattcattccttgagactggatctgcttccaactcaacattgagccaaggttgactgaattctgatcttcctctagccatctcccaagtgataaagtatctctagccacatcccttttgttgttgttgttgttttcttgagacagagtctcccccctgtgtagccccaactaccctgtaactcactatgtagaccaggttgcctctgcctcccagatgctggggatatggacatgctttgaaaagtagggtaaacttggatgtttcctctgtgtgtgtgtgtgtgtgtgtgtgtgtgtgtgtgtgtgtgtgtgtgttttctttaacataaacttaataaaagctagtttgtttaagggatatcatttagcgtcagtatcagcttttaacattcatgaaccacagtagatattccataattgtccagcagagttggaactcttgttggcttctttcatactcaagggctggagagatgagctcagcagtcaggagcacttgtcgccttacagaggaaataacttcagttcccagcacctactttgtagctcccaactgcctataactgcagttcaggagatctaatggcctcttcacatgtatggtgcacatgccttcgtgtataaataaagtatatttaaaaagaagattcctactaaacaggtcttgagcaacggaataaaatgtggaagtgtgtgtatcttgtctgctaaatgtgaaacaaactaggatctcttgaattaactgctaacaagatgctagaggcagtaaagttttctggcattggcattgaagagaagagaagtgtaacagctttcactggggtgtaatagagtaaaccatgtagtagctgttgtgtatcagaaggtcttctaggcctgtcttactgtctgtctatagtagttctgcaagattgatggtttgtattctcccattttataaatgaagagatgaggaaaggagggtaagaaatcttatttgtccagtgcataagtctggtgagaaagatgagaaaacgagtgctttgcctctgctcagtgatttttttccctcagtgttagtttgtgctgcgcttctgtgtaagtcctgagatgtaacaagaggtaggaccagagcagtcttgatggagagtggcggtgctctgatgatggaaggaaggggaggtatatgtaaaggcctaaaaaaaacgatctgtgggatggaacagaacttactgtgctgtagatagcttaaatcatccttttaccttaaacaaacagaatcattctacatgactatacttagccatttttctgtctgatgttatttcccttggcattctgctgagggtgggggaggggcagggagccattaacacaagctacaggtgttctttgtctgactttcatctttagcaagttcaggttttcttcatttgttagccatttaaataggatgctccaatttcagtaaaaatcaggaccccttcaaagtcctcctaaaagcaacccacagtataattattttcccctatttacatttgatctgtttatgtatttgtggactcggaggtcagagtacaacctgaaagagtcggctctctcctttcgccctatggaacttggggatccaactcaggtttgaggtcattatgactaaaaatgtcttactaagggcctgtttgttgttttacagaaacaaaccagaagctgtagaagtaacatttgcaggtaagtgtctttatctcatcccttataattttagtgtgttttgtctgtgttccttgtatgtgcctgatgcctgaggaggccacaagaaggcatcagacctcctggaattagagttaacaaatggctgtgagctgctatataggtgcttggaattgaacctgggttctctggaagatcagctagttctcttaaccagggagctagctctgcttccctggaaagagaagttttgcttttcaagtctttcttgaggccttcaagaattattttatgtatttgtaatgttgctaactgattttggagttcagaaaactatgtaagactaacctacatatcttagtgagtggggacatttgatatcttagaaatttggttttggtttaggttttgtacaaagaactgtctttaatccgggcatggtggcacatgcctttaatcccagcactcgggaggcagaggcaggcggatttctgagttcgaggccaacctagtctacaaagtgagttccaggacagccagggctatacagagaaactctgtctcgaaaaaccaaaacaaaacaaaacaaaacaaaaaaaaaacctgtctttctactttggaagtctacagagttataatctagtagccatcatctaagtttgcctaacatttgggggaggcaaggtcaacgatgatggagcttgtttgtcaaatcagagaaatgggttttttgtttgtttgtttgtttgtttgtttgtttttcccattctctgttggccatatatgatggtacaagtcatttgtgccaggaggcagaggcagagcaggtggatctctgaaaatctgaggtcaggttggtttacatggagagttctaggctgtctagagccatgtgttgaaagtgtgcttcatttaaaaaaaaaaaaaaagacgagtcaaatgtgagctcagagattttacagctaagtgtccagaaaggcaggtgctttgaccagaggatctgaggagatttgtagctcctcaggtgggagcatctgtgcatgctcatcgccagcagtgcccagtccgcatggttcttgtgattgccatgcaagttctctgcattctgcccctcagaacctagccacagtaatgctacagatgagctcggctcactttatagtgcaggaagaaagagcctttaagaaaggcctagacataaagggagacctaaaagataatcatctgtcttgtcttgatcttggttagatcttaattcaaatattttttataaagaattatttattttatgtatatgagtgtgctgtagctgtcttcagacacgtcagaagagggcatcagatcccattatagatggctgtgagccaccatgtcgttgctgggaattgaactcagaacctctggaagagctgtcagtgctcttccactgagccatctctagagtccccttaattcatatatttaagacaacagtgtttgtggggtggtgttgttgttttttaagacagtaggtaaaagatgaatagcttaccaggtatttagtattaaagtagaatcttttgtttgaatttgagtatgactggttgtaactatgttcatgttaaatgtctcccaaagatacatcttgatgtatatatggatcagatgtctggggtttgctttgtaatagattgaggtggggtgagtacactctgaaagaagccccacgtgcttaccagcattgatgctgcataggtggactctttaatagctttttttctgttggaaacatgttacaatgaaagggttttgttttttaacgttactttagtataaactatggttacacaaaaaaatagctttgtaattttaaaagagaccaaagagggggccatggagcaattccatagcagatttttggttggcttcccatgaactaaaaataaacattgttttacttgaatctctcttattggagctctcctcctggccagccctgtggtagatagtagattactcctgtttctagagtgagcaatcttacttgcttttttcacagattttgatggcgtcctttatcatatttcaaatcctaatggagacaaaacaaaagtgatggtcagtatttctttgaaattctacaaggaacttcaggcacatggagctgatgaggtaaggtccacattggtttccttgggactcttgtttttgctttacctttggttggccccttgcccttcagtgagggccacatcccccttacaaacagaggcttctttatacagctaacaggggcttccaactccattccccataaaaatgtttttcagagatattgcctcttggcttgcttggttttatcttggagcaataatgatatttcctaagcgaagtttagaagttttttaaaaagggtctcacatagctcaggctggatggaaagcctccaattcctgattgccttcatcttccaagtactaggattataggcatgtaccaccatacccaactcgggaatcttatcttttcaaattattcaggctagacagattgtgcaaaatagtgaaaacgaaacagtcctccagaaataacagagaatatttcttaacaaaaatagttacagtaacaataagacaggttctggtccatatttagaatcttatcaaggcagcttggaatttatgtgtattaaacgtcataatcttggtttccattccaaaagggaagcataagtaactgtcttgtaagttttttaaagttaatattctttagagctgacctttccacctgtccttccttataactaccatagggaagtgcacagggctgtccaggccttgtgccctggctttggtagctagagtagaaggcttggttcctgttgaactgcagttgctctggggcaagccatttatggaagagagaaaatgctgttacaccagtgcctgcctgcacattgtggttgggtctcaaagcaggaagtatgactcagttcctgaatccattttaacaaactagactctccttaatctgctacgtgaagatgcagccatttctcattctgaaagtggtagcttttgaacagcttcagatttctgaaaggctgtgtattgaggaatgtgatgtagaactttgtaaagtttgctctaaaatcaagagttctaagatcttcagggagctgagcccttttttgttcaggtgcttttgatttgctgaaggaaggggagtaaccagagggaatttaagggaattttttcagaagacaagaagctggtctgctgcagcttgcgacccagcatggcttggatttattaagactcattttatcctgtgtttggcctgctagtgcaactctggaacacattgctgttttcctagctcacacatagaccaaagagcccaagtgggtggaggaaataacattcccagtgtgggagtggagtaagcagtaattgactccctaggttggttaaacagtgaccagcctgtgataaccacaggaagctcgttactgtttcatagtccctttttaaaagcagaatgctctgctgctcagtaggcaggtttaaaagttataagtaggtagatcaccttcctcttctcccgactgctaaaaagaggcacagatgtaaaggtgaatcaagataggaagtgtgagtgacagtgtgctacagttgtacacagctgtgagcccagcagtgggaggcgggggcagggggatcatgagctcgaggccagtgtgggttacatagtgaggttggtcttggcaaagtagcagggaatgttcaagggatatgcaggaacagagaaggccttcagtggctcagtgggtgaaagctcttgacttgcaaacctgatgaccttagtttagtccctggaatcatggtgggaggagaaaacttgacttctagaagttgtcttctgacttctacacttggcgccagcagccacacacgtgataatagtaagtttttaaaaaatagcttttttaaagaagaaagaacaaaggaattaaaagtggtataaacgtgcctctaaatactttatagatttcagaatatcgacttggtgaacctgggggcctttggtttccccgtgtgtgatactcccttccttcaagtatcagtggtgtaggattgtagctcagagggagcttgccaatgttcctttacaccccagggttttaggagaagtggtatctgcaacacctgcaggtcagaacttgacctgccaccaacagagtctgtgaccttggtccctttgcagaagttcctcttctgtaaaagctcgctaccacttagttattacactgggcagtgcctgcttttctctgtaaacaagtgtggtcaagaattcacattttgggattcacactgttaccagattctgtaggtgaggattaagtctagaaatattaggaagttattcactgaactattttgaggcctttacttgagataattctaaagactatttaagagtggcaaaactatttaagagtggcttctctgggagggcacagctccatggggaagagtttattgagcttctgcaaggctctgggtttggcctctggcagcaccaagaaaaggaatgggttgggcgtgaagggccttattaacctgtaatggattttgagggtttttagatggaacgtaaaacacagttttgtttattttaacactgtctagagagttcattgaatatgagaacattcatacacctttagacagctgttgaatgcaatgagggttttgtgtgtgctctccttccaaaagctggaacgtagttagcagaggaaatgtttggttggggagattcaaggtaggtagagactgttgtgtagaatactggtattgctagctcgctgagattctgttgtccattgctctttgcattaaaagccagccatgagctaaattaatttatagcacacagtattaacatattgaataacagaagacagtgcctggaaattgaccccttcattcacctgagctaggcttcagcctgagtttagttgatgcattcttttgtcagacctgaattgtcttcctctactctataaagtgcagtgtagaatctgaaaggagaaaacaggtctctgagagacaaccactgaactaacctttgaattataatccagttctattaacttttcttctctctctctctctccagttgttaaagagagtgtatgggagcttcttggtaaatccagaaccaggtatgtagtgacgcagcagctctgaatgacggcacagcaccgtgtcctgtttgtctcaccttttgtagctagaggattttgctttaaattttcattctataaaatgcacctgcaggagtccagttcttgagtcagccccctctgtgtaagtagccattacaggattctacttttttcagtatgatacacaataggttaagaattggtaggtgggttattattaacacccaagaatgattctttaggtcctttacccagaggagcctccatcatcagagtgagtgttctttgagcataatcataaagtcggttatctctaaagcatgaaggcctgagcctgaacagcagcatctaattaaacagtgcacagttgtagtcccagtgctggggagatcacaagtgtggcaataaatctccaacctcagtaaggccgtgcaaaaacttacaactcagctacagtatttataagctgcactcctagattgggcaggtttaccattacactgctctgttccctggctattccttgctccttaggcttctctgggccatgttgttctgctccattgtcctttcacctctcctgtctcctttctctctccttccttctcttcctccactctctaaaatctccagccccacctttcccttctactgcccaatcacaagttaaaatggggagaatgttcacatgaagtcacctgagtatgtgatcaattcctccttggggcagcccttcttgaggaagcagaatttacattagaatacaaacagtgccagggttaccacacaggtaaccccagagcttgcttgtagccaggctagcctaattgaccacccctagttctcagtgagagacccattttcaaaataaaagataaagagatggagagatgtttcagcagttaaagaacactggttgctattccagaggacccaggttcaattcctagaacccatatggcatctcacaagcatttgtaacttcagattaaaacaaaaaccagtaattataaactggttagcttaaaattcttttaaaaaaaaaggggggggggcgggcgtggcgcacacctttaatcgcagcacttgggaggcagaggcaggctgatttctgagttcgaggccagcctggtctacaaagtgagttccaggacagccagggctatacagagaaaccatgtctcaaaaaagaaaagaagagaagaaaagagaaaagaaaaagggaatgtaagatggacagctcctaaggaatcaccacagattgattcctagtctccatctgttcacacaaatactcggacaaatgctgttcccactcgcaatcccttacacagttactgtacattagtgtaaataaccgtgtaagctaagcatttacattcactagcttctttgggaagctttggaaagcacaaccagccacgaaattgatgattgatcattttgttgagtttttgtttgtttgttttgttttaagatttttttttaaatttatttgtcatatatataatgagtacactgtagctgtcttcagacacaccagaagagggcatcagatcccattacagatggttatgagccaccatgtagttgctgggaattgaactcaagacctctggaagagcagtcagtgcttgtaactgcttagccatctctccagcccgtttgtttgtttgtttgtttgtttgtttgtttgtttgtttttaaattaaaaagtattgtagctaggtggtggtggcacagggctttatcccagcatgagggaggcagaggtaggtggagcttcttgagttccaggtcagcctggtctacagagctggttccaggatagccagagttacaatagagatcctgtttcaaaacaacaaaaaggtgtgactgtatatatgtatgtctaggggtgtggctctgaagtcaggggcagcttactgtcaattccctcctttgaccagtacatatattctgggctgagctgaggctgtccagggtttgtagcaagctctttaccctcagctgactcactgatgcttgatcaatactttgcatcctcagtgtgtgctatctgagttccctaatgaggtcagacattgcttatactttgctttttgggtggattctgagcaagctttaactcttttattgtcttgctttttaaatttcttcaaatgccccaaaattgaatagtgattgttacaggttttgatattaacataacaaaaatgggcaaagcattacttagagtgaagacttaaacagtctgtgctctcagaaaggcaggtaggagtaggaaaagtaggctcaaggaataaccttattaataataaatagtataaaagttgattatttgagaatatgagacccgtatggttccggtattctattcccatcaatttactgttttaaatgatcctcagctgtttaaagatcttcttgagaaagtatgtatagactttggtataccattattgacttcttgtaccattattgacttgattaggcttttcctgacattcatgggacagaaggagcagggtcacttaatggtcagtaaacatgattttcagtccctgttctgccccatttattggtcacctcatccataaattctatggatgttttagatacagttttgctatgtagcccaagctgtcctgaaactcaaaagatagtgacctcagtctcttgagtgctggctgacattgcaagcctgcaaccacatgcctacttaaataccgtacttgtccctagcttgatgctcaccgccatctcttcccttctaactactacattttcctctaccaccaccctaggacctcccctccctgcttttgccacagatgagggcattgcagaggttggacagttttctggacagttttccaaggtcatacagtgaggccagaatttggattcacttctgtccagttcaaaacagactagcctatgttgtgctatatttaacaagacgctgcttctctgaagaacttttctttctaaatgaagataagtttatctgtcctgacttctttgaagaaaggcatgggggtcaaatgaagtagaattctgaaaacactggaaatttacatttttagataaatgctctgggggaagtacatatgtgagaaacagattttctaccttgccccctctctcagagtgttgggggggtcgaattttattctcagaaagcttccacctgctggccatgcatattaatccattggaggaaatacagacttgtacagcttagcttcatatagtcctccttcacgactgtctctaggaccctaaagttgtaattggagttccagattgttacttcttcccattacatatttgtaattgctcatctttgatactgcttatgatttattaactagctgtaaatatttgatattgtggtataaggtaggtagagatgagcaattgcctctccactatgtttacttgggagagatgggtttgatatggtttttgttggttgggtttcatacatctgatggatggttttttccctcccacaaggatataatgtttctttgctatatgacctggaaaatctacctgcatccaaggattctattgtgcatcaggctggcatgttgaagcgaaattgttttgcctctgtgtttgagaaatacttccaattccaagaagagggcaaagaaggagagaacagagcagttatccattatagggatgatgagaccatgtaagtatgaacgtttgctcctcaagcctgggtgtggccatctcacaaggtgcttactgagagaaatagtgtgatgaaaccttaaactctggtatatggatcctgttgaaaatctttcttacagaatttcttaatctgggatataaatgataaggaagaaaatagaccacttctcagcatctaaagttgacagaagatgaaaagaaaatcctatgctttcctttaaggcactaattttatgatttttctaaatgtgtttattttttagacctccttgttattttatgtgttgtggtatttcgtggttgtcagccgccttgtagtatgagaattaaactcttgccttctggaagggcagccagtgctcttaaccactgagcagtctctatgctcagggcaccatttttctgaattcttttactgaaaagcacttcccttcgcctggggagatagatagttcagctcttcagtaagatacttactgctttctcagggaattcgagttcagttctcaactcacatgccagctcacaactgtctgtaactccacttccagggcattgggcacacatgtgcacaggtttatggacagacaaaacaccccatagatatcaaattaaataaacacataaacaaattttaaagatgtcccagataattcagacaccataggctaaacataaagagtttttttttttaaataagtgacattctaagaataacttaaaatgcctagtatatacaagataaatgaatctagctttgttaatttcttttccttgggaatacgtttattgccctgcctttcctgactccaaatactatctctggcttacctgtgttttattgattagaaactttggacttcacccttccacttgcaggtgaggttaggaacagttcttctaatgctgttcttacttcctgagttttgtgccctcaggtatgtggaatctaagaaagacagagtcacagtagtcttcagcacggtttttaaagatgacgacgatgtggtcatcggaaaggtgttcatgcaggtacggagcaaaaatctagaggggaaattgtgctgtaggaagttcaatcttcacatactatgtacacagccaccagatggtctggacttgaagctcagcggtagagcattgcattgcctgatatgcataaggtcccaggtttgcctccattgcctgggcaattggtaacagaaatagaacaacatacatgtcatatactccaaggcctagaaaagatcagttctgttagtgttgaaacttgaaaatgtaatgaacaacctgtcttcgtttgtttctttgttgctatgataaaacactggccaaaacaacttggaagaaaggggtttatttcaccttagacgtccaggtcacagtccacctctgaaggaagtcctgatagctcaaaacctagaagcaggaaccgaagcagacaccctgagaagtgttgctttctggcttcatccccatggcttgctcagcctggttctttatgtaatccagaaccagcagctcagggcgtcactctacaggaagagctgggtccctacaaatcagtcattaatcagaaacacaccccactagcatacctacagcacagtcctaacaaagacagtttctccacgaggttcccctgccctgatatgtctaggtttatgtcaagttgacaaaagccaaccagcatggccccccacccaaacccgaatgcctgtttcttgttgatggctctgacaggacaaggcaagagggtggattagttttgactgaatagtaactatccttccttccttctatgatggagtccttggtctgaagtgtggtctcatttccttatgtctgtgtttgctcagttttgtagcaaggcctactggtttaggtcccttgcctttcagagtggttagtaatgaattccagagtaggagataacaaacagtggatggagctgtagcctgattgacaggagagcggtgccaggggctaagggagtggccggagcctgcctcctgctgggaagtcttgtgatttagaagagcatcttgtccttggggttttggtgcaatgggactcggcatattctagacccttcttgagtgtcgttttgtctgctggccagtcactgtcttcaggcactgagagcttactggtcaggaggtattcaggcactgccttctgaggtaggtcaacattccaagtttaatacattggttagtttttttaaagctttaatacatttacctatccttggcagaaggtgaatgcggttttatttttttaattctgaagcagccaggctcgtggcccagcctctaatccagccacttagaggcctgaggcaggaggattactttactgcacaatggcctaggctatagatagtaaggccttacgtcaatttttttttccttaggaagaaaattctgaaacaggctctcctcccctcccccgcattgacctgaaagacagttgtgcctctcacagctgcccctacctagccagggccacgttcaaaacgctgtcctcagtaacagccttgtactgggactaactaatcagatactggtttaggagtccctgtgcagagaaacttgaaggttgacacttgggcatttgatagttctcggcttactaaagaaaacgaaaatctcaatatctgactcgtagcagcccttagatagacatttcataatattttttctgcagaattaatgggaactaaatacattagttaagaaattgggctagggctggtgagatggctcagtgggtaagagcacccgaccgctcttccgaaggtcaggagttcaaatcccagcaaccacatggtggctcacaaccatccgtaatgagatctgactccctcttctagagtgtctgaggacagctacagtgtacttacatataataaataataaataaatctaaaaaaataaataaataaaatgctaaaaaaaaaaaaagaaattgggctaaatgtagactagcaactaattttaaaaactatgaagtatgcatttagatttggctggtttggagggtatgtgtgtgtaattttttgtaagtctttttccactttgtgcctggaaaatttcaagctatttttatacctcaaacaaatgttaccccctagagtttactgcaggattttgtaaatgttctttttgtgtgtgtagaggagaatatgaatttaggctcttcaacattcatgtggcaagacagttacctaaaacggaaagcaaacctactgtagtagttttggttttgggtctttgttcgtgctgccagtatttctagccagtgatgtgcgacccatctcctctgccatcttctccataccagaggctagagtgactcgctttggtgaccacaaagaccaagttaatcaagtaggatttttcctgagtccaggaaaagttagttttgttctgcacagagacagggtttctctgtgtagccgtagctgccctggaactcactctgtagaccaggctggcctcaagctcagaaatctgcctgcctctgcctcacaagtgctaggattaaaggtgtgtgccaccactgcctggctgttttcttaaagcaggcagcctctcactgtgcagcccaggctagcctggagctcatgtgtttacctagctatcttcacatttggagcagtccattccccccaccacccatgtgctggaattagaggatctgtcaccacatctgacaattgcttgtgtcaagacacacactttgttacattgggaccagtaagaaaagcatgaaatttgcgtttcatttttacacaggggccatgttgaccttgtaatgtatgttccagttttagttcgtgtagctactcaagtgagcacttccgttttcttagactgtctcactgtggcctaggctggccagtaacttgtggtcctccctccttagtctcttgagttctaaagtgtgccactgtgtccagcttgaactacaccctgatttaagatgctcctttctcgtaaatagtttgtctccaaaataaatgatactttcttacaagagatagcaccatgggcttagcaggtgaagtcttttgctaccaaacacctgcattccaccccaaggtcccacgtggtggaatgaaagaaccaccttcctaaacagcacagatgctctcacacacagcaaatgaagtgtaagaaaaaaaaaattttttttttttttttttttttgagacaggatttctctgtgtagccctggctgtcctagaactcactctgtagaccagtctggcctggaactcagaaatccgcctgcctctacctcccaagtgctgggattaaaggcgtgcgctaccaccgctcagcttaagaaatgttttttaaaaagaaatactgtcctggtattgagcagacatctatcctgtcagaaaaaaaagaaacaatctgtgtaatagataatgaagggggtctctttggaggggctgagtgctgttgctgtttcaagacaaagcagggaagaacagaagacatcaaggtgtctaaaggctatttcctgctgcagagagtgtggagtaaatctttggcgggggtagagaaggagaagagagagactggatctcaggtagccaaggatgatcttgattcttttgtgtttgtttgctttttattgattctgttttgttctttgtggggaagatggttgagacaggatgttactgtatagtcatggctgtcctggaccttgatacatagaccaggctagcctcaaactcagagaatctgcctgctcttcctcctgagtgcggggattaaagctgtgcaccatcatgatgttgaattcttaatcctttcccaagtgttggctttacaaatgtctttcctttagggaaaaagaagggaaaagttgggaagggagctaacctaacactgtgttctttctcttctctgtaacccaacaacagtcaggcagtgctatctcagaggcagtgttttttttttttttttttttttttttaaaggcagaatagcacgtgttagggttcctgttgctgtgctgatacaccatgacaacagtaacttttataaagaaaaacattttattggggctgttcagaggtttagtttattattggcatggtaggaagcaaagtggtatgcaaacatagggaggagctaaaagttctgcatctggattgacaggcagcaggaagacagtgggccactaactaggccaggcctcaacagccacccttaatgacgcacttcttatgagtctgtggggtcattttcattcagatcaccatactgtgttcttcctacttgcagtacaagtgggagcttagtccctgccccttcctgcccattgcaatggttctgtattggaggcctgggggcactttcttttactgggcaggattgtgctagacagactctttgaaggacaggggaaaaataggaataaagcaggagcttcggcctaaggcacctagcctggcatggaagccagatgccgtaataactagtgatgtatagtgatgcttgtggagaagagaataggagctctcagagtatccaggtgtgtctggctgttggaggctgactatagaagaaatggtatgtaagcagcagcagccacacttcctgtcatatggttgtgtgaccaggttttcagtgtcctaaccctgagactgtccttagcttcatgcagctgccctgtttcaggaccaactcagtctacatgttgggtttgtctcttctttaaagggcaggctagtgaatccaaagctttgcatgtgctgctgggaactctgggagagaatgttatagccacacgcctttttgtatagggatgcagagggtctggggattaaaggatcaaagaggtggcctggggtttttgttgttgttgttgttttgttttgttttgttttttttaaagatttatttatttatttattctatgtaagtacactgtagacacaccagaagagggagtcagatctccttacggatggttgtgagccaccatgtggttgctgggatttgaactatggaccttcagaagagcaatcgggtgctcttacccactgagccatctcaccagcccttgtttttttttttttctttaataccctagtcctttttcttacagtttgataagcactgtacttttgttaaggacatggctcttggttttttgagacatctgtaggctggggccaatcttgaactgtcaggtatgtcccctcccaggttctgaatgatgcatctgtgcactcctggctgactagaattttcttactgtatgtttgtgtgtttaattgggggagaggtatctttctatgtaatccatgctagcctgacttgattcccctgccctaccctttaagacaactgagttcttacattctgtcatggttggcccctaaagggagagattaaatttgctttagagttttaattgttaaattttaaataataccagataaagatcttgtagttaaacagtacttgatcaaaggcccagcacccaataaaagcacgatattcatgaaactgaagtaaaagatcaggtgtgggtatattgaggatgcagacaccagatagtcaggaattcaaagttttcatcatatacattcagagtacccacagacagaaaacacatattttttttaaaagtcctgattgaagagttggctcagcagtttagagcattgactgctcttgcagaggtcctgagttcaattcccaacaaccacatggtggctcacaaccatctgtaattctgtaatgagatctgatgccctcttctgttgtgtctgaagacagctacagtgtactcataaataaagaaattcttttaaaaaaaaaataaaagtactcatcaggcagaagaggtggtttggctctcttagtgagttttaaaatcagccctgccacatgaagccccgcccgggggtgaagggataaaacacattagggaaagcctgggtcctagataccatgaagttttaaagatttcctattttaaaaaaactaagaacaacccttttcacactgcacgagagagcagtgagttgcagtactcatctgcactggaaccaaacctgcgcttcagctgtttcttttctggtccactctgcactggtgggcatgttcttgctgtgtagcccaacctggccttgaaatcatgatcctcttgtcgtgttagtccaagctaagaaaggagaaagggcagcattgctgtgctttgtaccacagtctgacggtcctgcttgtcggtgctctcgtcttccttttgaatctggtgtgcactgaaagcggctagcactccttgtacctgaggtctgacggttcatttttagttatctgctggtgaggaggactatgaaggtctgagcacatagtgtgaataaatgctacacatctcatacaaatttcctttcctctccacaggagttcaaagaaggacgaagagccagccacacagccccccaggtccttttcagccacagggaacctcctctagagctgaaagacacagatgctgctgtgggtgacaacattggctacatcacctttggtgaggctggagaggtagttgagtggtagggtgcttgcctacgctcctggccctgggttcattctcggcactgcagagaacaaccccaaaaccttcatggcagggtgcccacatctaggcgaacttaaggaacatttttagtgggcagaagcaggcacggcatgtttgtgtttcctcttgtgggctgtgacgctgtcacaggggactgattacagagataggcactgttttgctgctgacatcatttcctgtttgtttttcttaaatggtaaaggaaaaaggtaacctgggattgtcaggagttaggggcggccatgtcagcatcgctcagcagctcaggagacttctctgtcggttagcagtgcttgaatttttgcttctaatgcccaagctcagctgcaatttgctgaggcttcttttccactgaagataccaaacttcacgtgtgtcggcttagtgagctggctgactcctcatttcaacactgcaggattgtctcctttagttcacctttagctaaggatggagctgtttgttgctggtgactacagttttgttttgttttgttttgttttgttttgttttgttttgttgagacaaggattctccctcttgctctggctatcctagaatttgttatgtagaccaggctgggctcaaactctgagatccacttttttctttattttcttcaaaccaaggtaaactaagaaccagagttctacctttcttctcagccattcatttcagctcagttgatagaactcagggctcttggtgttagtggcaagtacaatacaaacaggagcccagaggcaggtctgcccagagtaaaagtcagaacaggcctttgggtgaagagcagcttatcctgccaggcctgccttagagtttggtagtcatggtcaggagatgagttctcttcagaacctagtttttctgacagtagcagtctgtgctttagcacctagaacccaggacaagctagagttcagaatggtgtccagatttgaaatgagtgcccatagtcatcctggctttctgtgtcgtgagcctcacctcttgcactcataggcactctgcgattgtgttgtctgatggtagcgcacacaccactacaatgccttgttttctgtccctgccttagtgctgttccctcgccacaccaatgccactgctcgagacaacaccatcaacctgatccacacgttccgggactatctgcactaccacattaagtgctctaaggtgagagagaggcaccagcgtccctacggagccattgatttaactcccagtagacactgccccatggcgctgcagagatagctcaacaggaagagttcttagttctttcagaggacctgggttcattttccagtaacctgatgctgtcttctaacctttagtatacataaattcatgtaggcacacaaatacagtaaaaaaaaaaaaactttaaaaagttacagaaaccatctcttggaccaaaagtgcagctcagtggtagaacacttggctagcatgctcaaaagcaccagtttggcccccactaccccagtaagaaaaatgtctctccccttcgccttatccttcctatagcagaggaatgagtctgcatctctggtattgctgcttaaccatcccgttccccttacgtgctgctccccaacatcccccatgacttactccagtgaaaggaactctatctttctagaatgtgagccgccttcagttcttcctgtgtttgctcttaggcctatattcatacacgaatgcgagcaaaaacatccgacttccttaaggtgctcaaccgtgcacgcccagatgccgagaaaaaagaaatgaaaacaatcacgtaagtaggagcagccaccttcccttccctgatgcctgcctgcagcccagggcactgaagagtaccatgtgcgaggccagcaggccacgcgtagagctgcccaagtgcaagtgaaattgaaagggctgcacctggacgcagccggaacatctgaagaagcctgggccagtgcctacttacttctggtctgctcagcaggaaaggtatacagggcaaaggctgccttggtcagggaggaagacgacaagcagagtagtaagcagtgtggctctgtatactcaaggccaacatggcgtgggacctagagttgactctagtgtaagtagcattcagaacacctttagcttcctccacccccaccaccgtgtgtgagaccactgtgcctaattagactctattgccatttgagagctcaactgagtactgtgtagtacgtgagggtttccggtcccaggagcatcaggcatctgtgcttggtgagaagtctgcctttctgtgctgcctcctacagcctgaaggttgctgttctatctgatctctgttcagagactgcatcaatgccatgtcagggtgtaacacctgcatagcatatctaagggtgaacaaggtggatgagaaaggacatgcatgcccaaggaggcacttgttccttctgccctttcaagactttgtctgctggtgcctgcaggttctcctttttctccctgtcttacaaaagtactttccaccagccatcactgtgtgacctgagagagaaagaaaacttgtctgggtgatgtgtcagaactacacagaaccagctactgtgggctaaggcaggaagataagttgagtttgaggttggcctgagtaacattagcaagatcttatatgaaaaccaaacagagaagtgggctgagagaaggcctacctgctacagggctgctgtgtgagcctgagggcttgggtttatactgttacccatgtacacacacactaggcatgggggcacttgcctggaaccctgggacagaggggacagaggggacagacggatgggttgtaggagctctctagccagtcagtttaagtccgtgaattccaaggtcagtgagaaaccctgtttcaaaaaataagacgaagagccaagcatggcagcacacgaatttaaccccaggactcacttggaaggcagaggcatggcttcagtgatttcttggttgttttggttttgtttggggtatgtggttggttggttgggttggggtttttgggtttttgttttttgtttattggtttggggtttttttggttggttgtttggttggttggttttggtttttcgagacagggtttctctgtgtattcctgactgtcctggaactcactttgtagaccaggctgacctcgaactcagaaatcagcctgcctctgcctcccaagtgctgggattaaaggcatgtgccaccatgcccgccaccccaagcaactcttataaaggcagatatttaattggggccagcttacagtttcagaggtttagtccattatcatcatggcaggaagcatggcagcatccaagcagacatggtgctggagaaggagagttctgcaccttgacctgactgtacccaggagaaagaaacttgaatcttgtgtactgggaggaccttcaacacctacccccacagagatttgcttcctctgacaaggccacacctcctaatagtcccacttctcataggccaagcatagtcaagccattgtgtagctcggctgttctggaactctttgtagatctgcctgacctggacctcagagatcctcctgcctctgcctcccaagcactgggcttaaaggtgtgcatcaccaccacccagcaagtctcagtggtttcaagactaccaagttccaagccatccaggccatccagagctgtcaaataggaccccgactcagtggggggccgcagttgactacttaaggaaagtacccattgctgacttctggcctttacacacacacatacacagagagagagagagagagagagagggagcgagcgagcaagcaagcaaagaaaaacaaaatcagacagaaaggtcaaaaggtggggatgttaagatagccctgggactgcttgcatcacctaccttcaccctgataactgccctcatctctctgtcttgtggccagccaggtgttcctggtagttgctgcctaatgggacagaaagaggcaggaattgattcctttcctggtggaggagcctgaggaaggatgaaccctttacaggaataaatttagttgttcgaaaacctctattatgctacgtatagacattgaaaattaaagtgggcctgttaggagtgtggccccaagctagaagttgcctgtggagtcagcacaacacagtgctcagcttttcttgtgtggaaggccatcaagcagtttcatttggggtgagcacaaaacatggagagctctgtttcttctgctctccttttctgtagttctcaattccaggctactttaccaaatacccttggagtaagtaccatttgcaggctctttatgggtctagtaaccctctggggactcactgggtagaaaaggataccacagctcaggaagccagaaccaggccagggttctgtgagccagagtacatgccaactgacaaccaggatgtctctaacctctgaagttggatttttggggggttaattggttggttgttttagccagagtctaattatatatatccctggctaacctagaacttacagagatccacatgccttcacctcccgagtgctgggattaaaagcatataccaccatgcctagctaatgtttgaaaattttaaggtggctttgaactttctttctcctgttgaaaggttaagaaattgttacctaaatgggatcaactgggtagaaggagcctcagctgaaattcatgtctagccatctgaaagctagaggaaagtgggtgtggtagcacatgcctttatcccagcactgtcaggaggtagaggcaagcctagcgtacacacagttccaggccatctagggccacagcgtgagacactgcctttaaaaaaaaattgcagatcattttctcatctgctgggaacatccagtgtgcttatgggcttgccatggtgttacttagtgctggggcttgactgagccctgtggctctagcacctttgctggaagactttcccttcctctttgtttggtctcctttgggcaatccaccccaggcctagagtataggctgggaggaaaggacatctggagtaagccttcactctgtctctgcttttgaagggggaagactttttcatcccgctaactcttgggaactgaggaggaagcgctgtcgaccgaaggctggactgcttgctactggataatcgtagcccttcatgttgcaccttctccaggttcttgagggattctccatttgggttccattttgtacgagtttggcaaataacctgcagaaacgagctgtgcttgcaaggacttgatagttcctaagaattaaaaaaaaaaaaaaaattccacttgatcaacttaattcccttttatttttcctccctcactccccttccttttccaagctgtttgctttgcaatatgttactggtaatgagttgcaggtaatgcaatcttaacttgttttcttctaagtatttgagttcaaaactcctgtatctaaagaaatacggttggggtcattaataaagaaaatctttctatcttacttgagaatttgttgatttttctcgactgtgagtccaaaggagaagaggaaagggtggctctacactgcccttgtaccagcaagcctcccttctcttgtggaaggaggggctggtatgtaaactgtgaggttgggtggggtggggagaagtggggggcttatctgtttgggttcattttattggtcctgctttgtagcccatgttggcctcacactccagcagtcttcatgcctcagctttttgagttctgggattataggaatgagccacctttggtttttgtttctttaaacatgctttttccgttgtaaagcttggttgctaacactacccagctgagtagccaggaaactcccttagtgcaacagacaaactattctgggaatgtacttcagtggatataacatgcaggcttaactttttcaaaatctactttaataagggttcttaaagattggggagaatgatggacaagggggatggggaccttttaaaagttctttggggcaactccagtcttcactgtcaggatatatgtagtccagtctaaaacatcaaaagtcaatagtgacagtccagtccagccaaacaggaatcagtagcaatggaacaatccagaagaaacctcgaagctctgctgtattggcgcaagtcccgaagcagtcagaataccacaagaagttttttggggagtttttctcttatgaactcacacaagcgaagatcagtgaagaccagcaaaatgttgcaagagcgacctctatggggttgtatttatattctttccaagagcgacctctatggggttgtatttattatattctttccaagagtgacctctatggggttgtatttatattctttccaaataccacgccttctcaagcattggcttcatcaagacatcacatgcccctaacccgactgcctgagcaaaatatcctctgacaagacagctttcaggggctggccagatggctcagcaggtaagagcactgactgctcttccaaaggtcctgagttcaaattccagcaaccacatggtggctcacagtcattcgtaatgagatctgatgccctcttctgaggtgtcagaagacagctacagtgtagtcacatataataaataagtctttaggccagagcaaacagagctggagagagaagaaaaagtgtctgaagacaattacagtgtacttataattaataaatctttaaaaaaaagagacagctttcagaaaaacacatgacacaactaagtctccaaatacattttccactttaatgtttacctaaacttttatcaatcccaaatttcaatcaccagtatcctataatctgggtttggtggcacacacttttaatatttcttatgtatgaaagttttgcgtgtgtgtgtgtgtgtgtgtgtgtgtgcgcgcacgcgcacatgaactagaaaaggaaataatattctttggagtggagttacaggtgttcttgagctgctctgtggatctaaagccaacccaggccttggcagaagcagcagattctaaccacttactcctccatctgctatggcatatacctttattcttagcacttcagaggtagaggcaggaggctcagaagttcaaagttgtcctcagctatacagttgagtttggggccaatctgggctatctcaaaaaaaaaaaaaaaatgcttccgcctactctgcatgtgtgtgtgtgagaggtggggacttggagtgggcagttttgaaacagggttttgctgtatagtctagctgccctcaaactcagagatgcacccgtctgtgcttctgaggaacaattgtattaaaactgcatgttgttctatcataaataataaaacgtggtactgcaggacttcactatggtgctaatgcagactgggtgggcaccattactcattacacattccaacagatctgtgtactccctaaagctcactcactgtaggaaatgcctgctgaatacctagcaaatacctggatacctagcaaagtgtgctgtctcctagcaagatatggtgccaaatccaggatgatttggaggctatttttctgtctccatttcaggcagtgtgttgcagactagtttaactatcagtaaattgtgcagtcacctgactttatacaggcggcacttttattttctacaattttaattttgagataacatgtacatgcatgttagagatgataacgtgaggtcctgtcaccttcccagtgctgacaccttgagtgattgtggtgcagtgtctgtcacaccagtagaatgacaaggctatatgctttctacacatttaacccattttatttaacacttctgctgttgtatgtttctgatgttctctgcatttttctcacttggatggttttctgaaactagcatttgtaggatggagtagtacggtcactacatcgcatgtagcattgattggaaatgtgattttgtacatgtgtgtcaggacagcgttagagtaccattttaccccatccgttgtcaaatttaaaacaggtcattatttttaaatatgtcctcatgtcattaggcataattcattagaatggggtcctagggacctgcaaggtctcctgtttctgggaggtagtaaagtatcttgagagggatagacttaatagagtttcactgatagttttgatagaggagttgttcttgttggggtgttgcttttggagacaggatcctgctgtctgatccagtctggcttttgcctctcaagtgctgggactacaagcatacaccaccatgagcaactacttttttgttccatctttttgttttgtcttgtttttgacaaagcatcacttggcccaggctggtctccagctcagcagtcatcttgccttggtcttcaagggcttggatggcatgtttgctccactcagccctgcctcgcctttccctctgtgccgacttaagaaagagaactctggattgccctgtgcgttcttggcagtggtgacaagttgcttgctttgtttgtttggagatcacccgtcaccctttggtatattcttcttttcccttctgaaccctgtttctgcctacttaatctcctagtcttagactaggaaaaagatactatgtcctccagcaaccattagcaatccttagggaagggtgggattttatgggcacctcctccctctaacataaatgttggaattaatgcaggtaccctgagctgctgtgtggttgtggttccaacagcaacatcatgccttgatggcagtgtttcgtgatgctcttcccattttccaggtcttgaattctcttttacttcacttctgtcttaggattttacttctaatgaagagagagaggctttaaccaggacaactcttttttttttttttaaatatttttatttgtttcacactatacacaccaatcccactcatctccccactccataactggcttgcaacctgtcccccaaaagaagaaaaagcataaaaaacatctcatcgtggaaactgtagtatgcctcagattgctacagttagtataccatcctgtctacacatctttacttgcaaatgttcactgcagtgagtcattggtctggttctgggcctctggcttctgtcacaccatcaatactggaccctcgccaggattcctccccgttatcctgttgctgccttgtgtcctggtggatggatctcatgcagctttggatctgcatgcccacccctttctcaggctcagcaattcctacatgagataaatattggggtggtcgattgagcacacacagtttttaaaaactataaactccagtcctccttgggaggtaaaagcaggtgggtttctgtgacttcaaaacaagcctatttgatacaatgaattccaggcaagccaaggctgcataatgtaaccatatctcaaaacaaaacaaaaacaaaaaaacagctaggtgatgggggtgaattccagcacttgggggtgaattccagcacttgggggtgggggtagggataaacaggcagctctcttgaattcaaggctagtctggtctacagagttctaggacagccagttatagacaaatactgactcaaaaaaaaagccgggcgcccagcacttgggaggcagaggtagtcggatttctgagttcgaggcctgcctggtctacaaagtgagttccagggcagccagggctatacagagaaaccctgcctcaaacaaaacaaaacaaaacaaaacaaagaaacaaaaacctccaatggggtcttaccatctagttcaggcaggcaagcaacagcaataatctgactttttttggggggtggggggggagatagggagcagggcagagtacctctgagacaattaggtttctaaagaagtactacagggcctggcatcagtggcgcatgcctttaattccagcagaggcaggtggatttctgagtttgaggctagcctggtctacagagtgagttccaggacagccagggctatacagagaaaccctgtcttgagaaaaaaaaaatcatagaacatatggcattaaatattcttttttaaaaaatatttattttatggggctggagagatggcttagcagtaaagagcattgactgcttttccagaggtcctaagttcaattctcagcaacaggggattcacatatattcacatacataaattaataaattaaaaaaaatatttctcttttttttatatatatgagtacaccaccattgttctctttggacacaccagaagagagcatcagatctcattacagatggttgtgagccaccatgtggttgctgggatttgaactcaggacctctggaagggcagtcagtgctcttcactgctgagccatctctccagccctaaaatattcttctaataataaacaaaccctgtttcaattccacaatgtgttgtcaacaaccaaaacccatgctgatgggagaaataaaagacattttcttcagtgacttagccactggtaaggtgtccatgctcctgtaaacacctctaatgaaactcactgaatccttaaaaaaaaaaaaaaaaagacagcaggggacaagagggtaccaaatgtgcatgcttgtagggtgatgtgacaggacatagtgataattgatacatgctaaatgggggctaagcatggtgcgttgggcatagtggctcacacttgtatcccagcacttccaaggacaaggcagagaagccctttgcgttcctggcccacagagtgagaccttgcttcagcacaatgggaaaagaacagataaatgcatgttatgcattgtagacatctctagtacatacagacagaaagacatgcatagattatatttacttgggtggggtaccccccacaccctgcgctagggatggatcccagagcctcatgtatgctacactgtcaccaactaccactgagctacactctggttctagaatttagctgggtaagttcagttctcctttttacaatgtttttaaaattgtgtgtgtgtgtgtgtgtgtgtgtgtgtgtgtgtgtgtgtgtgtgtgtgtgtgtgtgtgtgttcgtgagtgcaggtgcccttgaaggttggctctcttccctaagatggttaggttgcctctgttggagagaggagacgaggaacctctaaatctgaatggaacatgtttagcaggaaaagggatatgagattgcagtaagatgtgggggaggggtatgttggataaggaaggaaaaagccctaacctaatccatcatatgtggcagctggcattcggttgcctttatatagggtctgcctgatgcccccttactcaatcttccctgaaacctaaacagagaatatttgttaagattgctgggattcaagggtctcacacaggataggacagggtttcttctgcctcagcgactgaatacagatttctcaaagtcagaatcctggccagtctgttacagtgtctagaagggacatccgcatcagcttttaagtgcaggccaactgggtataaaccagtgatcctagcacttgggaagctgagacaggaggctcaagagtttaaggttagccagcatgctggccaatctgttacagtatcgagaccaggggtgctcaacctgtaggtctcaagcccattgggggttcaaagtaccctttcacaggggtcacctaagaccattaaaagacatagatgtttacacaacaattcaccaacagtttgcttcataatttacagttatgaagtagcaacgaaatattgggggtgggggtgccgttcaccacaacatgagaaactgtattaaagggtcgaagcatctgaatggttgagaaccactgacctagaaggcatgttgtccaaatcagcttcaagtgcatgccaactgggtgtggtagatgcaaaccaaggaccccagcacttgggaggctgaggcaggaaggtcaggcgtacaaggttagccgtctcattggtgtggggcgtattaaacagtagctgggaaaacagttcagagtacaggaaatttcatctgcttccctggtccagagtaactgctttcagacttcataaagcacacacccacccagtccctgatgcatcaggaaaatcaaacatgaaagtgtaccagggagatgtgggaggcttctgggacagtctggattgtccagcccagcacatgctctccaccaggaaaacatcaggtcagggccacaggcagcagatggagtgtctgaaaacttgcaccagagggcaaaagaaactgtcatggccgagggcttgacagttacagagaggaagcagatgagctggtgatggagacgttgaactgaacacaggagagaacccagactcttcagctcccgctgcccgagctgtcccccctcacacgccataccacacacagtgtttagacagacagagaagaaacagacatcctgaatctctggggaaggaagctgggaacagaagacaagcttgtttattcctggcagcccctatatccaaggggtctagtaccattttagactagccccaggctgaactctcccagagcctgactcatgccccactgccactgcgtgggactgagactgtgccggccggccagccgtcatcctggaggatggatttaagaccggcctgcttagtctcccagcagaagccccacctctccaggaccctggaatgtgcgatgtagggcaaaaggtaccagagtcctcagacctccagccgttcaggctgcatctctccaaggatggtgaagtcttgctctgtgaggaggttggtctcatctccattccagcttactcactgcagccccagcctggttcagttcttaggaagtttgactgggctcccctcccttctccctaaagctgcatttgataaagagtagaaattggacacagaactctcggcttccgcactgtgaacgtgtccttctctctgcaccttgtttcctcagttcttctataaagcaaaaatgccaccccttggatgtcctaggctcccgatctgccttgcaaggcagagcacttgtttgaagggaacaggtgcagagaccagaaatcctaacaatgttctcattaaccttaatcaagtactcaagagtatgggctcatctggttcatgttacctgctttgctggagggggactcttctttggttgctttgaaacaaggtctgactatgtttctgaagctggctgcaacttgctgccacctacacgtctgtctcaacacgcaagtgctaggaccacaaacccaggttaggtaagtacaattttgagctccactctgcagataaagaaagggagttgagagaacttaaacagttttcccaaattcacacagttaaagcagtgggaccagcagccctgttacgctcactgtggggtacacctctgaaccccatggaggtggaagagccagccatttgttgacttgacctccccttggtactgtcaagcattgtggtatccacaggtccctatgcggacatcccccaccacaactgcaacaggtgacttttccttctgggaaggtttggcagtattgaagcagtctcccccgtaacccaggccagcctccgatttacactgatcccactgcctcagctccgaaatgttagaaatcacagatttgaacctctctatcagatccttttatgccttatgcatctccccgaaacttgactcagaaaccattcaggactggggggtgtagttccattgataagagtgctaacctaacatccatgaactcatgagttctgtaacctgcctgtcatgtggtggagtgtaggagaaccatcagactctgtgacatataacttgggaggtggagggaaaaggatcaagttcaaggtgacactccactccacaggagtttgaggccagcctaggcaatatgagagagaccctgtctcacaagaaaagttgagagatatgaggatgactgcagacccgggaagacaaggctggatcaggcgcccagccccacctccatcttacatcgtgcatgatcctttggtgtgtcagcagaagtatctggctggttacgggctgctgcctggcacattcagagattaagatacctaaaaatggctctgttagtgtgtgtgtgtgtggggggggagtgttgtgtaccaaacattattcattagctggaatgtgtttcccaggtaatgttcagcaatgacagcaagagggttctcagaggtaaggaaacaccacccaggtttcatgatgtagccgactgctagggaagggttcacttacacaggagggggagccctcccagtaaaagcagtcaggatgtgccacgtcccaccccagaggcggagccaagactgaggtccttcagcttggactcctccatcccttcaggagtccaggccaggccagagtctgagcaggcaagcctggttcctgctgtctccaccatagaaggcagcaccatgcgctcactgaccaggacaccaggcatggcccgaagacctgcaagagtggctgatgtgactctttgatccgcagaggaagagctagcaagcaccacctgctcctaacagccatgtgagtagctacacatcacccctccaggtctgaccctgaggtcgacactgcactggctcaagccattcaggagacatggtccacaccccaccaggacattacccctggataatctctacctttcttgctattctgagggaggctggtgcgggtccgaagggtgggtctctagctcaagccagctctcagtagtttaataaaagtgggtggcgaagggagaaaggggaacaaactagggtgctaccggagacagaaagctaggtctgagtggcaggctgtgggggagcctgaaggaggcggccagtggaggggaaagcatcaggagtgcgggttgggagcactgggagggaagaagagcatcttgcagcctaaggtaaccgtacagctgatgctggtcctaggacagaggccagaggagcagagggcagaatccttctgtattgactttgatcctagcaacagcagatgctcctgttgacaggatccaggacccctcccactggccctgcaatgtggcctggggctgagaccaggcagtcaaggaaaagtaagctcagtttggaggcttttccttgtcacctggtttcagcttgtatttaggggggtctttgtttagtacccccaattccttaccaagcatctccccacccttccctccggttcccaggaagggccctgttgctagtgtggagcggatgagtcaagtttatgggctggaagtcctacccggaggctgttcactgaagtgtaacaggctccacgtggagacagggtgggggtgcgggaacagagcactctgtgacttcccagacctggccttcgggagcctctcacccagtggctggccagttactgtcctctcttggcaccctgatgtgggtaggcaaagattgacagatgctttgggtaggttgc

SEQ ID NO: 592 - DNA, 1436 bp, Mus musculus
agcggaagtggccggctggagccgggggctgggcggggaccgggatcgtcaagtaaggcggcggcggaggcggcggcggctcggcaggcgggttgaagcttcgggggccagccgccgccatgatcctgctggaggtgaacaaccgcatcatcgaggagacgctcgcgctcaagttcgagaacgcggccgccggaaacaaaccagaagctgtagaagtaacatttgcagattttgatggcgtcctttatcatatttcaaatcctaatggagacaaaacaaaagtgatggtcagtatttctttgaaattctacaaggaacttcaggcacatggagctgatgagttgttaaagagagtgtatgggagcttcttggtaaatccagaaccaggatataatgtttctttgctatatgacctggaaaatctacctgcatccaaggattctattgtgcatcaggctggcatgttgaagcgaaattgttttgcctctgtgtttgagaaatacttccaattccaagaagagggcaaagaaggagagaacagagcagttatccattatagggatgatgagaccatgtatgtggaatctaagaaagacagagtcacagtagtcttcagcacggtttttaaagatgacgacgatgtggtcatcggaaaggtgttcatgcaggagttcaaagaaggacgaagagccagccacacagccccccaggtccttttcagccacagggaacctcctctagagctgaaagacacagatgctgctgtgggtgacaacattggctacatcacctttgtgctgttccctcgccacaccaatgccactgctcgagacaacaccatcaacctgatccacacgttccgggactatctgcactaccacattaagtgctctaaggcctatattcatacacgaatgcgagcaaaaacatccgacttccttaaggtgctcaaccgtgcacgcccagatgccgagaaaaaagaaatgaaaacaatcacggggaagactttttcatcccgctaactcttgggaactgaggaggaagcgctgtcgaccgaaggctggactgcttgctactggataatcgtagcccttcatgttgcaccttctccaggttcttgagggattctccatttgggttccattttgtacgagtttggcaaataacctgcagaaacgagctgtgcttgcaaggacttgatagttcctaagaattaaaaaaaaaaaaaaaattccacttgatcaacttaattcccttttatttttcctccctcactccccttccttttccaagctgtttgctttgcaatatgttactggtaatgagttgcaggtaatgcaatcttaacttgttttcttctaagtatttgagttcaaaactcctgtatctaaagaaatacggttggggtcattaataaagaaaatctttctatctta

SEQ ID NO: 593 - protein, 319 aa, Mus musculus
GGGGGGGGSAGGLKLRGPAAAMILLEVNNRIIEETLALKFENAAAGNKPEAVEVTFADFDGVLYHNPNGDKTKVMVSISLKFYKELQAHGADELLKRVYGSFLVNPEPGYNVSLLYDLENLPASKDSIVHQAGMLKRNCFASVFEKYFQFQEEGKEGENRAVIHYRDDETMYVESKKDRVTVVFSTVFKDDDDVVIGKVFMQEFKEGRRASHTAPQVLFSHREPPLELKDTDAAVGDNIGYITFVLFPRHTNATARDNTINLIHTFRDYLHYHIKCSKAYIHTRMRAKTSDFLKVLNRARPDAEKKEMKTITGKTFSSR

SEQ ID NO: 594 - DNA, 57008 bp, Homo sapiens
  misc_feature (1)...(57008): n = A,T,C or G
tgttcactctattattgaaagtaggacattgaagtctccaactattatcgtagaactatttttccctttaattctgtccatatttgctttatatattttggactctgttgtttgatgtgtatatgtttataattattatattttcctgatgaattgatcctattatcaatataaacactttttgtctcttataacaattcttgacttaaaatatattctttctgatactagcatagccattccagctctattttggttacagtttgcctagaatatcttttttttttttttcagagacacagtctcaccctgccacccagactggaatgtagtggcacaaacatagctcactgcagccatggctgcatagtattcccggactaaagcaatccttccacctcaacctctccagtagctggaaccaggtgtgcaccaccattcttggctaattttttttatttttagtagagacagggtcttgccatgttacctaggctgatctcaaactcctggctcaggtgatcttcctgccttggtcttccaaagtgctgggactggccaggcatggtggctcatgcctgtaataccagcactttgggaggctgaggtgggtggatcacttgaggttaggagctcgagactagcctggccaacatggtgaaaccccatctctacttaaaatacaaaaaaattagctggggtgtggtggtacccacctgcagtcccagctactcaggaggctggggcaggagaatgactcgaaccccagagacagaggttgcagtgagccacttcactccagcctgggcaacagagcgagactctgtctcaaaaaaaacaaaagacaaagtgctgagattacaggtatgagccactgtgcccagtcccagaatatatttttctattctttgattttcaacctatttgcatctttggatcttaagttagtctctagtaaaagcatatagttggatcattttttaaaacttcattttgctggccaggtgcagtggctcacgcctgtaatcccagcactttaggaggccgaggcgggcagatcacttgaggttgtggtgactcacgcctataatcccagcactttaggaggccaagacgggcagatcacttgaggtcaggagtttgagaccagcctggccaacatggtgaaaccccatttttactaaaaaaaaaaaaaaaaaaatagctggacatggtagcatgtgcctgtagtccgagctacacatgaggctgagacaggagactcgcttgaacccgggaggcggaggttgcagtgagccaagatcgtaccactgcacttcagcctgggcgacagagcaagattctgtctcaaaaaaaaaaaaaaatttattttgccaatctctgtcttttaattgtttaatccatttacattttaaatgattatcgataataaagaacttacctctactatcatgctatttattttctttttcttttttttttttttacttttaatttaggttcagggtacatgtgcgggtaataagcataatactcaataggtagtttttttgatcctcaccctcctcccacccttcaccctcaagtaggccccggtgtctcttgttcccttctttgtgtccatatatactcaatgtttacctcccacttacaagtaagaatatgtggtatttggctgtctttttttttttttttttgaaatggattttccctctctcacccaggctggagttcagtgtcccaatcttggcccactgcaacctccacctctcaggttcaagtaattctcctgtctcagcctcaagagtagctgcgattacaggcacaagacaccagagctggctaatttttgtatttttcgtagagacggggtttcatcatgttgaacaggctagtctcgaactcctgacctcaggtgatccacccgcctcagcctcccaaagtgctggaattagaggtgtgagccactatgcctggctccttcaagttttgaaagaacattttacaggctataatattcctggttgacaggtttttttatttcaccactttaaagatatcatcattccactgccttcatggtttctgatgaaaaattagctgttgttcttatgcaggagacttgtaaatgagtcacttctctctttcactttaaagattttctctttatttctggctttcaacagttttgactataatatgtctcagtgtgaatctctgagtttatcctgctttaagtttatcaagcttattagatgtattgattcacatctttcaccacatctgggaactttatggccattacttgtttaaatatttttccttcccctttctctctctctcctctttctgtaactcccataacgtgtgttttgatatgcttaatttgtgtcccacatgtccaataagctctgttcaattgttttatttttgttcctcaaactgggtaattttaactgccctatcttcaagttcactgattctttcttctgcctgctcaaatgtgctgttgaccccctctagtaatttctgcacttcagctattgtacttctcagctccaaaatttttatttggttcctttttattatttctatctctttatgatattctatgcttgtatatacaccatgctcccgattttccttagctattcttcatggtttccatgagctcttttcttttttccttcagcatatttaagacagttaagtctttttatataaatccaacatctgggctcttcacggatagtttctatcaatttttttctatattccttttactatgaatgaaccatactttcattttatgttgcatgctttataattttctgatgagaactggaaattttgaatattaaaattgtaactcttgaaattagattttctcttctgccccagtttcagggattactgttgcctgaagaaagctacagtcatctgtttatttagtgccttttcctaactctgttgcaaagactatattccttggcatgtgtagtcactaaagactcataatttctgcagtcagccagtgacctaacagagatttccttaaatgcctgggtccaaaaaagaaaagaaaaggctgttttgtctctttaaatcccttccatcactcaggaggctgaggcaggaggattgcttgagcccaggagtttgagtctagcctgagcaacatagcaagacttcatctttttttttttctttttgagataagagtctcgctctgtcacccaggctggagcacagtggcatgatcttggctcactgcaccctccaccttccaggttcaagcaattcccctagcctcagcctcccgagtagctgggattacaggcacataaccaagcctggctaatttttttcatttttagtagagacagggtttcaccatgttgaccaggctggtctcgaacccctgacatcaagcgatctgcccgcctcagcctcccaaagtgctgggattataggtgtaagccaccgtgcccggccaagacctcatctttaacaaaaaaaaagaaagaaaaaagaaaagaaaaaaaaagagctttttaaatcccctccaccaataagaaaaccatttcagctgagcccatggaggctgaaacaataaccaaccttagcagtggccccttagcaaactaaggcatatcaaaatacacaagcctgatttttggaggacaaggtccctatagcccaccctcacatcgccaagcacatcagggatacagactgccatctccacaactggatgctgctgggaagaattcaccaaaattcaccagcctctttcttaatcaagtactcccttcaatgctgcaagtgcttcactagagtctggagctccaaatagttggttctgacagttcttgccagctcaatagtggtttcagtgaagggatcaattctactctgctatcttccatgacatcactcttcccccaccccaccacattagtctttatcccataggaaacagaaggcaccctcaagataggataatttgagaagaatgtatttaagaaggattatttacaaaagtgtggatgtaggggagccagaagagggaatgcattaacccaggactaatagcagccaagctgatactatccctaagcccaaagggttgaggagagggatcaggaccaggaaggaaggaaagagttgtgctgaggtggccaccttgaaaggggcagtgacatttggttgatgaacacagccagcctgaggcgacctcaaaagatgaaggaagcccaagattaaatagcctgatattactcttttgcctcctcctcctactactactacttctgttccccttcctcctgctggggctccttattggccaaccaaacacccaggcataagggagtccagttgatataggggtgaaaaaggatgaagagtggatctggaggactaactggagaatggccagacagccattccaaccccaaaattacctctagcctctatcttcaagattgaatgcagcaaatttctggctatttaagaacagccactttccaaacacaactggaggattcttccctggagagaagacctcccaatattgacattcgacatctggcacatcatctgtgcaacttacggtcaacctagtgcttctcaaaacgtaatgtgcacttgaatcacctggtgatattgttaaaatgcagattctaaatctgtaggttacagtggaacctggggttctccatttccaatgagctcccagatgatgtcaatgctgctggtccaaggagctagtcaactcatcttgcccaaacacttagagtctccactcagctttttagtgtctcatccttaaatatgaatagattgctaaagtagacagaagtttgagatggccattagcatgagagtaaccaaaataaattagcattaaaaaggacccaaggaaacagagacaaagtggagagaaggaaaactaaaaacaaattcactaatatcctcacagacaggaaaacttatgcctgtccataaaaccaggatagaatattatggaaaagagacagtcagcaggaaaaaaaggtcttgggaattaaaaataagaaaactgaggccgggcgnnnnnnnnnnnnnnnnnnnnnnnnnnnnnnnnnnnnnnnnnnnnnnnnnnnnnnnnnnnnnnnnnnnnnnnnnnnnnnnnnnnnnnnnnnnnnnnnnnnnnnnnnnnnnnnnnnnnnnnnnnnnnnnnnnnnnnnnnnnnnnnnnnnnnnnnnnnnnnnnnnnnnnnnnnnnnnnnnnnnnnnnnnnnnnnnnnnnnnnnnnnnnnnnnnnnnnnnnnnnnnnnnnnnnnnnnnnnnnnnnnnnnnnnnnnnnnnnnnnnnnnnnnnnnnnnnnnnnnnnnnnnnnnnnnnnnnnnnnnnnnnnnnnnnnnnnnnnnnnnnnnnnnnnnnnnnnnnnnnnnnnnnnnnnnnnnnnnnnnnnnnnnnnnnnnnnnnnnnnnnnnnnnnnnnnnnnnnnnnnnnnnnnnnnnnnnnnnnnnnnnnnnnnnnnnnnnnnnnnnnnnnnnnnnnnnnnnnnnnnnnnnnnnnnnnnnnnnnnnnnnnnnnnnnnnnnnnnnnnnnnnnnnnnnnnnnnnnnnnnnnnnnnnnnnnnnnnnnnnnnnnnnnnnnnnnnnnnnnnnnnnnnnnnnnnnnnnnnnnnnnnnnnnnnnnnnnnnnnnnnnnnnnnnnnnnnnnnnnnnnnnnnnnnnnnnnnnnnnnnnnnnnnnnnnnnnnnnnnnnnnnnnnnnnnnnnnnnnnnnnnnnnnnnnnnnnnnnnnnnnnnnnnnnnnnnnnnnnnnnnnnnnnnnnnnnnnnnnnnnnnnnnnnnnnnnnnnnnnnnnnnnnnnnnnnnnnnnnnnnnnnnnnnnnnnnnnnnnnnnnnnnnnnnnnnnnnnnnnnnnnnnnnnnnnnnnnnnnnnnnnnnnnnnnnnnnnnnnnnnnnnnnnnnnnnnnnnnnnnnnnnnnnnnnnnnnnnnnnnnnnnnnnnnnnnnnnnnnnnnnnnnnnnnnnnnnnnnnnnnnnnnnnnnnnnnnnnnnnnnnnnnnnnnnnnnnnnnnnnnnnnnnnnnnnnnnnnnnnnnnnnnnnnnnnnnnnnnnnnnnnnnnnnnnnnnnnnnnnnnnnnnnnnnnnnnnnnnnnnnnnnnnnnnnnnnnnnnnnnnnnnnnnnnnnnnnnnnnnnnnnnnnnnnnnnnnnnnnnnnnnnnnnnnnnnnnnnnnnnnnnnnnnnnnnnnnnnnnnnnnnnnnnnnnnnnnnnnnnnnnnnnnnnnnnnnnnnnnnnnnnnnnnnnnnnnnnnnnnnnnnnnnnnnnnnnnnnnnnnnnnnnnnnnnnnnnnnnnnnnnnnnnnnnnnnnnnnnnnnnnnnnnnnnnnnnnnnnnnnnnnnnnnnnnnnnnnnnnnnnnnnnnnnnnnnnnnnnnnnnnnnnnnnnnnnnnnnnnnnnnnnnnnnnnnnnnnnnnnnnnnnnnnnnnnnnnnnnnnnnnnnnnnnnnnnnnnnnnnnnnnnnnnnnnnnnnnnnnnnnnnnnnnnnnnnnnnnnnnnnnnnnnnnnnnnnnnnnnnnnnnnnnnnnnnnntgggaattgaacaatgagaacacatggacacaggaaggggaacatcacactctggggactgttgtggggtggggggaggggggagggatagcattaggagatatacctaatgctaaatgacgagtcaatgggtgcagcacaccagcatggcacatgtatacatgtgtaactaacctgcacattgtgcacatctaccctaaaacttaaagtataataataataaaaaaataaaaaataaaaaaagaaaatgtagtataccttcaaaaaaaaagggaaaattattttcaaacttgaatatctagcccaacaacacatcaagtgttaaatagaagtaacatattttcaaatatgcaaagattctaacaacatatatcccccatctccctttcttaggaagttattagaggagatgctttagcaaaacaaggaagtaaaccaagaggaagacatgggatccaggaaatgggcaaaaccaccccagaacaacaatgaaggaaaattccagaatgacaactgtacagcaagtctagcgagcagccagtccagattgaaataagaggaaggaaggctctgggacaaaaactccaaagaaaaagtggaacttatatattgagtatatggaaaacattattgctagactttttgatagtcttagagcatttgaggggaaaaaccaactgtaaatactgtttacagaaaatcagacagatgagagaaaaaaggcaataattaaccctaagaaaaatgaagggccatgtaaactagaagtcatgattatagtgcatttcttggctcatcagtaaacaatatttgcatacataataattttaatacagctaggtgcagattattggttttaccaaaagttattacgcagctatatatggtgggaagcagaagtgatagagtcaagttcttatctaccgtgtcaggaagtcaacacataatgctaaaaattcacaaaccaaaaaataatggtataaacatttacttagaaacatgaagataggccgggcacggtgactcacacttgtaatcctagcactttaggaggctaaggcaggcggatcgcttgagttcaggggttcgaggccagccgaagcaacacggtgaaaccctgtctctactaaaaatacaaaaattagctggacatattggtggccacctgtagtcccagctagttggggtctgaggccggaggattgcttgggcccagggaaatcggggcttcagtgagccaagagtgtgccactgcacaccagcctaagtaacaaagtgaaaccctatcagaaagaaagaaagaaagaaaaagacagagagagaaagaaagaaagaaagaaagaaagaaagaaagaaagaaagaaagagattatgaaggtaaatatcaggatgaatttgtgaaagagttgagcatattgcctccaaagagtaggacagggaactgcttttttcattacaagccttttagtattataagcatacatattttaaacaatttataaacattattttagttcaatagtcattaatgttacaaagctagcttatcggtcgggcatggtggctcacgcctgtaatcccagcactttaggaggctaaggcaggtggatcacttgaacccaggagtttgagaccagcctgcccaatacggccaaaccccgtctctacaaaatatacagaaattagcccagcttggtggtgcatgtctatagtcccagctatttggcaggccgaggcaggaggatcacctgagctcgggaggcgggcagtgagcagagatagcaacgtcactccagcttgggtgacaagagtgagacaccatctcaaattaaaaaaaaaaaaaaaaaaaaaaaaaaaaaaaaaaaaaaaaaggccgggcatggtggctcacgcctgtaatcccagcactttgggaggtcgaggcaggaggatcatgatgtcaggagttcgagaccagcctgaccaacatagtgaaaccccgtctctactaaaaatacaaaacattaaaagggcgtggtggcaggcacctttaatcccagctatttgggaggctgaggcaggagaatcgcttgaaccggggaggcagaggttgcagtgagccgagatcatgccattgcactccagcctgggcaagagtgcaagactctgtctcaaaaaaaaaaaaatttaagttagcgtataattttaggggatcagcaatatcctgaagcttatccatagcccgttaagtaatgtttcaaagggctatctgtgccttaatgataggagctagtttcttgttcatttttttatccccatccccaaacacatagcagaaaataaattatttccttgtatgtagaacggactcagctaagtttattatattctccccggaggagggaaaacacaaaacaaggcacaaaggcagaaggtgcagatgtagcacaacgatgagttaagattccgcacgcaggtaacaaggagggtatggtatatctctgccagaggtactggaaggtttcaaaggcagaaaaaaatgtgttccggacacctggacgcagaattggaggcatgacaggaacacagggaggcccatctaagttgcctattcacccaggtgacctctctttcatttctttaattgtccttttaacaatatggggaatttcacccaaggaaagggtcctcttctcgccccagcaggcaaggggtgttcctccagcgcaagttccggccccagctgcccccacgtcccacaggtctcctgccttttggcacgcacactcctgaccactcgctgcttccgcatccctactctgatcctctccccatgcatctctgcctccttagacaactgagaattttattgtctgtttcctttgccagactgtaagttccacgagggcagggcctcgtccatttcatttaccactacatccccagtatagagcaagagcccatgaaaatgtttgttggagaaatgaatgcatgatggtgtcgctggacagctatacctggaaagaaaaagaggcacccccatcaaacaagctgggagctaagaagcccgctgggagacgacaagggcgagcttcttgcgaggtttctgaaatgacaagaccggaagaatggagttggatctctgggacaagcgggagagagaagctgaacagtcaggcaagcctcggggaatgacagctccgcgggggacgcactggtaggcggtagacgtaagcggggtcggtgggaaagtagacggtggggcggcggcatcacacatacgcaagcgcagcctccgtttcctccggcgcgcctgcgctcgcgttcacgagtggttgaagcggaaatggcgccgcggggccgcgcgtccaggcggcgagcggaagtgggtgtgagagcggaagtggccggctagagccgggggctgggcggggaccgggcttgtcggtgaagcggcagtggcggcggcggcggcggctcggcaggcgggttcaggcttcgggggccaggtcggttgggtgggtgggtgtctccacagtctgcgtgcgtgggccagcgcgttcgtcttacccttccctccaccccggcccctctccccttctcccctaacctcctaccccacccagccccactcagggggcagcagggccgctccctccgtccttgcctcccttacccaccctcaccggcccttgtttctccttcccctgggggcagccgccgccatgatcctgctggaggtgaacaaccgcatcatcgaggagacgctcgcgctcaagttcgagaacgcggccgccgggtgagcgcgcgcccggggccgggggtggcgggggaagcagagttgaccccagctaatccccagtgttgtccagtcccccagacctggaggagagaaatggggtgcctggcagggtgtaggggctgccccagcggggtagacgtgggaggcgattgggcgcggccgggcgaggggcagagatgcgtggggagaggctcagaggagggatgcggaagcagcgagtggtgagggctgtgcgtgccaaagggcaggagacctgtgggacgtgggggaccctggagccggaactcgcgccggagtagccccctgccctctggggcgagaaggggaccccttccctgcgtgaaattccccggcattgttctgaacccagagagagcctgtttggaattgggttggaaggagttttcaggaattcccaggactggaggagggaaggagatgcaggcccacatcgccaccagcattctcgttccccacccccatctcctttaaaaggagcagaagagaagactaaaagccgacccagtcttagagccggaaaaacgcgatctctggtttcccttccccgaacccttctgtgagagacactgggccattttgttacatatttttaaagcaaagccaattgtccctcgctccacaccccttccttatctctcctttgaggttctaatgctctctcctcacccactagcctttatctggttatcttgtaaattcttacatcaagaccctaggtctgtgatttcttctgtggtagccctggcccagttacacacttcaaagactccagaatctataaagttcttagataacctgtctttacgattggactttttaaaagatgggcttagggcatctttccaaggcagcctctctgccaaacacaagaatcagtagaagacaatctgctcctccaaagctgctttgcttttctagtataatatttaaaacatgagctaaggattttgggttctaatttttggtggcctgtggccagtccctttgcctcatttccctatgtatgagcatggggcttcacatctgtgtttcacagttaataagtgcagaccgtttctggtgaactgggaactagtaataggaaagtgcttgcagatccacagatgggagaagattggtagaggggaatttttaagtggtcataatgtacttgtggcttggaggcattagaaagtattaactgccatttaaattgaatatatagtatgtcctgtctcctttataaggccacagattttatctgtaaaacaaagcactactttccttgaagtaatacgtgtagtgagcagtactgtttcctgccaggggctgcagttggttatatttgaggctgacttgcttctttcttgtcttagcctctcttaccagtttctttgcattttaaatattcaaatgaatcagcccagagtcttattttgggtgattgctgtatacttttttctgagcagtgtaacacataggaggaagttgaattaacttctgcattttcataactgatcttaatgcattctcaggtccagactagcaaagaatgagacctgggcggttataagctgatctacaagataaatggctgtgtattttcaagtagaggcatgtcttttaacataggagtacattctcatctatttgtgtattaatgacttgtgattccaaaatgtggcccattattcggaacttcagttctttctttttcttttagaaaattattcttaaaaagagaagctaaccatttcggagggattaaataggccctcaagtctggaagacataagttagaacttccaggacttttttttttttttccgagacagagtctctcactggctggaatgcagtggcgcgatctctgctcactgcaacctcgccctcccaggctcaagtgagtctcatgtctcggcttcccaagtagctgggattacaagcacgtgctaccacacctggctaatatttgtatttttagtagagatggggtttcaccatgttggccaggctggtctcaaactcctggcctcaagtgacccgcccgcctcggcctcccaaagtgctgggattacagcactgctcctttcctcaggacattttttacaaagatatgcattgtagggaagctgtatagggggtgcactggtgtgtatgcttgtgcacatgtgcgggtgtatgtgtgtataaatctaggcttttattctggcccatctccccctttgagatgtggttttcaataagcaggctcaaaacattctgctgaaaatttgaaactttgaaaatctttaaaaaaaaagagaccatgatattgtgcctggtaggcagggctctcctgggattacagatgtatcacccagtagaagcccgaatgaagcaaatgtaaattatcagacattccagtaaggtaaggcaaggtgcatgcctattccagaacttacagcagagtttgcctagtgtggttatcataaacatgtatgggattctaccagtgctcagcccaggcagcaacagaaaaaaaggggcctctctgagagcctattagccaagttagggaggtgctaaggggtgaaaggtgttggggtggagatcagagaaagacattaaagggagtagtttggaggagaaaccctggagatttgaaaggctttgctggtgtgggaacctgctaggagaggtcagctccaccctactttttgcacttctcagaataaaccgatgggggaaattacagttcggagcagccttttccagagtgcatcttccatctctgtgatgtccaataagatagccatacaaagtggctggctaaatttaagtaaaaattaagttgaaataaaattgagttcctcggtcacactagccacatttctggtgctcatttgccacatgtggctggtagctgttgtatttagcacagacatggaacatttccattattgcaaagttctattagcactgttccagcttctgaaaatgaaagcatgagatggtcttaaaaatagttctgtggcatatacttcagaatatagttgcattaattttccgtttgaagttgattttttttttttttaatgattcctctcagatcatcctgctggatcttctcaccagtggcctcctactaaaagtatcagctttcttttgggtaaagcagtgttgtcatctaaactgtttaagaatacatttgatcatgataaccttttaatttggaggcagtttgacaaagcctaaggttcattccaaacagattgctttttaattttttcctacacacttctgggaagtggcttattgaaacaactcatagattgtcacaaaataataattattggtaaattgtcttcccagcagcccacaaactaagagaatgtgactgacttaaaagctatgcccaacactgcaaataacctcatgcacaggtctgatcaacagcattgccttttcatttggaaattcttacccagaccctcaaagcaaaagtaatcagacaaattaatttaattctttcgttagtgtacacaccaagaaccgtttcataactgagaagctaggcctgtcaacttagctggagtctggagtccaaaattgaggaaattctgtcagatgcaaattgctgttggatttaagtgtgtgctggctccgtgccacagccagtgcatattgcggggagctgtggttccatgggggggagtgaaactcagtaagcaagcagtgccagttggggtgggcgaggatgatgggaagagaaatttgaaaaaggaataaattaaatcttgctgatactctgttctcattcccaaatatattgcatatgtcctcagagagacaggctgtttggagtgatttggaattaggacattgtttaagcatttagaagaaatggaatgttgtgtccaactcagtaagaagacctggttggtctttttacaggtcactgtagttaattacacactgccacctgtcctgtggcctacttgggaccactttggtcctgaagccccagagctgtgctggaccaaactgataactccttaagagctgggtctatcactttaatcatctttgtttccccagcatcctcattgtgtatatagtcaactcagtaaattggtttattgaagaaattaatgaagccagatagaatgattccttgtttctttaggagctgacatttttgtgacattgagtaaatcagcttttaggtctctgttctccatattttgatatatggcttagtggagaataggaccacctcttacctaatatgatctatttttttaggctttgctcaaaaagaatgatgggagctttatagaagatttaaaggagaatgctcagaaacctttatagtgagcagaattcagtaattcctctaattcaggacataagaagggataagtaggagagagacataaatgcccaaatggggaattggggccaggcaccctggctcacgcctgtaatcccagcactttgggaggccaaggagggcggatcacttgaggtcaggagtttgagaccagcctggccaacatgacaaaacatatgtctactaaaaatacaaaaattagccaggtgtggtggcgcacacctgtaatcccagctactcaggaagctgaggctggagaatcacttgaacccaggaggcggaggttgcagtgagcagaggtggcaccactgcactccagcctgggtgacagagcgagaccccatctcaagaaaaaagaaaaaaatggggaattggatcctagggtgcattcaggagtaaaaaccccaaagttgttaatgagaaaagaagttgagataatacagttgccagaagccctttctggattgattattgacattctagaagcttccttagagaaaagatagaagaaaattttttctaaagggttttaagaatagctcttaaaacctgtctgaatgaattgattatgttttagtgtcttgggttgtccaggcagtaactctgaggacttacccagccggcttgttctaggattccagacattacagcagtctgacacttataggagttctgtttttccttgtactgctaaccaattcctgattcagggaattaccgcaatcctaaaacctctcccaaccacagcttcagagtctgatctctgactccacctaggagaagaactaatttattgattaccttctatgagctaggcactgtgctatatgccttaacatggtttcatttcatttctgtgacagatagtggatctcatttacaactgagaaaaccagggctcttgaggattgggggtgggggtagatattgaataagtaactactacatattaagtaagcaccgtgcaggcatccttcactgtgattcttgaccttgtttatcgtatggcacacagaacatgattgtatttgtatggcacatttgggtaaatggtctagcctctcagagatcctgccacctgctgcctgccctaagggatatggggatcattacctcagcatatctataacttaaaagacaccgtttgagaaactttgctgtacagtagtccccccttatctgtggttttgctttctgcagtttcagttacctgcagtgagcagtgaaccatggtctgaaaatattaaatggaaaatcccagaaataaacaatccattaattttaaattgtgcaccattctgagtagcataatgaaatcttgcgctgtcccgcccaggacatgaatcatctttttgtctagcatatctacagtgtgtacgctaccctctgttagtcgcttaatagctgtctaggttatcagattgactgtcacagcattgtagtgcttgtgttcaagttacccttattttacttaataatggctccaaagtacaggagtaatgatgctggcaatttggatatgccaaagagaacccatgaagtgattcctttaagtaaaaaaagtgaccttggtgtttctttgctacagttcagtgctatccacacttttatttatccactgggtgtcttggaacatatcccccacagataaggggagactgctgtactgctggacatatatcatctcagtcttcacaccaacctgggaggtagatgttttgtccccattttgtagaagaggaacctgaggcccggtgacatttgaggagcattgcctgtggtcacatagccaataaattctgaattctaaataacttgctttttctcacccccagcatctgaaattttagcagctggtagaacagtaaataatgtaactattaattctgggggcctatttagtggaacacttttcctgggccagtcttcctcccgctcctttgtaattttaaaccacagaagtaaaataacaaacgccaggtcttggaattgagaagcaatcttgtgatggtatacttcacgctcagcaaactcatcgttaaggcactgagttctcggacctctaactcccagaagacttcccatgaagtctcctttggcctaatactctcctcagcagccattctctctcttctagccataaatagtaaactaaaatattaatgaatgtgatttgacaaatattgctaagtcagacagcagaccacttaagatcgatcgtagcaacttttcccacaaggatctgtgctcaggatactttatgcctagagaaatttgaaattagagactcaaagtgtgtatgacttggagcccaaaggttatttatttatagttggtttttctcaggtcttttgacaaagtaggagagtgaggaactcagcccttctttggctgaattaaaacctaaaggttaaaaaaaaacttactaagtgatgtaataatgggcttttataaactccctgactcttcagcacagtcagccttccccaggaaagtatgcttccatgcttcctcccattggtcatcctcttaatatttcattcagttggtccatgattaacatttccatatttttgttctttgctcttgttttctagaggtgaggaatggtattggactcgttgcctttgtttcctggctacagtttcaaaatgaaggctcagaagcaatttaaattttcatctagttttttccttctattctgaactctctgcttctccgtaaacccacttgatacttcaattcgtagagatacccagtgcgcttttcctaagtcacatatagagggctttgaagaagcaaggtgaagctttgtatgattcgtataggttgatttttcagcagggctagcatgcttcatagaagccagtttttttgaaaggtattgtctggcttctatatcagctttttaacactcataaaccatgttatatattccattatttcccagcatccctggagagcaacttagtcttggtttctttcgcaggtaatggagcagagatcgtggaaagatacgtacttgattaagaggtcttgagcaagttagacaaaaataaatgtgaaaacatgcgcatcttgtttgctagcccctaaaacaaagtggaatcattgagtttacaggtagctagctggtaaggcaatagtcttcatttgcttcctactttggacttcaggtctgttcttgtgttatatgtagtagttccatgaggtaaataggttcatttttattcccccattttattgatgataggggagaatgcaaaggtgtaagggtatttgtcccaaaacatgagcgtgatgagaaagctaaagttgtaaagcagatgtcctgactattcttagtgatttcatagtgttattttgtgttacactgtctattttaagttccgagctggaatttacaaagcaagacaaaactagggtagaactaaagagggtttcttgaaggtgagtggtaagtactttggtgatgtaaaggaagaaagaaagatgagtaggaaggcttacagacgggttttgaagtggaatagaacttgccgttttgtttatggcccgaaatcatcctttctctttaagcatattaaaaccattctacattatacttagccattttcctgctgaacgttttactcctaataccactgtcctgtggggaaggcattgaccaaaagatggcattttgtggtatatagcatgttgttaggaaattcagaattgaaagcgagcaccaaccaaagcagtagattcaacagcaggtgaaaaacaaaagctatagctgaccttccttttttatctgaccttccttttttatcctctacttaaagcaagtccaaaggttcaggtccatgagaaaatgaattgtgtactctgattggcagtaacctaaaatttatacagaatggtctgatcttaagtgaagctcaggtgcctttccagttccctttgaaggtaagcagcaatacagtcatcttaactgaggaccttttttgttgtttacagaaacaaaccggaagcagtagaagtaacatttgcaggtaagcatctttatctcagccctctgaagagaaggtacaatatgaaaaataggaaataggctgggtgcagtggcacatgcctgtaatcccagcactttgggagtccgaggcaggtggatcacctgatgtcaagagttaaagaacagcctggcaaacatggtgaaaccccctctactaaaaatacaaaaattagccgggcatggtggtgggcacctgtaatcccagctactcggaaggctgaggcaggagaatcacttgaactgggaggcaggagttgctgtgagctgagatcacaccactgcactccagcctgggcgatacagtgagactgtctcaaaaaaaaaaagagagagacaagaaaagaaaattgtacctaaaataagctttgacatggattgggtgcggtagctcatgcatgtaatcccagcactttgggaggccacggcaggcggatcacgacgtcaggagatcgagactatcctggctaacatgatgaaaccctgtctgtactaaaaatacaaaaaattagctgggcatggtggcgggcacctgtagtcccagctactccggaggccgaggcaggagaatggcatgaacccaggaggcggagcttgcagtgagcagacatcgcgccactgcactccagcctgggcgacagtgagactccatctcaaaaaaaaaaaaaaaaaaaaaaagctttgacattttggatactgtccctcatcaggtctttttgagctctttataatagatgaccatttcatgtatttaatccactgatgactgacaatataaagttacctgctgataaattagaagtttggatttaattttgtggtaaaactgaggtttttttgttgtgttttttttttaatttggaaatattacattatcttcaagtagctgtcagtcttagtttgcctagcactagagtagtagggaaacatgaacagctagagatgtgttcatcaagtcagagagagatgttgctgctttctgttccctataaagaattaggtgttggtactatttacttgttaggtgaatgaactcagaggaatacaaccaccctttctacaacaagagtcctcgacaagatgatcttggaagacttttgcagctctgaagtgctgttacctggaggccaggcaccatccctttaccctcctactaactggcattgccagatatcccttcgtgattcccatgacagctccataaagtgatggcactcagcacctaattctagtttcaggaacctattcctagtttcaggaattacacaggctgagtcagtcctgtgtactgcagaaagatagaaccgaaaaagaggggagtcctatagattagaagcaactcaaaagataaccaaatgcaatgtgtggatattgtttgcatcttaattcaaataagacaacaatgcttaaaattttttgagacagtagagaatatttaaatacttgactgaatatttgttttgtttttttgagactgagtctcactctgtcacccaggctggagtgcagtggcgttgataatctgctcactgccgcctccacctccccgagttcaagcgattctcctgcctccgcctctcaagtagctgggactacagatctccaccaccacacccggctaattttttttttttttccagacagcgtcttgctctgtcgcccaggctggagtgcaatggcatgatcttggctcactgcaacctccaccccccgggttcaagcgattctcctgtctcagcctcccaagtagctgggattacaggcatgtgccaccacacccagctaattttttgtaatttttgtagagacagggtttcaccatgttggccaggctggttttgaactcctgacctcaagtgatccacccacctcggcctcccaaagttaacaggctgggttaacaggcttgagccactgtgcccggccttgactgaatatttgatattaagaaattgtttttaaaaatttaggcatgacactagtatcatggttatgttttttaacaaatagtcttctgtatcttccaaagatatattctgagtatttatggatgaaattatgtgttgtatctgggatttgcttcaaaataaatcaatgggaaggaggatgtctaaatgaaacaagaattgtccatgtgttaataattgttgaggctgggcaaggtggttcacgcctgtaatcccagcactttgggaggctgaggtgggcagatcatgaggtcaggagttcgagaccagcctggccaacacagtgaaaccccgtctgtactaaaaatacaaaaattagctgggtgtggtggcacatacctgtagtcccagctactcgggaggctgagacaggagaatctcttgaacctgggaggcagaggttgcagtgagccgagaccacaccattgcactccagcctgggtgacagagtaagactctatctcaaaaaaaaaaaaatcgttgaagcctcatgatggagatgagagttcattatactgttcgttctgcttatatacatgtaaaatccaattatttcagcaccaagctgtgattaaggaaagaatagctttgtaattttaagaaagagcaaagaaacgagtgctcagcaattctatcccagtgtttctgctgatttgtcacatggatttaaaataagttccattttacttacatgcctccttaaaagtggtcttccttgtggcctacggcaaggtaggcgcttggagagattatttcccattcccaaattgttacgcaatcttatttgctttcctcacagatttcgatggggtcctctatcatatttcaaatcctaatggagacaaaacaaaagtgatggtcagtatttctttgaaattctacaaggaacttcaggcacatggtgctgatgaggtaagatccacatcattttccttgggactcttgtttcctcacctttcattggcagtttgccattcatggaagatccatggcactaaatcacccccacatgactacttgctcacctaactaggggctcttgacttgattcctataatgaattgtgtttcctagaaaaggttttgactcttgcttgcttgctttaaaacaatggaaacaaaaatagctttagttctccaaaaacatagcaaagaatacttttccttgatcagtacaaaaatagctgttgcaagaattaggttctgttctatttttgtaatattatcaaggcagatagataacttctagcttgtttaaattttatagtctcaggttctcattctggaggcttaggcacaaatagctgtcttttgaaatttttaattaaagctctttaaagctaccgtctttaaatatctcttctttataactaccataggggaaataagaaagatgtccagacattatgaaacttcggtggccatgccttgttcactggcttctttaaatagttaagtagcaggtttggttcctgttgaactgtatttgctctgaggagagccatttatggaagaaagaaaatgctattacaccagtttgtgcacgctgtggttgggtctcaaagcaggaaatatgactcagttcctgaatcagttttcaaatttcttagttttaacaaactaggttctccttaatctgttaaatgaagatataaccatagctgtttctttctgaaaagtagtagcttttgaattatttaaaacttatataataaaagatgatttgtaaaggaatatggtcaaaagcttgtttaattttttagcataaaaactaaaattagtcttaataccaagagccattggttgcttcccttagttattcaaatgcaattgattttctcataagttcaaagaaagaagaaatatttagaggatttggaatccagattagtttactggaaaaagaaaagcttcagaaagaagacctagtgcttttataaagcttatgaagaattgttttgtaaaagatagtggctgacacttctttaccagataaagagtgaaagaaaacaaatggctattaaagcagccctgcctcttttttttttttgaggtggagtctcactctgttgccccaggctgtactgcagtggcgccagctcagctcactgcaacctccaactcctgggttcaagcagttcatctgcctcagcctcctgagtagctgggattacaggcatgcaccgctacacctggctaattttttgtacttttcatagagatggcgtttcaccacattggccaggctgctctcaaacttctgacctcaggtgatctgcctgcctcgacctcccacagtgctaagattgcaggtgtgagccaccgtgcccagccttttcttttttttttcttttttttttttttttttttttttgacaaggtcttgttctgtcacctaggctggagtgcagtggcacaatcacagccactgcacccctcaacctcccaggctcaagcagtcctctcacctcagcctcctgagtgtctgggactacaggcacgtgccaccacacctggcttattttttgtttgtttgttctttagagagaggaggtttcactatgttgcccaggctagtttcaaactcctgggctcaagcagtcctccttcctgggcctcccaaagtgctgggattatagatgtgagccaccatgtccagctgcatcgctgctttggatcagctataactacctgaaaagaagtgttaaaatatttgaatagactttttttaaattgtgtaatcattctcccctagacagtcttcactaggtgcaagcctgcacagtggcacacacctgtagtgccaactgtgtgttgggacttcacacagttggcttgaggggttcaagtggggagagttgctggagcccaggagttcaagtccagcctggacaacatagtgagattccacctcaaaaaaaggaaaagatctaaatgcaataataataatcctggaaagaaagagttaagctagatttcttaaatctcctttccattctgtgcttttcttacgatggagctccagaacacattgctattcttgtagctaccacaagggtcaaagaaccagccccacccactcaagtgggtggagtaagtaacattcatagtgttggagcagagtgcacagtaaatggctccctgggttggttaaacagtgaccaacccatgataaccacaggaaggttattactttgtcacaggccatttttaaaggtggaatgcctctgctgctagagtgggaaggtaatggtgatgagtgataggttgcctccacccatctcctggtgtcatattgggagagggggtacaaactgaaaagtgaatcatggttaaaagtgcaagtgaagtgacaaggaagtgttggctggttttaccaaggggagggagcaaagcagttgaacatgatataaatttggctctcagtacctcttagatctcagaatattaacttagtaagcttgaaattaaactaaatcttagggacttagggatttaaactaaatccccaccacatctgatttccccttcctcgaaataccaatagtacgtgcaacacagacttgtagctcagaggtcgcatgctgtttcaaattcttgggatatgcatgttacttttttttaaagaagtggtatatcagacacctgaaggtcaagtctctctgtgccaccaacaaactctcgtgaccttgagcccctcctctcaattcctcttcggtaaaagaaatacctcacagtggctgtgcaatcaccaaataggaactacaggtggcattatttatcttttgcccttgtgtaagaaaatgtagtcttgcaggttgaaaatttcttccagctataggaaaatggttaaataaatatgtggaatattaggaaattattgttcagccaggcgtgggggctcattcctgtaatcccagcacttttggaggccaaggcaggagcatcgcttgaggtcaagagttcaagcccagcctgggcaacgtagtgagaccctgtctttgtatataaataaataagtaggccaggcgcagtggctcacgcctgtaatcccagcactttgggaggccaagacaggtggattgcttgaggtcaggatttcgagcccagcctgggcaacatggtgaaaccccatctctactaaaaaatataaaaattagcttggtgtggtggtggacacctgtaatcccagctactagggaggctgaggcaggagaattgcttgaacccaggaggtggaggttgcaatgagccgagatcacgccactgcactccagcctgggtgacagagtgagactccgtctcaaaaaaaaagaattaattaaattaaaataaaatgtttgtttcttaagccatgtcattctggaagcagtttccaccaggtgaagcagtcacggtgacagagaaaaaaatagggagtctcagtctgttttttgttgctataacagaataccacagactgaataatttatgaagaaaatatgttatttgactcatgttctggggactgggaagtccaagagcgtggcaccagcatctggcaagggccttcgtgccctttcccgtcatcctgtagcaaaaggcagaagggcaagagagggccagactcaatttttttttttttttttttttttttgggaaacggagtcttgctctgtcacccgggctggagtgcacccaggctggagtgcagtggcgcgatctcacctcactgcaagctctgcctcccgggttnnnnnnnnnnnnnnnnnnnncatacctagcccagactcacttttttaacagcccctcttgtgaataacaaaccaacttcccctataacaacatgaatccattcatgagggcagagccctcatggcctaatcacctattaccgtcacagtggcaattaaatttcaacatgtagccaggcatggtggctcactcctgtaatcccagtactttgggaggccaaggtagaaggatcacttgagcctagaagttcaaggctgcagtgagctattgtatcaatgcactgtagcctggactacagagtaagaccctgcttccaaaacaataataataatcgtaaattttggctgggtgtggaaaaattagccaggcatggtggtgcatgcctgtagtcctagctactcaggaggctgaggcaggagaatcgcttgaacccaggagatggaggttgcagtgagctgagattgcaccactgcattccagcctggacaacagagtaagactccgtctcaaaaaaaaaaaatcataatttttaacatgagttttcgaaaggacattcaaaccatagcagaaggtataaaaggggttcttggttttttgggttttttttgttgttgttttcatttaattcaaaaacctggaaagtagccagcagtaggttctggtttggggggaaagacatgtagagtatacaaccttctggacaccagtattaatagctagctaagatttcattattgactgtcctttgccttaagagctggctatgcactgagtaattttaaagcatacaagatcagcagacaaacagatcagttcccgagagtcctggtttttttctctttattcacctgggttagtggctcagtctgtacttaggttgataactaacaatctgttctctcacttggaatttggcatccttttgctctcttgaaaacaaaacatgattaagtacaatgtaggatctggaggagaacagagaacatattaagggtgtagtcaagtcctaaaaaaggatgagctttgattaaagattctcggccaggcatagtggctcatgcctataatcccagcactttgggaggacgaggcgggtggatcatccgaggtcagtagttcaagatcagcctgaccaacatggagaaaccccatctcaactaaaaatacaaaaaaaaattagccgggcatggtggcgcatgcctataatcccagctacttgggaggctcaggcaggagaatcacttgaacccaggaggcggaggttgtggtgagccgagatcgcgccattgcactctgtcccaggcataaaaagatactcatctcagttttgtgacttgtttggtgactaaatccacttcccctctgtctctactttcccatccaccaaatgaaagttaggaagaatgccaacttaggaagagcttggcaagtgcagtactttaaaaataatgaaattatcatggcctttggattaacgtatttggttttgttttgtttttattttctagttattaaagagggtgtacgggagtttcttggtaaatccagaatcaggtatgtagtcatgtgagcaactatggaatgacatgggaagagaggtgtcctttttatattatgctttttttacccaaaggatttcgtttaaatattattacaaatatttctgcatgagcccattcctaatttcaactccctccataaaaatagcttttaaggggctttgctttgtccaatatggaacacagtagaggtacaaaattgatgtgtgacatttttaacatttacttgatggggccacatgactcttacttaatctttcagccagagggccacatttgtttgttcatggtgattaaaatggctttgaaaagaatgagcaaacattgattcccaccctcggcccttagtaattctgcatactacatatttggagaaagaagaggaatattcaccacactattcttgtgatttcaagtaataaaaatcagaccctttcttaatccagtcttctaataggttgtctcaacattcatggccagaggaattgaaaggcaccgtgtcatccttgaatagaacagctatgttatactgctttaaaaaggaggtttaaagtggaaaaactgaacagcctttttaccctgtgattcagtggcatgtctcaaattctgaggcatttagcaggaccccaaagtgagaaccaggtagtaagaccattggaacataatattttttactcaactattacaactttggtaccttgattagaaaagtcttctaagaaggaagttctctgtcactcttaacagcagttacttgtgctagcttatttcatcacctcacctattttttcagacagtctcattctgttgcccaggctggaatgcagtggtacagtcatagctcactgcagcctcctccaaatcttgggctcaagcaatcctcccgctttagcctctccggtagctgggaactacaggcacatgccaccatacccaattaatttttttaatattttgtagaaacagagtctcactgtctgctgcccatactgccaaaacagagtaaggaggtctcaaactcctagccttgagcaatctacccacctcagcctccgcctcccagagagttgggatcacaggcatgagccaccatacccagcaccttttttttttttaatctccaaattggcgggatgaatgtgtcacagaaataaaagccaagataacactgtaggcttttggcaaaatcaaggtattaaaagaaagaaacaaacagatctagaacagaaaaatcatgtccaaagtcttgggcatgcttgtcacagccaacatcctgacatggaaagtttatgtttctgtccctgggcctccttctacctcccactaaatcatagacattgccagattgcagaccctgtcttcatagaagtgtgaaatgtaaaagtgtgtgaaagtagtgtctcaaccaggtgcagtggctcacacctgtaatcccagcactttggggaggccaaggtgagtgaattgcttgagctcagaagttcaggaccagcctgggcagcataatgagatacctgtctctataaaaaatacagaaattagccaggcatggtggcagccacctgtaataccaggtactcaggtggctgaagcacgagaatcgcttgaacccaggaggcagaggttgcagtgagctgagattgcgccactgccctctagcctaggcgacagagcaagattcagtctcgagaaaaaaaaaaaagaccgtagagtctctcctcctcttttttaatgggtttatctaggcacgtttggaaaactcagcaagttatactagatttttacttctcttcatcctcagtatattctgttcatcatgttagaagccttacttaaagacagactttaccttagctatagttttatttgctcttatttggcttcctaaaactagcaaacctcagctctaaatcttttcttttttaatctaaccttgtaatctgtgtgcttatttggttttcaagtacccaaaatagaatgatgattgatattatttaatactggagtgcctctccagtattaaataaaatgtgctaagcattatctagagcaaagatttagcccatcctcccgaagagcccatgctcaacaaaaaacacagacctcagccgggcgcggtggcttatgcctgtaatcccagcactatcggaggccagggcgggcggatcacctgcattcaggagttcaagaccagcatgaccaacatggagaaaccccgtctctactaaaagtacaaaattagccaggcctggtggcgcatgcctgtaatcccagctgcttaggaggctgaggcaggagaatcgcttgaacctgggaggcggatgttgtggtgagccgagatcatgccattgcactccagcctgggcaataagagtaaaactccatctcaaaaaaaaaaaaaaatacagatctcaggaatgcttttgggaaaaaatgaaatagtaatgaggtttcagatacttagaagtgtgaaagccatacagttctggtgaagttattcccgtcagttgcctagaatataaaatgatcctcagtgatgtagaaatattcttgcaaaaacatctctaggcagtttgacacttattaatcatttgattctataatcaagtgttccagccggcttctgggaattcatagtggacatgctgtaaaaaggcaggtcatccaatggtttcagtccatgttctgcacccgtattgatgacctgtcatgttccacacactttaagtattgtacattcttttaatgctcacaacattctcccctatctccgcaccccctgccctgctcctttttctttttttctttttttttgagacagaatttcactcttgttgctcaggctggagtgccgtggcgcgatctcagctcattacaacctccacctcccgggttcaagcaattctcctgcctcagcctccggagtacctgggaccacaggcgtgtaccaccacacccagctaattttgtatttttattagagacggggttttgccatattggccaggcaggtctcgaactcctgacctcaggtgatccacccaccttggcctcccaaagtgctgggaatacaggcttgagccactgtgcccagaccaccctacctgccccccaccaccaatttttttttttttttaacagatgaggaaattaacaagtcaggcaattttttttgtttttgttttttttttttggagctggagtctcgctctgttgtgcagtggtgcaatatcagctcgctgtaacctccacctcctgggttcaagcaattctcctgcctcagcctcccaagtagctaggattacaggcgcccgccaccatgcctggctaatatttgtgattttagtagagacagggttttgccatgttggccagactgctctcaaaactcctgacctcaggtgatctgcccaccttggcctcccaaaatgctgggattacaggtgtgagccaccacacccagcagtttttttaaggtcacaaaatgacaagactaggatttggacccagttctgttcgactcaaaatagagtgccctacacttatgtgtcatgctgcatttggcaagtcacgtcacttctttgaatctccttttccctctgcaaaacagtaaccttatctagcctgcagacttcaaaggtggttatggagatcaaatgaagtaaaatgttttaaaaattgtacaatatataccaataaaagctattggggaggtatatgtatgaacaggtagttggtttttctaccctgccacctcataaagagtttgcagtggcacgtagaagggtttatcttattatcacaaagctacccatttgctggccatactgatacttggcacattaaactatcagagaaatatatgtggctcctttacaactgtgtctagaagggtacatttccaatcagagttcccaggttctgactttctcccattacatatttgtaattagtcatctttgatactgattcaaatttttgattaacattaattatatatatttacaagaatcttataaaaattaagattttatttcacctcattttgccctgtgagatagatggaaatagactatattctacccaggttaaaagtacagataatgagacaaaatgtcaatagaacctgaaaaaagatttttttagttgcctctagtctctgtttacttggtatagatagtatgctgctttttttttttttttttttttttaaatgtaactgctgggttgttttttgtttcttgttttttctttccctccaggatacaatgtctctttgctatatgaccttgaaaatcttccggcatccaaggattccattgtgcatcaagctggcatgttgaagcgaaattgttttgcctctgtctttgaaaaatacttccaattccaagaagagggcaaggaaggagagaacagggcagttatccattatagggatgatgagaccatgtgagtatagaatttggtcctgaagcctggatatggctgctacaccaccatggcacttactgaaagaaatatggcttggtcaaactttcagctgtattgcgtgaaaatgtttttcctcataaaatgtcttaagccaggaagtagatgatagggcagaaatcagccactcctcctactctccagatactgagagctgacagatggtggaaagagaatccagtgctttcctttaaggcaccactgttctgagtcatgtttaagagtatagcctggataatcagcaggcagggtgaccataggtccatgttatatttacaagtcaataaaatctacttctgataatttccatctgctgcctctcttagggcattcattttgtgcactgactttgttgaccataaatatcatctcatttggcacacctttatattatgatttaagagatttatgactttagccttctgatgtacttgtagatcaagttattgacaaaaccccattctgattctgtacttatcctcatggattttgttcctctcaggtatgttgagtctaaaaaggacagagtcacagtagtcttcagcacagtgtttaaggatgacgacgatgtggtcattggaaaggtgttcatgcaggtatggagcagacatcttgggggaaacccatgcatggcgacttatacctttgcacccaaacataccatgagcgtaggaaagagatctagcaactctactgatgttagaattttttttttttttttcgagacggagtttctctcttgttgcccaggctggagtgcaatggagtgatctcggctcactgcaacctccgcctcccaggttcaagcaattctcctgcctcaacctcctgagtagctgggattgtaggcatgcaccaccacacccagctaattttgtatttttagtagagacggggtttctccatgttggtcaggctggtctcaaactgccgacctcaggtgatgcccatctcggcctcccaaagtgctggtattacaggcatgagccaccatgcccagccttgacgttagaatttgttgaagatttaatagacaactcccacaaaactcagtgaatattttttgttgctgctgctgttgttttgaggtggagtcttgctctgtcgccaggctggagtgtagtggcacgaactcagctcactgcaacctccgcttcctgggttcaagcaattttcctgcctcagcctcccaagtagctgggattacaggcacgcgccaccacgcccagctaatttttgtacttttagtagagatggggtttcaccgtgttggccaggatggtctcaatctcctgacctcatgatccgcccgcctcagcctcccaaagtgctgggattgcaggcatgagccaccgcgcccagcctgatattttttttctcagtggtttagttttgcaggacagaactaaagggtaagttgagaattaaacatactaactatgaatgaatgttatgcatccttcctactgtggggtctttgacctaaaactttgtcaggtttcctaaccctaacctcttgtgtttcctcagatttctagtaaggtggctgctcttggtttggtcctaaggtcttttcagaatggactgtatagccaattatttggtagtagataacgcatgaacaggtagagttgttgaactgacagactgagcctgagtttggatgggtcaccatagagtacttccctcacaagaagctcatcttaagaagagtcatgagaggccaggcgcggtggctgacgcctgtaatcccagcactgtgggaggccgaggtgggcggatcacgaggtcaagaggtcaagaccatcctggccaacatggtgaaaccccgtctctactaaaaaaatacaaaaaattagccgggtgtggtggcaggcacctgtaatcccagccacttgggaggctgaggcaggagaatctcttgaacctgggaggcagaggttgcagtgagccaagattgcaccattgcactccagcctgggcaaaaagagcgaaactccgactcaaaaaaaaagagagtcctgagagttagcagggcattttgtaattggatttttggtgtagttgcattcaggtcattgtgtaccagtctgctggccagttagttgctgcctctaggatggacatgagagttcattggtcaagtgacattcaggctggtttcttctgagatggctcagcattcaaaatctagtacaatggtaaaattttttgaaaacgttactaccttcattctgttccttggcagggtggtaaagatttttaaattctgaagcagaatctcttttgccaaatagagttgaaagacagctgtgcttaacagtaaagatactttgcatagccttctaagtggctaggaaaatcttcaaaagtgatattctcaactgctccatccctagtggcttttgtattttggctaattaatcagaaactagtttgggagtcactatacagaaaaattggaatattgacacttcagcatttgctagtgctgaacttgatgaaggaatatataaatatacatgtatctcttgggtcctaaaagtaagcctctagagaggcatttcatgtgtttttatgcagaattgacaggggaattaaatgcagtagctcagaaattgggctaaatccagagtaacaaaactaattttaaaagctctgaagtatatatttagatttggctggttttttaccaatcttattccattttattccaggaaacaacttatttttatactttaaacagatcttatcttggagagtgtaccggagatttgttccttaggagaattttgtgtattcttttttggcatatgatttaaatgcctccttcagggtacctgtggtagggcacttacctaaaaggaaagacaaagcctcttttgcattttggcactaacaggatctctggatagtaactggcctggtgcagtgctagctagactcaggaagtcatctgccctgccaccctttccaaattcagaggcttaggtaatttgttggaaatgacaatcggaaactggacttttgctggattttcccaaaaaataaatagaactttttcctaggcctggaattgtaaatttctcggaaaaagaatgagggacacctggcacagaaagttgtaccctgagaacactatttgaagttcctcatggtcactagtctacttgttgccagcctttgtggcctttcccttccagcatgcacatccagcctgatcagaattcaagtcttgcttttgtcatttggcaagcaggctctgagggatgctttctacctctcagaaaaagacaggaagtgtattcctccacactagtggtatgggcatatcagctgagtactggagaatgtctgatagaagccatcatttcaatgcttattccatgaaaagcaataggaccagtaattatgcttttggagattagcttatggtgaactagaattcttttcatattctaagattttaaagtcaagttagtaactaaataaccaggaaaagttaagtggaaaccactggtttttatatgttcagggacaaagacacaagcacctgcctcttaggcagttgtaaagatgtattttgagggccctttctgcctgtttgcatgtgtgggtatgtctgtaggatattttcctgaactgggaacactgagtccaagtcagtaattttggtagacattgccaaactcttctccatcagggtagtggcattttatcatctaccagtgatggagaggagtgcctgttttcccagagtatgttgtaaacttgtggatttctcctgatctgataggttaaaggtggtatctgtgtctgcttatgatgacataaaaagatgttctgaggtcagaacatcttttcttaatgttatagaccatttgattttcttatgaagtgtctctttatgtcctttacccattattctgtagggtcattgagcttctcaatttctttacatactagggagagtagcctttcatctgtgattaagagttgaaatattttctccagtttgtcattggaccgtgttttgtggggttttttccaccatgtggaagtttgtttttacataatcaaattaatcaatcttgccttttatggcttctagattttgagttataggtagaaagcccttccctactcgaaggttataaagaaatttacctgttattttctgagtatttttacagttacatattttatacatgattttttcttatttgttgagagctcctcttgttgtatggtatgaaagaatgatctttttttcctaaatggctatccagtggtcccagtggcaattatttccttttttacacccctgatttaagatgctacttttatcatatgctaaatgccttgtatatatttggatttattccgaacttcctatgataaatagtactttggaagagagaaataatctgatgctcaaaagacatcctagccagaaggagagtaaaaaggcaatattgcttgattacgtataacaaagatgccaatgaagatggagggctgtttgggtgtgtttgtttgtttaagctttatttaggagagagaactgaggagaagcaaagacatcagagaatctaaagaatagtcccagtcaggcacagtggctcacgcctgtaatcccagcactttgcggggcctaggcaggtggatcactagaggccagtttgagaccagcctggccaacatggtgaaaccctgtttctactttaaaggccaaaaattagccgggaatgatggcacacgcctgtaatctcagctactcgtgaggctgacacatgaaaatcacttgaacctaggaggtggaggttgcagtgagccaagatcacgccactgcactccagcctgggtgacagagtgagaccctgtctcaaaaaagaaagaaagaataggcccaagccagaaacgtatcgttgaccgagccttaaatatgttattttccatatacaaaactaatgagtgctaataagtcaccactggtttataaataccccatctcattgtgaataccacatgtacctgtgaattagagccttggagacacttaacagacacaagaaaatgccaacagttacgtatctgttctgtttaattccttaataccgaaaagtaaaaccagtaaaagttaaaaagcttcttaacccctttgtagaataaaaaatgttttctagagaagggcgattttagaagctttgctctagaaatttccatttgggataatcttgactccttcccttcctttttggatatttttccttcggggaacaaaatctgttcaaaaggggactaatctaacccagttgatggtcatttcttttcctacttaaagcttggtagtgttagcatgagaggcagtttgtgaaataggtgaggtcccaggctgggcattggggctcctcagccatcatctttcttttgccactaattgtcgagagggcttgctaatcagtgtttattcttcctgcctgcaactggaaacagcccttgcctattcctgtacagtgtgatgatactaaaccagctagggtagaagcacttgctttctctcagcaaggcatgtgctgcatagcctctttgaaagacagaagaataaattacaaagataaattaagcaggatctttgatttgaactcataacctggtaggggagccagatacattaatgaatggtaaaatatcatagtagaggtttgtagaaaagacatggcagctccagcaagagagcagtacctgcctgggtttgttggagatggtattaggaggcggtatttgagcagcagtagaagggcacgcaggccacatggctgtgtaaccatgccttcagaactcctaaaacaagagaccttggagagtccttggcagcatcctcctgctgtctatcatcttggaaggcccacttgatgaatttggattatccagttttactggcattgctagaaaatctacttctgttcttgcagatctggctgagagagagaagccttgtattacttgtctatttacataggaatgtatggactgtagaagcttcaggtttggagattggaacatagaaggaagggcttcctttatgagcaccaagacaactcagcttctttcattccattgtcttctgtccgcaagaagagcttaagtttgctctaaagattttattgatgaattctaaatagcaacaggatcctcagtgaaaaaagactcatgcaaagtcccagagcccagagaaagtatggtagtttatcacctatgttagtgcaaaggaaaaggattatcactacttttcatcacattttgaagatctgacttattaagtactttgcagtctctcccgtttgaatctgaagtgtagtggtagcagctagcacttgtcatatttcaggtttggtgtagtttatttttaacctcctgctggtctggagggctacaaaggtcacaccacatagaacaaaccctatagcttgagttgccactcatcttacacccacttctcttctggttgcttttgctttgtcttggcaggagttcaaagaaggacgcagagccagccacacagccccacaggtcctctttagccacagggaacctcctctggagctgaaagacacagacgccgctgtgggtgacaacattggctacattacctttggtgagcagggtgcacttgctgcttttgtgccgctttaatgagttcacacagcagaatacctaaatctgcacagaaccttggttaacattttaaggtaggcaaacgcaggcataccaacttgttcctgttgccattgcagtgactaaaggagggatgtcacagggtattaattacagagcaggccatatgctatttttgtacagtaatcctttcctttttttccccatttttcttaaatcttaaaaataagactgaattctgatatcaagagttaaggtcccttcagtagttcagctggtagagcagaggactatagctacttcctcagtaggagacgtccttaggttgctggttcgattccagcttgaaggagacaagtacagttttggctgggcacggtggttcatggctgtaatcacagcactttgggaggttaaggcaggtggatcacgaggtcaggagatcaagatcatcctggccaatgtggtgaaactctgtctctactaaaatacaaaaaaaaattagctgggcatggtggcgcacgtctgtagtcccaggtactccagaggctgaggcaggagaattgcttgaacccgggaggtggaggttgtaatgagctgagatcgtgccactggactccagcctgggcaacagaacaagactcttgtctccaaaaaaaaaaaaaaagagttgaggctgggtgcggtgtctcacgcctgtaatcctagcactgtgggaggccaacatgggcagatcacctgaggtcaggagttcgagaccagcctgaccaacatggtgaaacactccgtctctaccaaaaaaataacaaagaaattagctgggcgtggtggtgtgcgcctgtaatcccagctactcgggaggctgaggcacaagaatcccttgaacccaggaggcggaggttgcagtgagctgagatcacaccattgcactccagcctggatgacagagtgagaccttgtctcaaaaagaaaaaagaaaagagtaaaggataggcggggcacagtggctcatacctgtaatcccagcactttgggagtccgaggttggtgggtcacttgggtccaggagtttgggaccagcctggataacatggtgcaggctcatctctacaaaaagcaaggggccaggcacagtggctcacacctgtaatcccagcactttaagaggccaaggcgagcagatcacttgaggtcagaagttcgagaccaacctggccaacatggtgaaaccacacctctactaaaaatacaaaaattagttggacatggtgacatgtgcctatagtctatagtcccagctactcgggcaagcgaggcatggcaattgcttaaacccagaaagtggaggttgcagcaagccgagatcatcctgctgcgctccagcctgggagactgtctcaaaaaaaaagataactaggcatggtggtgcatgactgtagtcatagctacttgagaggctgaggtgagaggatcacttgaacccaggaggtcgaggctgcagtgagctgtgatggcaccactacactccagcctgggtggcagagtgagaccctatctcaccaaaaaaaggagttaagaagagaaccacctaagcagctagatgggggttctctgtcatttggcaattcttggttttttgcttattaagcccaagctccagccgtgatccacttactccactttttcgcggaataaattcaggtcttccttcagttgctccagcctcatgcactggctgattatgatagcttacagtttggaattaataagcttgttcacactgcacccaatgccactggaatgtctcctttgtgaaatgtaatttaattcacctcagtggtaaaggtgaacctgtttattggtgatgaatctgttgatttaccaaatttcattaaatctaaactatacacttttttcttttttctttctctctgtcacccaggctggagtgcagtggtgtgatctcggctcactgcaacctctgcttcccaggctcaaacaattctcgtgcctcagcttcccaagtagctgggaccacaggcgtgtgccaccacacccggctaatttttgtatttttagtagaaacagggtttccagctgggcacggtggctcacgcctgtaatcccagcactttgggaggccgaggcaagtggatcacgatgtcaggagatcgagaccatcctggctaacacagtgaaaccccatctctacaaaaaatacaaaaacttagctgggcgtggtggtgggtgcctgtagtcccagctaccctgaaggctgaggcaggagaatggcgtgaacctgggaggcggagcttgcaataggccaagatcacgcgactgcactccagcctgggcgacagaacaagactccgtctcaaaaaaaattaaaaaaaaaaaaagaaacagggtttccatgttggccaggctgatctcaactcctggcctcaagcaatccactcacttcagcctcccaaagtgctgggattacaggcgtgtgccactgcgcccagccagctataccatttttttcaagtttttgtctttgaagctgggatgcatcttacaattcatagcatgtcacactttaattggcagcatgtttctcttgtggtacataaaattatggcagacttacagtcataagcaccttagattctttgaagtatagttgtcttctgttgtggtgttcatttactttcaggccagggcacattgacacagaaattccacacttccttaggaggcattccttttcatttcaacgaaaacttcagacaactgacggggttttgcagatagtgagtagaggaggtgcagcaggtaaaaacgattccagaaaaccagggcaagaggggcatgcaggcctgctgtagtgcaaaggactttgtgatgagcacacaggtctttttttgagatggagtcttgctctgtcactcaggctggagtgcagtggcaccgtcttggctcactgcaacctccaccccccgggtttaagtgattctcctgcctcagcctcctaagtagctgagattacaggcacacgccatcacatgtggctaatttttatatttttagtagagatggggtttcaccatgttggccaggctggtctcaaaactcctgatctcagatgatcagcctgcgtcagcctcccaaagtgctgggattacaggcgtgagccatcgcgcccagcctcacacaggtctttaggtggctggtgtcacagggtggacttcagtcaggcccagtcagagcagctcctcctgcctggcctatcatgagggttcaggtccttacaccttattgtctgttttcacagtgagaatatgggaaattctctggcatctgttttctgggaaggtttactctatttcagcaccaaggacctaagacaggcagctgcatttcctaatcctgattccttaaagtaaactgttacagccagttagtgtgatcctggagtgtgtccagctgcagaggcaagagctagtacctgtgtggcagaccggaaatagatttcaaaatgcacagctgcagaattcaggagtagaatgaaggcctagggtcaagccctgtttttcatcgtgggctcctccattcacgctcgttgacacctttcctggccatgctgtttaacttccatgtcaagaaaaaaccctgacaaagcctggtaatactgacacaagtggagtgtacttaagcagagagggagtgatgttcactaggctgttgttcttccccaccctttggcatttgtgtcgtgtcctgacgccttgtttgtgtcttccgccttcagtgctgttccctcgtcacaccaatgccagtgctcgagacaacaccatcaacctgatccacacgttccgggactacctgcactaccacatcaagtgctctaaggtgaggggggtgccagcatctcagcctctatgctctgggtcttttcctccaccagaactcctgacagaaagtcattccattagtctacgctgtggatattgactcttaggtaaataattctagaggcttcaagaaaccatggtctttcttcatcaagccactgtcccccatccctccctatagcagagatgaatatttgtttccagaattgctcaccttcctgcttccctgcagggcctgggtcaatcccagggtgtatgttcccaaccgcccttgatgacctctctgatgaaagacagcaaagctgtctttctagaccatgactgtgctttagtacctgttatgtttgttcccaggcctatattcacacacgtatgcgggcgaaaacgtctgacttcctcaaggtgctgaaccgcgcacgcccagatgccgagaaaaaagaaatgaaaacaatcacgtaagttaggcagcaccccagcgaccaccttcctctcctgagtcaccgagaaggaagcagtgggcgctggtggcctggtcctccatgtatctgggcactggctacatatgaggtcagcagggctaagtagataaaccaaaggtgggattccatgttctcactgccatataggccaggatgggtttccttgtttccgtatctttgtgagctatgagaatggcagctaggaaataaacaaagtttaccaagagactgttctttttgggcctgagttatgaggtcagtcttgtgcttttggtggtctttctggagagatggagtaagttgcttagggacctttaattgggtaaataggcctgaaaccaccccactaagtgttctttttcctggtccactctcagcaggaagtttgcatgcagaggaaggttctctttatcagggatagaattgaggagagccgtgacgggcgctgtggctcacgcctgtaatcccagcactttgggaggctgagatgggtggatcacagggtcaggagttcaggaccagcctggccaagacggtgaaaccccatctttactaaaaatacaaaaaaaattagccggtcgtggtggcaggtgcctgtagtcccggctactcgggaggctgaggcagagaattgcttgagcccaggaggcagaggtcgcagtgagccaagattgtgccactgcactccagcctgagcgacagagtaagacttagtctcaaaaaaaaaaaaaaaaatttgaggagagccctaaataggggtgtggctctgcatgcaggaaaggcgagcatggcctagagcctagagagttccatctttgtgaaaggtgccagaccttggttcttctgatgaaattcaggcagtcctgtccttaagataaggtaatagtgttcatttgctggtttttgtttgtttgtttgttttttggtgggggtgttgggggagacagagtctcactctgtcgcccaggctggagtgcagtggcgcgatctcagctcactgcagcctctgcctcccaactagctgggactgcaggtgcacaccaccacgcccggctaattttttgtattttagtagagatggggtttcaccatgttgcccaggctggtctagaactcgtgagctcaggcaatccacccacctcggcctcccatctgctgtcttttgtaccagttgaactaaaagtcttgaggtcataagcctccctcacagccagtgttatttgccagcaccccagtactgttgttgttttgttttgttgttttgtttttgttttttgttttttgatacagagtttcgctcttgaagcacaggctggagtgcagaggcacaatcttagttcactacgacctctgcctcctgggttcaagcaattctcttgcctcagcctcccaagtagctgggactacaggcgtgcgccactaagccccactaatttatttgtatttttaatagagacagggtttcaccatattggccaggctggtcttgaactgctgacctcgtgatccacctacctcagcttcccaaagtgttgggattaaggagtgagccaccgcggcccagcccagtactctgtgatccccagccaggctcaacctcctgggctcaagcaatcctcccatctcagccccccaagtagctgggaccacaggcatgcaccatcacagctggctaatttttgtatttttgtagagacgggatttcaccatgttgtccaggctggtctcgaactcctggactcaagtgatcctcccacctcagcctcccaaagtgttgggataacagacatgagccaccacacctggcccagcactcagtactcttgaggcaaagttttagtgggtgtggtacgcctagggctttacactctctctcttgcatttgagggctcttctaccaagttagtttctgctgtcatttgaaaggatgagaaagagatcaaggacttgagcagtaggtgagggttttcagacattgtcaaaaagcagtttaaggccaggtgcggtggctcacgcttgtaatcccagcactttgggaggccgaggcaggcggatcacctgaggtcaggagttggagacctccagcctgaccaacatggagaaaccccatctctactaaaaatacagaattagctaggcatggtagtgcatgcctgtaatcccagctactctggaggctgaggcaggagaatcagttgaacccgggaggcagaggttgcggtgagctaagatcgcaccattgcactccagcctgagcaacaagagcgaaactccatctcaaaaaaaaaagcactttttaagtcacctcgacttctttaggcaaaggcctgtctctgtagcagctcagagaggagtgtccaaatgccatgcaatgaaatggcagcatcgtttcttttctgcagcttcttgggcagatctttaaatgggcaaagtgaccaacaaggtgggtgggcaggtgagaggatgtgcttgctgcctctccagaacctggtctccatcctggtgtctacattttcccctttccctgcttgctctacacaggagtacttttctcaccgggtacttgtttggtgacctggagtgtgaggcagtgaatttcatgctgctttcagggcccagtagacaggcagttcagtagaggccaagaggtaaactggcagccaggtacagtgagagggaagcctgacctggcagcctgtgataaccggactggaaggctgggcatcataatagtctcagggctgccagcatcacctttggcactggtagctgcttgtgcatccaggaggaaggcctgttaggcagctgctgcccgattccacagccagcaggcagtcgtgggagtccctgcccagtgagtgcagttgtgtagcgggcagggatagctccctgtcctggtgagagacccaggaagggatgaatccttaaaatgaacagactgttcataagcctcctctctgggacttagaaagagcaactttgccttcttctgtgctgcagcttctctttggcagagttgggccccagaaaggagaagcaggagacaaacagctgcatccaccctgaaaaccagattatgttactaatggtgggtaggagttaagtgactcagctgtgggcagaagccaggaaccctcgatgggccgcccagaattgaacactcaggagcttttcatttggagagaaggataataaggtgtagcttcattttggaataagcgatacatccaagacagggaaaatctagagcccatgtttttgccctgatttcccatagttctcagctctagcttccaggctgctttcccagatactgttaggtaccagttagaggctctgtccttgagaaccacctagcccatctggagaaatactgggtggaacaggacaccacaattcaggagcctcgaaccaggcaggtgttgtataagccagaggaggagtcaccacgtgatagcagaaatacctttagccttggaagttctgaggattgctctgaaccagccacctgccttcatggtgagagataaaggaactgctatctgggagccctgagaggtatacactgtgtaggaggagctgacaaatgaggtagtactaagaagacggtttgagcctagtcggaaattcaggtacgtctaggccatccagaaattgtgaacaagtgattcttctatctaacttggtacgttgaatgtccttgtgggcttaacactgatattcccgggcatccaaagtatccaataggaaggaagagctcgtgaaaccattctgtgaaagccagattttagccgatgtcctgtggttccagtgcctctgcttaaggaatctagccctttccacctctcatttggtgtttctttgggatcccatctagtctaggagtgtggggtgggaggaaagggcagccagaaactgaccttcgcacttatctctccttttgaagggggaagacgttttcatcccgctaatcttgggaataagaggaggaagcggctggcaactgaaggctggaacacttgctactggataatcgtagcttttaatgttgcgcctcttcaggttcttaagggattctccgttttggttccattttgtacacgtttggaaaataatctgcagaaacgagctgtgcttgcaaagacttcatagttcccaagaattaaaaaaaaaaaaaaaagaattccacttgatcaacttaattccttttctttatcttccctccctcacttcccttttctcccaccctcttttccaagctgtttcgctttgcaatatattactggtaatgagttgcaggataatgcagtcataacttgttttctcctaagtatttgagttcaaaactcctgtatctaaagaaatacggttggggtcattaataaagaaaatctttctatcttacatgagaatttgctgggtttctggactgcgagtccaaagtgagaagagaaggaagaaggatagacctatactacccttgaacctgcaaacctaagctgggaagccctagtttcaggagcccatcaggtttagatcctcaccttccctagaggagagaatggctggccagtgagctatatttaaactttttttttttccccctgagagacagggtcattacctcctgggctcgggtgatcatcccacctcagcctcccaaatagctgggattacaggcgcataccactatgcctggctaattttttttatttttagtagagatgaggtttcgccatcttgcccaggctggtctcaaactcctggactcaggcagtttgcttgcttcagcctctcaaagtgctgggattataggcatgagctatggaacccagcgagctattaatacaaacttacatgcttccttataaagcttggtccctgagactctgtggctgctcctgaagctccctggtcaatgacagagaaattaaagggttttctggtttatctttttattgtgaataatgtgtggaatttcccaaaatgtgttccttagtgtgtggtcctgcaggacattgatgagtattcaggtgtgggtctgatgcagactaattggccacagtttgtctttctcacatggcagcccaaaagactgctctcagggagagcagttgtcaaaaacagtacagagcctagtagagcagctgtcccccagcaggactctggtccctgaaatgaaattgcttcagaaagtttgcttggtgtaaggaattaagaggagaattttaggggcacctgcaacggtctgatggtcattctaatggtttctgccttccatctatggcagtgtttcatactggcttgggacccattaattgtggtgtgactatatcacaacaagcatttttgttttctaaacttttgattttgagataactgtagatttaaatacggttgtaagaaacaatacagagagatcctgtataccttccacttggttcccccaccatgctaacatcttgtataattgttgtataacatcacagccaagaaaaaatcattagtatagtccacacaccttcagatttggccggatttacgtgcactgtatgagatgtacatctgtgcatttttatcatatgtgtagctttgtgtgacgccagcatttttaagcaattgaatagtatcagagtgcattacatctgttaagggtaagtgttgatgtggaaacgtattttagttacatatgcacatcatgactggattgtagaaatgtctcttgactgtgagtcacagtggagaattttgaaaaccacaggtcgttcagtcatcagacttgattttatttcactaaaatgggctgctagagagctcaaggtactctgatttctaattggctgctcagggtgcccctgaccacttacttctggtacttggaaaacctagattaattggatatattgacagcaacatgtgcattctctaccccatgagttatttaaggggttttcaagtgtaattttgactagaagcagtttttgctctttttttgttttaattttagtttttagagacagggtctcactgtgttgccgaggctgtactcaagctcctgacctccggagtagctggaactacaggcacctgccactatgtccagctgagtttttgctttcttccttagtagaacataactaatgttggagctcactgtactcttttgccagtagtaggaatccgatttctggtaagtactgtaggtgacagaaccaaggttgcttagaagatatggagttaggagaaaaatgaaaaggcataaatattttctacagcagtaaatcctaaggaagtaactagttccaagacactgtcaacattaaaaatccatagtgcaggctgagcacagtggctcacacctgtaatcgtagcactttgtgaggatgaggaaggaggattgcttgatcccgggagtttgagaccagcctgggtaacggtgagactccttctccatctctataaaaataaatctggctgggcacggtggctcacgcctgtaatcccagcactttgggaggccaatgcgggtggatcacctgaggtcaggagtttgagaccagcctggccaacatggtgaaaccccatctctactaaaaaaaaattagctgggcatggtggcgggtgcctgtaatcccagctactcgggaggcggaggcaggagaatcacttgaacccaggaggcggaggttgcagtgagccaagatacgccattgcactccagcctggacaacaagagcgaaactctgtctcaaaaataaataaatgtgtagtgcagcctggacaacatggcaagaccctgcctctacaaaaaataaaaatcggctggatgtggtggtgcatgcctgtggtcccagctgctcaagaggctgaggcaggaggattgcttgagccctgaaggtcaaggctgcaatgagctgtgtcgtgccactccactccagcctgggcaacagagtgagaccctgtcccagaaaaaagaaaaatccatactggtgtaaacccgtatccagattgactcttctcttaacaaggacacacttggcgttagtatggatctagcctcaaagaccctcgtcacagatgaagcagcccatcgtgaccagtcgaggccttaggaccgcaggaggaatgtctcaggatgagggtcaagcacactgagggtgtgggctggaaaaaagggatctagttgtttcttcctagtctcaggaagccagtgccccaagggttcacacctggtaagtgtaggcgtccttggatatgggctgtagaggaacagtttgaatccaggtgccgccatctaatagctatgtgacagcaaatttcttaatctgagccctggtagcctcatttaaattggacataatgccacctacctgaggatttgtaaaaggaaaagagaataaatgtctgttacatcataaacattatgatgcctgtaattataatgtcaatgaatcttagttccctttatacactcaaggggatcagaagtgacaggctgttgccccagcaaagtcccacagaagccaacccttattcggtgcttggggtttcccaggctttccccaaggtagttggtattttggtattttcccctgcttaaatggcccttactgccgaggccaggcaggtaagaatctccatgtctggaaaaagtggaacctggggcaaactgcaagctaaggataaggagcttggcaggaaagacgctaagactctaacaggaagtggaagggtggacttggagggggaattgaaaccaagaaaaggaaatagccctagctgctgcctcagccttcttgaggggagctgatacttggagttggttgccgttaggttaccctcatttggagtagtactgatgagtgctcgaccgaaacctgggtctactctggtggcgattttgagttcaagcagtgctgccccctactgggggttgctaaaagcactgccatttcagtgggcggggggtgttggttctttttggtttttggttggttggttggttggttggttggttggttggttggttggttggttttgagacagagtctcactcttcgcccaggctggagtgcagtggtgcgatcttggctcactgcaacctccgcttcccgggttcaagcaattctcctgcctcagcctccggagtacctgggaccacaggcctgcaccgccacacccagctaattttgtatttttagtagaggcggggtttttccatattggccaggctggtctcgaactcctgacaggtgatccacccaccttggcctcccaaagtgctgggaaaacaggcgtgagccactgtgcccagcccaccctaaccttttttttttttttttttaacagatgagcgaattaaaaggttaggcgattttttttttttattattggagacttgctctgttgtgcagtggcgcaatctcggctcactgcaacctccccctcctggattcaagcgattctcctgcctcagcctcctgagcagctaggattacaggtgctcaccaccacacctggctaatttttgtatttttagtagagatggggtttcaccatgttggccagactgctctcaaactcctgacttcaggtgatctgtccacctcggcctcccaaagtgctgggattacaaggatgaaccaccgcgcctggctctgattttttttaatcatctttattttgaggcagggtctcactctgtcgcccaggctgcagtgcagtggcgccatgaaggctcacggcagcctcaacctcctggactcgagcaatcttcacacctcagcctcctgagtagctggaaccacacaacatgtaccactgtgcccagctaatctttattttttgtagagacggagtctcaccacgttgcccaggcctcagcctcttaaagtgctaggattacaggcattgagtgtgaagtgttgaacagcggctcagggaggccaaccagggtccagcaaaccccgtccctgctgcctccattggtccagagctggtacccgcagccagcatgacactcacccagtcccagacattgtgggtcaacagagagaaattcagatagctaagagaatggaagcggacaaaggaggcacaggaggattccgtgccagagtctgaattggtcacccccattcaggctctgcctgaggaaaggagaatggggtccgggcacagtcagctggatggagcgtctgaagacggcttgcaccagagccctccgtggctgaagggagaagctagggggtgagtcagccccagggcttgatggaacagacaggaactagatgatctaggaagggagaaatgaggctgagcaggagacagcccaggctccctggctgccactacctaatctgtcccccttcacacacatcccacacacagtgtttagacagagcagcagagaagaaacagacatcctggatcccacagggagcaggctggggctgggaacaggaggtctgtttattcctggaagtcacatatcagaagggtcccacacccacttctgtccaggccccaggctgaactctcccagagcctgtgacttctgcccgaccagatcccgtggttctgaggaccggccctggaaccctgcgtccttccgacccaccagctccctcgaggatggacttgaggctggatgctttcctcttcccactttttgtcccaacagaagtccctgatctccaggatccctgactggctgtgcagagctggcacagccacactccacgggcttccagcccttcaggcccagctctcccggagagcaccagagtccctttgctccatttacttgcgctcttcagccagcaagtgtttcctaatgtctcacccccagtcccagctttcctgctgcaatttccgcctgttccctcccatttcaggccttaagggagtgtggctgggcttctctcctccccctcactccaaagccgcacttgatacaaggtggaaatcaaagcaccacttctggcttcccagccttgaacttgcccttccctctcaatgtatctggtttcctcagcttccctgtgcagcaagagtgtcactcccctcttgcttttcccaagctccccatgcgcccctctcagcagatctgtcttagaggggccaggtgcagagaaaggcagaaatcctaataatgttcccagcgatcgctgcctgtcgcggagtgctgaagggccaagtgttgatctgagtcctcatcacacgggacttcatttagtctcacgataggtgagtacaactatgggccccatttgacagatgaggaaactaaggcaagggaactttagtcatttgcccaagttcactggcttttttaaaaaaggatccagacagctctgattccagcgccagctcatgcctcttcatcatgggggaggaaagagagggagccatttgttggggcaaacccccacccatcaagggccatgcactggggtatatgccgccatatgtgttatcctgtgatattccccaccacgaccttaattagaggtggtttttcttgttcccattttaacacaggcaaaaaccgaggcccagtagtaccttacccatggtcacatccccagagccatttgtccctcatagttcagaacttgactcagaaagcagttgagaaaagtgtggaatgaccccagattcaggaaggcaagtctggccttagaaactgaaaggcccatcaggtgatgggatgggggagtgaagatcctcaggccccaaacacctgccactgccaccatcacacacggaagtgtggagggagcctggtgtgctgtcagctggctggccagtccaggggcttaaatgtaaatgcatcagctgaggcgggaagtcgggaggggtaagtcaatcattattattcattaactggaatgcatttctcagattactccgagctggagtagggaaactgccacctaggtggcagggggagaggggaactgggtgggagggggaggcaggcctcccccagttgctgcagtttggaatatgtcaggtcccaccctcccagaggcggggccagggctgagtcctgccagcctcatttctctatccctctgagaacccagacgggcagagcctgggtaggagagcctggccccgctgtccccactgggtggagacaccatgcacttggtccacttgtgctcttcagccaggacaccagacatggtccaaaccgctgcagggctggctgcagcaactccctgacactcaggaaggcccaggctgggcaggcaatacctgctcccaacagccatgtgagtagctactcccccaaacccccaaaccccagatcctggagaggctactacacccagcccaagccaccagaccctcgggggtgtgcaggtggtacagcctgcaccctgctgggaaatcacccctgggggctgctccctgcctttgtcgctgttctagtggaggtgggttggggggaatcattccgattagggctgggagctccagctcaggccaggtttggggtaatggaccctgagtctcacgggacttaagagagttgatgatgccctgggaaagggaacagaaactgcaaggcctctagagaggaaaagacatcctgggtggagggcactggaagagattgagaaagagaaaacatgcttaggggaggggaaagggggcataaggccttggaggcccaggctcagggtgctgggggaacctgggaaggaaggggagcatcttccttcctctcagctcagggcagccatggggccctgatcccctgtcctggaggaggggagaggtatgaatcctttccttattgacttggatcctagcaacagcagctgctcccctgttgacagaagcaggagttcccacaggacccaggacccctccccctgtccccaggatgtggcagcagagccatgacactggaggactgagaccagggaatgacgggaaggacagggacagatgagagccacagagaagccagactctgcccagactcctcttccctctcctctgggctcagcctcaggcctgggggtgtgggggagtccctctccttgctgctggcatctccatgttcactgccacacgtgccctccagctgcttctctcctccctccagctcccaggaaggaccctgttgctagtgtggagcaaagacgagtcaagtttatgggctggaagtcctacccggaggctgctcactgagctgtgatggctacaaggacagatggggggaagggtgcagggtgcccgagacctggcccgctggagcctgtcacctaatggctggctggaagaccactacacaccagccagccctggtccattctctcatttagaggcctccccggtggaggcagggatacacaaaatgctttggggctggatgggcccgcctttcagtctaaacaagagacctcaacacagctgcccagaaaaggcagataccagaaatggataaagctggctgggtggggactgtccgaagggcagccagcagtgagctccggctggttgctaccacacaggacatatgtgttgccagacctgaattttcaatagaaaccaaagatagttttttatataaatgtttaattggcaattaattgaaaaattctgtgtatcagcgaacatgatacagcccacagcctgcgggtctgcgcccctggattaacatgctgccctgccaggaggacacgacctgcagccccatcctaactctggccaccccatcctgcaggcatgccggctgccgctccaggactcccctgtccccaggaccaagatgacgcccaacagcactggcgaggtgcccagccccattcccaagggggctttggggctctccctggccctggcaagcctcatcatcaccgcgaacctgctcctagccctgggcatcgcctgggaccgccgcctgcgcagcccacctgctggctgcttcttcctgagcctactgctggctgggctgctcacgggtctggcattgcccacattgccagggctgtggaaccagagtcgccggggttactggtcctgcctcctcgtctacttggctcccaacttctccttcctctccctgcttgccaacctcttgctggtgcacggggagcgctacatggcagtcctgaggccactccagccccctgggagcattcggctggccctgctcctcacctgggctggtcccctgctctttgccagtctgcccgctctggggtggaaccactggacccctggtgccaactgcagctcccaggctatcttcccagccccctacctgtacctcgaagtctatgggctcctgctgcccgccgtgggtgctgctgccttcctctctgtccgcgtgctggccactgcccaccgccagctgcaggacatctgccggctggagcgggcagtgtgccgcgatgagccctccgccctggcccgggcccttacctggaggcaggcaagggcacaggctggagccatgctgctcttcgggctgtgctgggggccctacgtggccacactgctcctctcagtcctggcctatgagcagcgcccgccactggggcctgggacactgttgtccctcctctccctaggaagtgccagtgcagcggcagtgcccgtagccatggggctgggcgatcagcgctacacagccccctggagggcagccgcccaaaggtgcctgcaggggctgtggggaagagcctcccgggacagtcccggccccagcattgcctaccacccaagcagccaaagcagtgtcgacctggacttgaactaaaggaagggcctctgctgactcctaccagagcatccgtccagctcagccatccagcctgtctctactgggccccacttctctggatcagagaccctgcctctgtttgaccccgcactgactgaataaagctcctctggccgtttatgattatctcattccatatctcagggcgaggcaggaggaaatggctcaacacaccaacaatagaaagaacctacagacatacgcgtggattaaggcagagtccgactccaggcaggcaagaagtgtcgtgcgcacagaccacccctggagatggggagctggcacatctcaacatccagccgattctgcgggacagccttgccctgacggggccctcgctagctcctcctagggtccagccatcacaaaatccacacagactctgtctctgggaagtatattttatttacatttttaaaatctttaactagtatctcttcctcctttccacccccagagacttgggaagggaaagaacgggaacctcaaacacctactccccacatacaaatacacaccccatggctcacaccagcaaatgaaagtgaaagagaaacaggtccacccctccctctgaagggcccaccaggtctgggcaag

SEQ ID NO: 595 - DNA, 1422 bp, Homo sapiens
gcagggccgctccctccgtccttgcctcccttacccaccctcaccggcccttgtttctccttcccctgggggcagccgccgccatgatcctgctggaggtgaacaaccgcatcatcgaggagacgctcgcgctcaagttcgagaacgcggccgccggaaacaaaccggaagcagtagaagtaacatttgcagatttcgatggggtcctctatcatatttcaaatcctaatggagacaaaacaaaagtgatggtcagtatttctttgaaattctacaaggaacttcaggcacatggtgctgatgagttattaaagagggtgtacgggagtttcttggtaaatccagaatcaggatacaatgtctctttgctatatgaccttgaaaatcttccggcatccaaggattccattgtgcatcaagctggcatgttgaagcgaaattgttttgcctctgtctttgaaaaatacttccaattccaagaagagggcaaggaaggagagaacagggcagttatccattatagggatgatgagaccatgtatgttgagtctaaaaaggacagagtcacagtagtcttcagcacagtgtttaaggatgacgacgatgtggtcattggaaaggtgttcatgcaggagttcaaagaaggacgcagagccagccacacagccccacaggtcctctttagccacagggaacctcctctggagctgaaagacacagacgccgctgtgggtgacaacattggctacattacctttgtgctgttccctcgtcacaccaatgccagtgctcgagacaacaccatcaacctgatccacacgttccgggactacctgcactaccacatcaagtgctctaaggcctatattcacacacgtatgcgggcgaaaacgtctgacttcctcaaggtgctgaaccgcgcacgcccagatgccgagaaaaaagaaatgaaaacaatcacggggaagacgttttcatcccgctaatcttgggaataagaggaggaagcggctggcaactgaaggctggaacacttgctactggataatcgtagcttttaatgttgcgcctcttcaggttcttaagggattctccgttttggttccattttgtacacgtttggaaaataatctgcagaaacgagctgtgcttgcaaagacttcatagttcccaagaattaaaaaaaaaaaaaaaagaattccacttgatcaacttaattccttttctttatcttccctccctcacttcccttttctcccaccctcttttccaagctgtttcgctttgcaatatattactggtaatgagttgcaggataatgcagtcataacttgttttctcctaagtatttgagttcaaaactcctgtatctaaagaaatacggttggggtcattaataaagaaaatctttctatcttacat

SEQ ID NO: 596 - protein, 298 aa, Homo sapiens
MILLEVNNRIIEETLALKFENAAAGNKPEAVEVTFADFDGVLYHNPNGDKTKVMVSISLKFYKELQAHGADELLKRVYGSFLVNPESGYNVSLLYDLENLPASKDSIVHQAGMLKRNCFASVFEKYFQFQEEGKEGENRAVIHYRDDETMYVESKKDRVTVVFSTVFKDDDDVVIGKVFMQEFKEGRRASHTAPQVLFSHREPPLELKDTDAAVGDNIGYITFVLFPRHTNASARDNTINLIHTFRDYLHYHIKCSKAYIHTRMRAKTSDFLKVLNRARPDAEKKEMKTITGKTFSSR

SEQ ID NO: 597 - DNA, 34603 bp, Mus musculus
  misc_feature (1)...(34603): n = A,T,C or G
gtgactgtatatgggatgaatccccaggtgggacagtctctgggtggcctttcctacagtctctactctacactttgtctccatatttgctcccgtgagtattttgttcccctttctaagaaggactgaagtacccacactttggtcttccttcttcttgagcttcatgtggtctgtgaattgtatcttgggtattcgaagctataaaaatagctcttgtttgtacctttcttaaccagaactataaaatacattctcttgtgactacctaagacgttgagaataatgttttccgttttttatatgcatatagtaaaatatgcatccataatatgcaaagtaacagaacttatgtacgcttagaggtttgagcttctacttttggtgtagaacctttcgggctcaaaaaaagaaaaatagagtgagaaaaggcaggggatatataataatacataataaagtgtaataaatgactatctttctccagtgccaaataatcactgtctttataactcaataattcccttaattcccttacacttgtggggttttgggggggagagggagttaagaaagggtttctctgtgtagccctcactgccctgaaacttgctccatagaccaaggtggcctcaaactcagtgaggtctgcctgcctctgcctcaaaggcacataccaccaccaccctgttccctgcgattcttatgattgcctagacaatgtggataaggcattggtcaaagagccagcactctgggtaagcactggatgaacttagtccagtgctctcctcaacagcctgtagtccgcacgttcctcttacccatgtataaagtttattctaggatcatgaaaagttgtgtagagatggatccaacattttaagcaatttcatatggaactatggaaaatgctgatttttccgcatgttccaacccattgctgcatttcagtggtttaaaaaaaaaaagacttaaaataaatatagcctaacaacttgagttcaaagactgtttacttagaagtgtgttgaaagtatattccttatgaaaaatgtggctgtttttgcttgcaggctattttatatatactgtagttacatttgttccctgtgtggctctatccatctatgtacagggtttagcagcttgaaagctgaagggaagtgtcacaggccggtttttacacccaaactgcttccttttgcctctctctgagttcagccaatatcaagcaagtggaagtagactaggaattcaacttttcatccctagcagactgggaggttcgagggcagtgtggttttaaaccttcctaatgctgtgaccctttactatagatcctcatgttgtggcgattcccccaaccatacaattattctcattgctactttgtaactgtactttggatgctgttacaaatcataatgtaaatatttttggagatagcactttgtctacagggtctccaaccacagattaagaaccactgttatacagcgaagagcagggagggaggcaaagagaaggaagacctgcccaccgtttgttatactttctagtcatctctgtagtcatcatcacttgtcatgtcaccagaaggcatggcaccgggagcatacagatgggatcataatgaaattagagacaggtaatcattccacctaagtgaacggaggtcctgtacccaaagataggcaagataggtgtgggtaggaattcagcgaggtcaccagacgctaccggggattgaattctccgtcagccacgtaggttaaagttttgcaaactgtcctagaccagaactcaggtttcactgagtttgccagcgaaatcgccaaagactaagaagaacgcttacttaaagaaacctgcaacagattctaggtgggctgtggcattttgcacatgctggggcgggggggggggggggttgttcaccatgcttgttgtcttgtgttacatggatgtaactgactccatggtgtttccgagatacttttgtgaagcttactcatggagatgtcaagctaacgacactggcactgctgggtatggtctgttattcttgcgattaactgaaactgaagttaaagcaaaacaaaacgaaacaaaaaaaataaaattaaagaaaaacagaaacagtgaaccaggaagatgagttccaggccagccttaactactaacgggattcaacaaattaaaaatcaacattttactaaacctactgctttagacaactagattcttctcacatgccctctggaaacagtctctgttagctttgataatgtgtctgttacacaagacacaggttctacctctctggccagactcagcaagagggttttgtttctcaggtgggttgagatgtgactgagcagaggctggggttgctggggcagctagctgccttctccaccccactgttggaggccttccctgctcagaccgcagcattaaaccatactgtctctcatctcaaaggcgtttctttctagcttcagaatgaatgctgggaagacttttgtcacaggcctggggactccggctcttgttttcaaagtggggcagacctatagagaccagaaacaatacaaaacaaactcaatgttatagcaatctcgctctggcctgcaatcatcccctacccttgtgatctctgtcaaatgaacttagaagaaatacagggcttcatgtagaagacagacagggattattacagaataatgagagtggctactgaggaaaactctcacaggtgactggctaatgagaccattacaatgacactatgtgacactatatagcttaagaggctatatactgtatcttctagtgtctggaagagttttcctgaggcatgttttccggtttatatgatcaactgacccttttgaattaactcttgctgtgtgttgggggtgggagggaatgttgtctctgtcctttgagagttctctactagaaagtaactttcggacacttagggcagtgcagagagtcatgtctccacccagtgccagagatgactcggattctatttttttatccagaaatcaaataacaggacagagggaaaaaagcaagaaaaggttttaaagctattaaaacagctgggcttttatcaggtggaaatgggtttccctctgtgggccctatgcatgcaccagaacttcctccctttcataaagcacttgaaagcttactagtatttccttccctcctttttacctatcagtctttcccacacgaatgtgcattgttagatacaggtgggcctggaagctggtgaagaagcaggggtcctgatgagagcaggctgtgtccttctgtaataagcctattttgggtaaaagtttcaaagactgtatccagtcctgagagactccattattttaaaagatgccttccatgggcacatgcatgtagtactcaaggaggccagaagagggtgtcagacaccctggaattggaattacagagggtcgtgagtcacttcatgaatgctgggaaccaaaatgggtcctgtacaatagtaatcacacataaatgcagagccccctctccgtgtcctgcaggggaaatctgtactgtacagatttcgactgcattttgaggatggagtataactgtacacctgtgtgaacataaatggcaccatctgtctggcactaccatgcacacagagtaagacagcttattcctgcaaacagagaagtcaccagtatgtaatctattgggagtgaattaagacactagggacatattgggataccagacctgaggacctcctgaacactctagaggcaggagagccaatctgggacgctacgtgggtgggttatgagcagctcctctcctcataatacacttggtagtctagtctagctccgttacctagatgtactaacccctacacccctctttgtacaatgcacccacgcacactttttaggaactcagctactccttttcttgaccccttagtggaaaaccacaataatcgtgacgactgagtgtcttccttcgtgtggtctgctgctccctgcgggctcgtttgatcttttctaccgttttacgtaaaattcccttgcaactttgcaatcagggctggcttttacttcagtactgaacaaaacactgagaacctggggacagccagtgcagacatcaccctggactactggtccacacaccagagaaaaatggccagccagcaggatttacagccttttatagaggcagccagcccacggtgcctaggcgagaattggagtgggtgaacaaaaaccctgatctcggcctattactcttctggggctcaaagtggcccaaatcaacttcaagcccaaaagacctcacctggacagtaggaagaggcagacactttttgctacagtggtccccatacctagcatctaattaccaaatataggcagaggactcccaactgtcgctggggctcagctgaatatctgataatgatgtagcctgaactgccacctgcacttgcttagctgtcctgtcccttcaggtagacctggcctacccttgccctgtacctttgccctcagacctgtagcactcccagccacagccacctctccagcctctcttgcaccaataaagaaaggaaagacatctcaaagaatagctttttattcatattacaacgaacttcacatatggcatgtatttgactacacttcaaagctggagggaataaaatacatctagctgtacaaattatacacagtaataaaccagtgtgtaagagaaacagaaaaaaaaagtgaaacaaatccctgtcacctgatgtcacctgaaaagcacttgtctagttgtagggcccaggaagagcactgagacactgctcccatattctgcgctcttcccctctggccctgtctcactgctttgctcagtagtgatgatgtcaccccttgctgcctagctggcaacgctggtttgctctgctctctttgggctctctttgggcttggagtagtcccagggccgcctgttctctgtgaatccgtacagcttcctgagggccacgcgcgcagcttcttcctctgcaacgagtacagtttccccaggtccctctgcaatcagctttctgtcactaggaagaaaacagacagggatctgaacgccgggaagacagcacatgagacagttatgccttccatcccatcccatccaaatacaacaacctacgaggcccagtttctccaaggcaaagcataaggtggcacaaggatcagaagttcacaaggattagagctgggtagtgtggcacactcctttgatgccagcatttgggaggcagatacaggcagatctctgagtttgaaacagttaggtctacatggcaagtccctcagattagaaaatcttcacacaaagattggaaaaatatttgcacaaaatttaatctacttatccaagatactcaatgtccacatctactgctttaattgatttctttctctctctctctctctttctctctctctctccctgtctctctgtctctccctccctctctgtctctctgtctctccctccctctctgtctctctgtctcaggaaagcattccaccactgagctacacctctaccccactttaatcttaaaacctgaaatccatttcagacaggtttatctctaacaaaactacaaggctctaaatgtgctgacactttggtagacagcaaagctcctgtcttccactctgaggctcggttgaagctgctgccaagaacagatgtattttttttatatatatagaaaatataaggtgagcttatatcccataaaactctatagcaaacagctgtccaaaagtgacttagcaggagctggagagaaggctcactgctcagagcactggctgtgcttgtaaggaacccaggtcggatttcccggatgaacctaacagctaataaacatctgtaactctagttccagaaccgacaccttcttctggcctccacatgtatgtgatgcagacatacatgcaggccaacactcacacacataaaattttcaaaagttactactagcaaaacacagataacttgtcttctattaacagcagaaagagaaaaccaaaaaacccaccaccatcaccaataacaaaaaccagataatgaccctatccaccctgccccactagggtctcacggtgtagttctgggaggcctctctatagacagtctggcctcaaactcacagagatctgcttgcctccacctcctgaacactagcctaagattaaagacatgtacctccccccgccccccacccagctcagagatacaattttaatactgttagaagtaacacttaaaaactggaagtctatcttctaggcttccaatcaaagttaaaaagtgaacaatgaatttttactaaccagtataagccaacaaaatataaaggcagagcagttgtgcttccagactgcctggtgagtcgagactcaggagctgagatgtttctcttcttcagctcctctacgagtagtcccatgggatttacgacggtccacatctcaaagagctctttccccgtcatttgtgtaattaaaaagtcctgtgcataaaataacatttaaattagaacaaagaatattatggccagaattcaaaatccatttttaccataagaactgataggcaatgaatggcaaatgtacatattaagcacatacagcctgaaaatccaaaatgctcggaatctgaaacttttcgcactaaagtgttgcttgcaaacgttgagattatagagtatgttcggtttctggctttggaattccagcttgagcttctccctcatgggctcacacgtgcaaggacagcacactctaccagagttatacctggatgtcctcataggctgttgttgtttgtacttttaataaaaatcatagaactttaaatgtttcaatttcaaacctaaagaaaatgatgtcaagcaacataacctatgaaaattattcagaagactgactcctgcctcagaattcaagactcaaatcattgaaattcaaagtagaagcatgtgtctgtctacttactaaggacatacccacaaggacacaccttccctccatggcagactgcatctttttaaagcctgagctagggctggagagatgactcggcagtttaagagcactgactgctcttctgaaggtcctgagttcaaatcccagcaactacatggtggctcacgccctctactgttgtgtctgaagacagcttcagtatacttagaaataataaataaatctttagcccggcctgagcaaggccgactggagtgagcagaggttctgaattcaaattcccagcagccaacgtgatggcccacagccatcagtacagctacagggtactcatgtacgttaaataaataagtaaataaataaatctttaagccctgagctaaaataaacatttttttccttaaaaattaatcaaaccaaaacaaaaaattttaaaaagctaagaataacgtaaacctccagcactcacaacccagcatttattatttgctttccagggtattggcaaaagaaaactgaaataaccaccacaaagttaccataaaaatagtttgggtttttctaagttttgggggtaggaacagtcagttgtaccaagatctagcaaaggaatgcatgagaaaaagaaacgtccccctctgcccacatgaagcctgtctgaacaagtgcatctaaccattacccaccctgatgaacagtgcagccctttcagggccactgctctgcagcagggctccaatgactgcgaagaaagtctgacgtaagacaggcagggggacaggaaattctgcactgagggtcaactgctccacagccaagttcctggccacgtgacagacaactgcctcaccagtgagaaagctaactagactctcagtgccttcggcgggcaagtctgggaattcgtcttcgagaaactgtgtgaggcaccgatgtgaaaaagacagcccttgttcaaacagttcctgattgtccttaagattcagaagagcagcttctttctctatgccaaggctctgacgtttcgcctcttcgcttttgatgtagcagctattgataaatgcagttttgagaaggtccaacgaaaaggtttcttgtaagcgagatccaaaggcttgtacctccgcatggtaatcccagtttggcttctctgagctgaggaggcagacagtaagagacggtaaggaggagggcatggtaccacgtaaggtgtgctctaactttactacataacggaatgaaatgaagtttgtttcttttattgtcggattctaacagtctaaatacaaaaagtaatacagataaccactggcagtccgtcattactgtctatatataagatgtgggggtttccctttggcttaactgccatattaaacagattgttcacatcacattaggctgctctgctagtttttaagttctctctttctgctctaacagtgacattatgctttctacctgagtatgaacaaattataactatatacattcaggctataaactgaaagtaattatgtttagtttatattatatttatttaaagctcagaaatgtccacttgaatttccagttacataagttaatatcagtcttatgagtgtgtcaaaatttcataaccacaggcgagggttgaggctgttctaattcagtggtagtggtaattgacacaatggcctggtgtgtgcaggtacactgtacagacacacaattccaagaattaaatgccttttcctagagaaaattaaatgtcttttcctagagaaaaataatgccacaataaaatcctttaaagttaaaagagagaagaaaaatagatctaagtttaaaatcataaatctaaatttgttttctatagttttttccaattttaactcattaatcttaaaatacccacctgtctattgggcaagggaatgtaaattaagacatgattctgagtcttgcttattaaaccacaataattgtgcaatagaaggtgtattctcactggtgttagtgtaaaggggattaatattctcctggagggcnnnnnnnnnnnnnnnnnnnntaaaggggattaatattctcctggagggcaatattaaaatagtaatcaaagtctcagctcaggaataactagctaactagcagacagttcctgcttctttggtgttctaacaatctaacggaagtcaaatgccaaagaaactgtaagaatgaagttgatcttcgtgtacttttgcccactaagacagagtatacagaaagtgcatgatgcaggatcgtatataagcatgatgcactttagaaaaatctgtggggtttttgttgaggttgttgttgttgttggctgttttgatttgtccgacaacccccccccccgcccccaggcaagaagattaattagataaaaaacctaaacttttatcctcactccaggcagtggacatgaaattctgttacacacagaattaaatgtttctaccctggtacgcaatatggtagaattgatgaccctattcctctttaaaatacccaattggcctgagattaggaagtgacaaaattgggtcaatcccaatcccaagcagttaccctctggtcgaccccatttgcttatattcagctagtgagattctgcaggggacagcccagcccctgtcgcccagttcctctgccccatgctgcctgcaggaacgtgcccaccgcagttgcctgcagcctggtgtcctcgccgccaccttagcctctccaccctcccgagacgcctaccgtcgcactggcggcggcgggcagcgtagcaggcgccatcgctccagctctttctggaagcggaaggcggcacggaatcccttcttcactccccgaaccggaggagccagcgtggggacggccggagccaataggcggcgagggccctgctgcagcaaccggaatacagcagaagccatggcaagaacaaggcaataggaggcggaaggaagacagccggagcggtgtagcccgaacgcggttccccggaaactggtgcagcagcagagagaggcctgaacgctggaggacaccgaagagggagcatggctagtgtactgcgcgtgcgcaagtgcttctttctgcccattctgtaagtatgggtgcagaaattgttgagaaacagttgcttgaccctatcagtctcgcttgtgtttatttctcattaaagcagaacaaaaactagtttttaaagttctaaataaaacacttaaattttcacaagaaaaacatttcttgtttacattcagtcttaaaagttgcagaccatcattccagccactactgaggaaatgttttcaaagtttaaggcttcacccaaccgtttccaaaaagtctcgcttacaaaagcacgttcagaagtgtgtttaacttaaccaaaattaaagtttgtattttaaaacaactactttcctcccaccctacccccctcccacaggggaagactcgggaccaggaggggtacataaaaatattaacagtgaaattacaagttttttttttaaaaatctgtatcaacgtttgaagctttcctaacaaaatatgagtaaaagacctgaagtcagaaatggaagtgtctctgcttcttttcccatagtttttatggtgaacatcttttccttgagaggcacctgtatggttcttatacaagggaaacaattcccctgcactcacccagttagactccagggtctttgtgcctgctttcacaaacagcttgttcattttttttctctttttttattattattatgtattttcttcaattacatttacaatgctatcccaaaagtccccccactccctccccccccccactcccctacccacccattcccattttttggccctggcgttcccctgtactggggcatataacgtttgcctgaccaatgggcctcgctttccagtgatggccgactaggtcatcttttgatgcatatgcagctagagtcaagagctctggggtactggttagttcataatgttgttcctccgatagggttgcagatctctttagctccttggatactttctctagctcctccattgggggccctgtgatccatccaatagttgactgtgagcatccacttctgtgtttgctaggccccggcctagtctcacaagggacagttatatcagggtcctttcagtaaacgcttgctagtgtatgcaatggtgtcatcgtttggaggctaattatgggatggatccctggatatggcagtctctagatggtccatccttttgtctcagctccaaactttgtctctgtaactccttccatgggtgattgtttccaattctaagaaggcgcaaagtgtccacactttggtcttcgttcttcttcagtttcatgtgttttaccaacttcttatgctcgttttctgcttctgtaactctgcctatttgcctgtcaaatcctccatttggaaaccccctactcttggacgacaaaaaaaccttatcttccctagatctaatgaggatctcctgaaccccacctgtattgagagacagccaatgtacacaaattttaaaggtttgttttaatcaattgctttctttaattaatttggccatcatgatttgagctaggggtctttttcctcacatctgtgggattaacagtaatctcaagcttaataaagttagtgaaagagatccacacacattgggagttccccttcatacctcagattaggaacaaaccacacccaaacacctgctttcacagagagatcctttattaagtgggggaggaaagttaaggtggctgctttctcactctggcagaaaaacagtagagaaagaggggggtcatgttaggatggatgatacattttgattgggtattttaattagatgagccaaagggggctaatgattgctggccttcaatacttacatagctggactctggcagtcagccttaggaggaggaagtgaccaagtaaaggaatagaccttggtggctagctttaggaatgtagtctaatggtttttagcaaggcagagggaatggaaaagaaggacaaggcctaccagagccaggctgccagagtcccttcagttaaagtgatgtctctatgtgctgaggctctcagaaacaacaactataagaataacctgtaatgtctcaagtagtttctcccacttttgacccacatgaagctcagaattaacatctgcattcagcttgctgtcattccactgatgtaatcacttaaaactagtatattcttggttgtcaacttgactacatatggtattaactaaaactcaaatgaccagacacattttcgagggtttttttttttttcttaattaaattacttgaaatgagaattttcgctgctaacccagagttttgaggtggggagatatactgttactctgtgcctcactttccgctggcagcctatataaaggacatggaggaaggaagcttgcttttcttgtctgcatgctctggctagtgctggcaagtcaatcttttcactagcattagagcccacttctctgggatttcagcatatactgaagaccagctgagacatccagccttgtggactgaacacctttggattcttggaccttctgtttgtaggcagcaattgttggattagctggaccacagcctaatggtccacaaggccattctaataaaccccccttctctattattgagagattcattctaagttttgttaagtttttttgttttgtttttgtttttcttgggagtttagctcatgataaggtacaacaattacttttgaacccatggtaaggcagtaactcaacatggcagaatgtataatggtacaaagcttgttcatttcatgcctaagacataagagagagttcatgaagagaaaagatcagaggccccaaaatctccttcaaaggcccatccccagtaattgacaatctcccactaggcctcaactaatgaaggtcccactatttttttagtagtgcaatggactactgaacaaatttttattacatatgctttagggggatattacaaatctcaacatagaaaacttgcatttttaaaattgtgtttcaattaacatagtaagaagacaaatacttgggcccatgatccagttccaaaaacttgaagagacaataatttttgttgtattttttctattaagaacttcactaagaacaatgatatgttgttcctaatttttaaaagatttatttatttatgtacttagtgtatttgggcgtttgtatgcacatttgcacaccagaacagggcatcggttcccaggagactacagttatagatgtttctgagtcatcatgtgtgtgctgggaattgaactcaggacctctggaatagcagccagtgctcttaaatgtggaaccatcccaatttgatcaaagctttataagggtcaacattctgatttctagttggtcactatcaggtgaacagtgggcagagtcagattgaggaagaagagagagtgaggtattgagagttcgctttaaccattgatgaatactttactctttgaagccgttatatcggggaccttgcttactcaatccttcagtgatggcgtgagcaattggtacacagtgcacaaaaagataaaaaatagcaaaggtggtgatatctgtagtaggcttgcctgcacactagcaattgtaaccatgtgaagtcggtccatctcttgtattagctaagaaatcagatccaaaatgttctttaaattctctcctgaaaaaaaaaaaactgcagatagatataattgccataaaataaaatgactagagttaaaactggttaaacgccagaataactaagtcttgataaggaattaaatctattctactgaagtcatatttgtaaagtctagttttagaaaagttgactctagatacaatagccaaagtgaaaaaccagtaaagctcactagtggctcccaacgatctggaactccatctctaggggatccaatgccctcttctggcctctacaggcacagatgtagtacacaatacacataaaatgataaaataaatacatctttagaaatctataaatgtcaatagaaatctgatgtcagcatcgttatactgcaaaagtcttgatgcggtagtagttatggagaccttctacatgaagtagctgtgttgagggaacccttatagaaatggggtgaccagtgccaggcaataccttgactaaaacctcaggagcagattctccgctcttacatcctaggcttttgaagggtatattttaagtcaccaagttttagagtaattttttttcacttggggtcatatcaactgggtgaaatggcaacataaatattccatgggtaagcatcagctggctataccccatgacgagtgccagctgcagtatacatgtcaggtccagctgtggttctgaatcctcagcttcctccccactcagggtgttcagatgtggctgcacactggcctagaaggataaagtggaatctggaacaggtgggggctgcaaaatccctatccagttgggagtgagtgcctaagtgctgggagcaggggacacaaggggacaggggactcaactgggggatggagtttctcctaggatcttagtgttacagctcttttagacaaaggccttctccaatggccttcaacaaaactgctctcttagacaatcttagcttttgtgcatacctttattcggagtgggcttgtattcatacactttatttggggtgaaccagagctatctatgacccttggagggcgagaagtatttttcttctgaataagtttcattggctagagtttaaagtactgagactatctcctttgcatagagaggcaatccaggaacccctgccgggcaggttcttatggggactaggggaggatgttgaatttgtaaatctgccaaggtctactggaccttccccagtgggtagtctctttatagtaagggaatttgttgatgacttacagtctgtagtccaactccccaacaatggtcagcagcagctgtgaatgaaagtccaagaatctagcagtttctcagtcccacaaggaaagcaggcaaagaagaggaaatcttccttcttccaatgtccttatgtaggtcttcagcagaaggtgtggcccagattaaaggtgtgtaccattcgcctggatctgggacttgctttgtcccagatgaccttgaactcagagacctccttgcctcctgggatacatagccactatgcctcaagatctccatgccaagatccagatcagaagcttgtatctcccagccccaagatcagggtcacaggtgagccctctgattctggattgtagttcatttcagatatagtcaagttgacaaccaagaatagccactacacccaggtagagtgggtgggggatgaaactcccaaacaaggtcaaagaagaggaagccatgttggtaaagggagtccatcatttgtgctgagctcagaggagctatctggtcctggtagatttcaaccttaattagcatggtttcctcacaattctgtatttcagaaatatattgaaaggtgcgttctagatggatacggatttgctaaatgtggaggaaaggagaaaataaacaaatattctatagtttgtacaaagtcacaagaacttttaagacttggcagagctgaaaggagggttccctagagtaaactaatagtggacattcaacagttgagagggcaagcaaatttattatgttcatagaagcaaatcagaaagcataatttctcactagctcagcatgattcagactgcaagtaccctcccactgggaatacacacaactttagggacctgtaggtgtggtataggggaattccctgggcttagagaaacataatggcactgggtaaagtttcttgagtaggaaatgaagacaatagagcaagtggctctgtttggaataatgagtgttgcctttgaagacgagatatgcctgtgcaggtgtgttatcagacttcagcctttccccagagataggcatttagtgaaaggccaaaggtaattatttatttcgttggaggttcaggctttaggcagacaaggaagtatcagagcagtttctcccaccacatattgctgtcctctcttgttttcttggtagggtagagtgtagtttgaaatgacagtccttggattattagtaaatttccctccacctggggaaatgagtcctgcctttcaagcccccatagttgcagattctaaatcctattattaggagcattcagggaacaaatttttacaatacagaaataggggatgctggttacagtttctccatctccactttcttttttctttctttcttttttttgatttatatacttattaatatgtaagtacactgtagctaacttcagacactccagaaaagggcgtcagatctcgttatggatggttgtgagccaccatatggttgctgggatttgaactcatgaccttttggaagagcagtcagtgctcttacctgttgagtcatctcaccagcccccatctccactttcttaatacttctttaaatggagcaggagttgcacttgagtaggaggagtgaccatggttggaacagaaatattaacaataaaccaaaccaagtgggtggggagataaaggtgaagatggcagacagtgttggctataatctcaaagctccctgctctatttgtaccgctttccattctgtgtaaataaacatgtagaagtgatttgagctttaggcccaaaacaggttatgaacaggcaaaatgggtagatggaatcaagtctcctttcctctctggggcagaccatgatactacggctttgggtgaggctaagacgagttagcccagggacaggatgacattaagcttctttttttcagttaatgccacagatttaacatgctcgaaacagataaaaaatgtattggtgtatatacaaatttcagggggctggagagatggctcagtggttaagagcactgactgctgttccagaggtcctgagtccagttcccagcaaccacatggtggctcacaaccataatgatatctgatgccctcttctggtgtgtctgaagatagagtactcacacacataaaataaatacatttaaaaaaatacaaattcagggagatgctgataatattaaacatttcctcttagctaaccagattacagccactaaaattataaacaaccccagtgctttatgcaaaggagctttcctttagatgctcatcatttatgtgaattgtattgtttatacatactttaatatttattgtattataattaaaacatatgctgtcatagttcagtggctttaacatatgtcttcatatgctattggtaattcactaatatcacagtcttggttttgtttcgtcttattttcatttatttactgtgtgtgtgtgtgtgtgtgtgtgtggtgttgttgttgttgttgttttttgagacagggtcttactctgtaattccagttggtctcaaaagctcatggtttccttctacatcagcttcccagtgctgttagtactgggtgagctaaaattcttatactatcacagtaataaacaagacccatatcagatggcttcatggaggaagttaataaaaggaactagtttcctttaattttgtttggggttcaaaagatgttagaagaaccgaaatgtctgtaggcaatcaaggggaaactaaaggtcaactacaatggggttggaaagagaggggagagaaatcatcacagcacaccaggaagcccagaatcttagccaagactgccttcccagagctagggcataagagggagctctattcagtgggaaggaaagactctgctccgtgagcagagaaagcaggtgaaatattttcgtttcccctttcttcccatcttctagtcttctgcagctgcttgccactgtacaaacataccaggcagcaaagtcacagagtctaggaagactgcagaactactccttctatggagaaagagtggacagcaaacaggagaataactcttagggaattataatcaagaagcaaagattcaaaggtaaaatgccaaggccaaaggaacatgctgacctactaggctaacccacttttaattcacccaaatgagcatgctgacctactaggctaacacacttttaattcattcatatgttaaatgtagaaaccctttaaaacaagcagtcactgatcattgcacacccatttgtaccactaccattataataaaactatcaagacattcccctcaagaaatctagtgtaagatgcaaagatttagacttagaaaaggtgatgataaaatgggtaattcaaggtgaagtccaagtttaggaacccgggttaaccatcatggtttctgttacataatctctgcttccaacatcagcagtacaagttaatactattttcactgtagaaatgcaatctctcaaaaggctatctagcctgccaaagatgtctctgtcacttaacagcagatctgattctaaagattgggctctttttgtctctgggataaagtgacagccgagagttcatggctggccatcaatggtagaacattattaagaggctatgctaactcaacagggcaactcaaaaatcaattccccttgtatatccggagtccatcagtttcaagacactgttaattatcgcctgctgccaccacttaaacccaattttttcaagtcttgcctctacatttccagaggcttccagccaacttacttcactaatctacatcatttgccacagctgatcgttcacttctaaaacaaaattatcttcctccatgggttccaaacaaaaccacactttgcctagttttctcctaattcactgagcctgctcctctgtcctctttctgggacccctatttcttgatcacctctaaatgatgatgtatacaacagtcttctttagttacaccaatggttctcagatcttcctaatgttacaaccctttcatacacttccttatgttttggtgaaccccaaccaaaaaatgattttgttgctacatcataactgtaatttttttactgttatgtattgtaatgtaaatgtctcagaagtaggatatattttatatgacccctatgaaagggttgtttgaccctcaaaaggatgggaaatcacaggttgacaaccattttatacgtatgtaaaatataattttttctggaattaattatattctcatagctgtaggaataagatatatacttcaaatttcatgcggatttgaacactgatttcatgaaatatggtataaaggggaggtaaaattaaaacttattttgtttacataaattgctttcaaggtgtagttaaaatgctttaagtgcacataaagagtatatctgagcaaatagaaaataataaatcagaaagctttgaacccatcatggtttgagtccaaccaaagaatcataaatgcgaaagaatcataaaaaaatggtaagacacagctcctaagtggccttgtttgatctgtccctctgggaagattctagttgtataattatgatcttgttggctccttctgattggctgagcttaagttttgttttcctgtgctacaggcatgagtcacatactacaagaagtgggtcaagttaagtttcatgcttacaaatcaagaagggttaaggtctctgaagaggtttaactggctttgtgacctccaatagtcttcaggcccaagtaaacactggtctcatgtaccccaacagagttcagactcactatgtcgctaaggatcattttgaacttctaatcctctacactgggattgcaagtgtgtgtgctaccatagccattttgtgaggttctgggcctcatacacactactcacaaactctcctacctcaacttcgtccaatgagcagaatctctgaacacctccttagagactaactgcctttcttacttattttgaaccaccacatcgtcctcagaacaggaataaactcggttcctcttgtttgttgccaaccactgagcacctctggccctgccggtgtctacaaggtgcatgccatctgtatgccttgaccttctgaggtgtcatctgtagggcaggaaatagtgccactcctccataccgtgtaaacagcctgcactcgcctacttctcgccttcgcctggagacccagtagacatcctcagacattttcctgctgaaaactgaagttcataccagtttcttcctcatcttctcatcttggaaagtggtaacaccagttttctagttacgtggccctagtttttaatcttgctttcatagtctgagtctgtcctattttgctgcctgttgctgtgataaacagcatgaacaaaacaacttgcagaagaaaggatttatctttcactttcacatcactgtctgtcattgagggaaatcatcaaaacaggaaagaccccagaggcacaaaccgaagcagaggccatggagaaatgctgcttactggattatcccacctggctagctcagctatatttcttgtaccatataggaccatggccaaggggtggcaccatccacattgggctgggtcctcctccatcaatcattattcacacacatacaccccaaaaccagagttgtctacagaccaatctgatagagacaattcctcaattgccattccctcttctcagatgactctggcttacatcaggttgacaaaatgctagccatcacagtgtctaagagatctcactagcttcaccttctagatatgtctatcatctgatgtctaatcatctttggactccttagaggctaccatcatttcccagttaacctatttcattaccttcccgggggacaaccttgctactcttctttcttttaaatttttgaagaagccgggcttggtagtggaggcctctaatccatcttttgagtcaggaggatcagtaagttgaaggctttcttgcagaatggagttggttccaggacaacctgggcaatgaatggagcatcagtctccaaacagaaagtaaaatggaagaagcagggggggataagtgtgagtgggagtgcacatgactgacatgtgtgaagccctggttccacatgtacacatgttgtccctcagtacaacataaaaccaatcatcaatcaattgctcaaattagaagtagctgtacatgattgcacacacctataattccagcactagggaatctgaggcaggaggactgtgagttcaaaaccatcttggctatatagcaagattttatcaaacccaaaatctttacaagttctctgggctgagcattatctattctgtctgtcttatctttctcactcacaccctgccctaccgtagcataacaggttgctgtcttcttaccacagatctctgctcacctctgggcaaaaacatattctatttccttgtctaggagagcattctgcccactttccatagggcttactgttagggtccaagaattgctgaaggaagacaccagactcagatagtatgcataggcaaagagtgtttattctacatgcaagggtcaaccgttcatcaaaatggcaaccactagaggggcttgtaagcccctttttatgtaaggctaggggaaatttccagaaggattaagtaacctctaatattatcagtagtggcaaagcagtgacattggtacaattctgattggttgctaagtttgtttcattataattggtgagaccatgaagaattttggaagccagctcagttccggccttgttatctcctccagctaagtgtcctaggaggtgactcagatccagacttatcctctgtaggtcggagtcatcactgactaaagatccattgtcagtggctccctctgaagagaacagtatgttactgggggaattgaaaatttttatttccaagagtatcaagttccttgaccttttcacattatttcttattgacttaaacatctttgcaaggaggcctggtcacctgcctcagattgtattcgctccaagcagagactgagctagaagttgccacccaggatattagagcctaatacctgtgtaggaaagggtgctagcaagattaggcaggaataattgttagtagtagagggctggtcaagccccactcaggccaagctctggagacagtgttgactagcaatgtgtcctgagggtcagtcggatctttgtgtttctgtcttgattagttgtaaaacacaaggtgccctacaaaagacatggctggcacctggggcctatcagcagctgaagcagaactggaagcacccaaaggctagagactgtggtcatatttcttcactgaaggtggctctctctggtcatctatgcgttctccataccagtagctcgaattctaactctgtctgagctacctctcgttcctctgttttcttcactacacccgaaattatctagtgtaggatatgatctaatttatttcacttattatttgttttcttcagtggaatgtcagccctttctctgtcctgtctgattctgttattactgtagctagaattctgtgttctgtgacacatgaacaaatgtctaagtaccccagatagggaatcaacaacactctagagatgccactaaaatccagtttggtgaaccagtgagttttatcagggttacttacaagagcatataggtaaggggttattttcaggagcagaaacgacccagaagacagttatatcaccccagagttcacttgagcacaggtgacagctcatgaaagctggaaatccggagcacaatgcacagcctgcaaacagcttcacaggttggagagtgtcatccttaggcagttgccatgtgctcttctaggacacacagccagcctctgcttcttctaggcaccaccttgcacggccttgcctgatctcgatttcttccaggcagccaaataagtctgggctcctcccacgcagctggaagctcagcttatctgtcagtctctcagtcatttttatacttctacatgcttagggaggggcctagactatccggtcagtttcaggaacttcctcaagctattttgagttgttcactttcggagcaccagaagcttccccgaggcagcaaagtttcaccttctcttcgaacaccctgtgagcaccctctgtcttactgagcttccctctcagatgaactcttttaacctcagagaaaactgctacccaacactcagaatcttgtactttctaagtaagaattttcccgctggattagttacctttttcactgctgtgaagcaaactaccagactaaaggcaactgaaggaaggaaggaagaggttattttagttcagagtttgtgggtcaagaacccgtggattgtgtgtactgcagtttgggtaatagtagtaacagcgtgtgtgggatgaagggctgaaaagggagctgtgtgaaattctgactgggtttctcgattatggcccttaaaacatactatcagtgtcgtccagccaaaacccatcaggaattcacctgcagttggacaagtgaggttggctgtgtgttagcagagggtgcctcgtggagagggagccatttggcatctgggtaacacagcaactgaaggataagggttggtgctgggtgatttggagaaggtttaaggaaaaagagcttttcttcggacaggaagttggcaggaaatggtggtgttgaggggcgggctgaggtaaatacaaaattgtatattctaactggaggagaaagctgtaactgggggtgggggtggggagatagtcacaatctcctgaacagaaaagtgtcccattgtggtagtttgcacaatgttaacaatcatagagtagaattatgcacaggctatgagcgtttggatgatggtaccagtcgcagctcccagggggagctgcttgtgagttattttttttttttccaccttttaacaagcctgaaattggggtgtgtctttcaaacaatggcttcttagggtggatgcggtgcgatactgtttgaggggcaggtgcttgtgttctgctactgctcagctcaatccgtttccgggagaattatttggctttttaaccttcaccaagatcctgttttttgttgttgtttttgtttttgtttttttagggttccttccggggtcacagaattataactgtgcggcttcaccaagtactacgggaatctgcggcagtgctcgcgagcttacggcggcgtggagcacacgcggctgggttgccctaagcaaccggcgcgtccccgcccggcggtcagctgatgggccgcccgcgggggaggccgcggctcgaacatggcggcggagatccactccaggcctcagagcagccgcccggtgctgctgagcaagatagagggccaccaggacgccgtcaccgccgcgctgctcatccccaaggaggacggcgtgatcaccgctagcgaggacaggtagagtctgggagcacgcgggggccggggcgtgaggtggtgacgaccacgaggcatggggatcgtggggtccgcgattctgcctcccttcttgttgtcaccccggacggagcggccaccctctctcccacgtccccgtagtccaccgagatcctggtgccgtcaggcggatctgtcttactcccctagtctgggacctatccccctccgcgcgcctttagtcttgggaaccccaacagccccagaccgtcccactgcgccctttcagtccggaatcaggttctccagcgccccctttatcacgggaccccgacccagacccacagactcttctgtccctggacccggtcctacagcgccataaaccactgaccaaccctccagatcccctccagtctcgggaccctgttccacaattcatctccagtctgagaccctgatccacagggctcatcccactcaggaccctgcctatagcacccacccattctgggaccctggacctcacacgacctctctagtccaaagtctttcttcaaaggtctttagttccggaccttcgccacacccttctaacctgggacctagtccctccatctccctatcctgacaaaacccctgttcccaccgctggcttgcagtccagggttcccagtgcacacccctgcgagtcggtactccagtcctagcttctagctagcctcttgcccccgttgccgtcctgtcccgtggtgctgctccaacctttgcctcctgtgtcttcctggctggggcttacctggtgctccagagttcctgtgttctcctgggaccgttccaagtcccagaggactagtagctaattaccttgggacctggtgcggctgtttattccttacatggaaccccacgggcattcacctcttccttctaatttgtttgggggctgaggttaggttgtatactttcctgtgcttctcctggcttcagggtcagttgtttgtttgtttgtttgaaccatagctgctagaactatctgaactcttactgaccaaagagttttcgatttttgtacaaaaagtgattagttaattctttaaaagtccagatgcacttattttaaaaggaaaatttatttacaaataagtaattttatttacaagtaatttagccccacaagtaggaaacagaaggtcatttaccacaagactaaaacaagccgttatcaatgttcctatgtagttctgccggtggtcacttgccacacttcagaaaagattcataagccgggcatggtggcgcacgcctttaatcccagcactcgggaggcagaggcaggtggatttctgagttcaaggccagcctggtctacagagtgagttccaggtcagctaggactacacagagaaaccctgtctcaaaaaaaaaaaaaaaaaaaaaaaaaaagaaaagattcatttggtccagtgacttcattttactcaagagggaaccggaaccacgaagtgttactagtttctctgcgtagtccaggagtactgaggaaacatggaacccaggacttgtcatttgccctctgactctcaaggcaatataaagtgattggagaaatagcccatgttttaaaattgtagcaagtttgaaaccttaaagggttaaaaaggaggttgagggaaacagtttacttgtcttaagcagtgataggcccaaactggaagagctttggccagcacatctacctttctctctaagcaggaggcagaggccagccttttgtgtgggtgaaaaggagggctgccctgtatgggaaagggaaacttgaagcccccagctcggggctgggcctttgtgtttggcttttgaaggagcttagttggggccttgttttcaggtagtgagcttgttttgttcctccggtttacctgtaactgagctggaggtggtgtgggactgctagtatccttgtctggctgtgtgaaacagaagtggtcaggggagagtgggaacctgagactggagagaagggaatgcaagccaggcaaatagcagaatagtggtatttgtgtgatgcaaacagaatttagacaacagcttattagagtcagccagctttatttggtaaaatatttgatttgtgactcatgcacgttgggtacattgccgaatatctgagatttcctgggtaggaacagtgctaataaagattttatggaaaatgattactaagctgcttcttgacacagatgttcaggggagtcttggaccagcccagtttttactcctgctcaactatcctgcaggatcccgtcagatgatagggccaccaaggaattgctactgaaggcttttgatgtgtattttgtaggtaccacaattcatggaatttaattcaagtgtgggctgtgagttttgttcttgatggtctctttctctaaactgtcctatttatcatacttgtatcattcattcattcattcattcaagaacaccatttctattgggtgtgaggtcctggggataaaagagcgatcaaaagccacagtgcctgtgctcatataacttctgatttattgctccttatagcccttgacctaaggaagcctgtatatatgcctgaggacttagaacactggtctccctcattcagccgaggctatgtcagacatgccctctcatttgtctccaccataactataaaggcagctggcattaaaacagctctttgtaagtgctgagcagtttaccagggacgtggctctgtgtgctcagctccccagatgctgggaagacagagaaagaagaaactgcctgggctggattcaagagctatctgcaggggtgcaggggccaggggtcctcatgcttgagggagtggcttatagaagggaaggtgcttgtaccacttccaggcagagggaaagaatggaagggaatatgaagtggtcaagaactctatatgttttaaagtgagcagagcggaaggtggtctgggaggccatgacagtaaagggctgaggcctgagaaagggcagtatctagttttggaaaagatttttggtatggctcctacttaggaactagattttgtttgcagtcagggacaaacttctaaaagcacaagcaaatgatatgatcagaatttatgttttagaaatggcattagttaacccttagaaagcccttctctaccagtgcaaaattggtctgtgtgtgtgtgtgtgtgtgtgtgtgtgtgtgtgtgtgtgtgtgtatgtgtatgtgttactatatccaaggtcatatcccgctcatgagaacagtgcggtccatttccctgatcgacagttccaaaactcaatacattttcaaagtaagaagtgcctgggtatggacattttctcgaagctcttttggtactaaaacttgcaactgtttatagtctttatttatcctgtgnnnnnnnnnnnnnnnnnnnnnnnnnnnnnnnnnnnnnnnnnnnnnnnnnnnnnnnnnnnnnnnnnnnnnnnnnnnnnnnnnnnnnnnnnnnnnnnnnnnnnnnnnnnnnnnnntagtaggatgagggtttgaacccagttctgccacttcaggcccaagttcatttagtcatagacctctgtgcattagaagaggccagtcgaggctgtatcagtcagcaggtgactgccagcagcaaatacaaagtgacaggactcactgttcgccgccatcagtgagccttccttcttactaatttcaggattaaaataaatggcttccacctttttaatgaaacttggcaacttgtgctttgatacttacaaaagaaccttttgtgtacctttatttgtgtgtgcaaataagctatgtatgagtgtggatgcctgcattggactgtgtgcctggggcaggcaggctgagcttcctcatcagctctttctttagtttgctttttactcaggatttcctgtagcccagtctggccttgaatatactgtgcagctacgggagatcttcaactcctaactcccctgcctctgtcccctaatgttaggactctgggcctgtgccaccacatttttatttatttatttatttaaaaaaattttttttttgaaacacggtctcactctgtagcccaggctaggccagaactgatgatcattctgcctcggcctcctgagtgctgggactgcagctatgcactaccacaaatctgcctaggaaaagtgactgagtatttacagcaggatccagctaatgttaatttattacagaagagctacagggaacgaggatgtcctgaaaggaaaagctaaagaatcaaggggcttcctgaagtcgaggcccacttttccagagtctctgccagcggctccaccgtcagcggtggtccctggggaacatttgaaattatgtgcagtcacttcggcagggcaaaagagactgctgccctgtgggcccatgccaggcccacagctcagcatccttcaatgtcagggcgactgctcaacatcctgtggtacacagaccccagtccctagtctctctgctctttaaaatgtggttcccaggcttgggtgtttattttatcagagatacttggagctcttggctcttggactccactcctggaggtgctgattttaaaagttcagttgggggcggggctgagagctggcatcactgtcacgttctgagggatgcttataaagctgcccgtgctttaagcaccagtgggcaagaaagggatgttgtacaccagtcactgcaggagagtcctctttatacctcttctttataataagtttatttttaaattgtgtgtgcactgtgagtgcaggtgcccttggagttcaggagaagatgctggacccatgggggccgagctcctatcctcagtatgtgctcttaattgcagtgccatctcccccttgacccctcccccccccctttttcagcattttggatatatttccctagagctattttccagatacctacaccctaacaagaactctgcctgtcactgtgacagaatgcctgaggtaggcaacttgaaagaagcaaaggctaatttggctcctggttgaggtcactcagccttgttggctgtggacctttggcagggcagtgtgccattgcagggaaagcatagcgtgacacaggaaaccgagaactctagtgcagactggaaggtaaagaagaagtcgcagggataggtctttctatgttcttcaagggtacatccccacctccgatggcttcctccaaccacatctgtgctaaggcttccagcaccccctagtagcatcgctagttagggactaaaccatttagggggacatttacgatataaaccatggagctggggaggtggcttagttggtaggagtattttctcagcaaacatgagggctagttcaaatctctagctgaacataaagaactggacatgattgtgtgtgcctgtaacccctggttgggggacacagacaggtaggtcttgcacactcacatgtatataacacacacacaaacacacacacacacacacacagcacaacacccaacctcctatcccatgaactcagactacactgagcagctgagtataatctaccctcggaagagtattaatctaccttccgaagagtattgtcaatgtggataataaggcttaattggggtccaaaactttcaaactaagaactatttcagctgtgagtcagtaaaacagtgctgtcttcctattgaggaaatgaaaggaagaccaccatcaaagcaagttcactggtaaatttaagaattggagtcaccggctggtgagatggctcagtgggtaagaacaccgactgctcttccgcaggtccggagttcaaatctcagcaaccacatggtggcccacaaccatctgtaacaagatctgatgccctcttctggagtgtctgaagacagctacagtgtacttacatataataaataaataaatcttaaaaaaaaaaaaaaaaagaattggagtcacagcaattacagtctggcctggctgagggctggaggtggggtggagtgacagaagccgagattgcctgcaggtcaaagctgagttgtctgtgaggcaggaggggcagattccccagacacagggctgtttttggactctgctagggctgcacaaaagtgcagacagtcagctggtgaaatgatagacgttttcaaagatgcatgctcttgctctaaagctttctggctgagtcacagctacagacctgctgtcttcattttgacaaggttagagatgagccttctttgtttactactgccatgggagcctgcaagaccagccttggtttctgcaattacagatctgtgttttcaggtgtaaaagaaaaaaggaaaaaaagaaaaagaaaaagtaaacaaaacaaaaaaacagaaccaactttaaaatattcttgtagcatttttctttctcaacttaccaactctcttaatgtatttgttgcctcttaaacactttaacttgttttttgagacagtctcatgtaacccaggctggcagttagctggagacctacgatcctctggcctctgcctgagttctggggttacgggcatatgccagcaagccaggtttctgcagggctgtggatcaaacccaggcatttgctcttgtctggcaagtacactattaactgagcaatgtctccaaaccgtttttgaacacttataaacatattaagatggttgataggaaattttctgtatttcctaatagtttatggggactgactctaaacccaggtttttaggtaaaatgcttagaagggaaatctgttgtaggtggaaggagaatccttatccagaggggttgtcattcaggactgaaaagtggatcccttagtctgttatttgacacgccgaagagtgaggcagcctgcagagacgctccggtgctggagctacgctcactggtagtcgttttcattttatagtgtaattaagaatggaggctccagcctttaatcccagcacttgggaggcagaggcaggcgaatttctgagtttgaggccagtctggtctacagagtgagttccaggacagccagggctatacagagaaaccctgtctcgaaacaaaacaaaacaaaacaaaacagaatggaggctccagtgatagactgccagagttggaatccaagtcatgtgaccatggacgtattactttagcccctttgcatcatggtctcctcagctgcaaagtgcagatgtggtgtctaccacttcgggtcttatgaagggctgacaggttgataacatgaggggaaagcacttctgagtctttcacaagggccagcagctggcagctcattcccatttaatttaatttcctttgtcatcagaagctaaaaacattcccgcctgtgtgtgtgtgtgtgtgtgtgtgtgtgtgtgtgtgtgtgtgtgtgtgtgtgtatggagggggatgcattccctgtgtgtatgaataaagtgaaatttttttcttgccctaaataaggcactagcatttgggagtcaattacactcttatagctgactttgagtcataccttgtctttatttccttatttggtcaaacacaagccttttcggtcatcttcatgtccctcgtagatctctcctactgtgtcagagaaccccaagatcaggactcactccttaccctcagccatggcacgttgtcacagcatatgtgtaatgcatgcagggaagacaggaagacaccagaccaagtttctgagagtcctctctggagtgacacaagatgtgctaaatgcctccactgttggattatgtggccccttatattcaatactgtttatcaggagttcagtagagacggtgtgccaagcatgcctagggctagttagatgcacaccctctccatatcatgtactacaattctggaatctggaaaatacaaacaagtgtccggcataaaccatatattttgtacaaacactaaacaagataagccactcttttgagcaagggaatgttgggaaccttctaaaattcaaggtcagagagagacaccatctgagggccagccttgagggcagggcagctgtctcaggcctgactctgccatgcgggcccgtccatcttcatctcaggcttgtcctcatctcttagccactgtttaaccttgatgactacagcagccgccatgagcagttccattgctctgagccctgggattccatccttgaatctgtcttgccaaactggtgtcctcaaaatggctttttacagtatcatttccctgcatatgatctttcattaacaatgtgagggaggcatcatgtctaaaataggacacagggaaccttataactattctgtacccaactttctttccgtgcctatttctcacttctcagtggttcttgccagtgtgttctctgtcccatccaggtctgacacctttcctcacctaatgctgtggctcatgtgcaccctcctcaagccactctccttccctgcttctcttttggttatggaataattcttccatctaccatttcagcctcctcctaactaacaggtactagctgctgctgtttgggttcgttcatctgatcctcccatgtggccagtacctccatgggtcatagcatcattgggttggttgacagagactcgcatcactgttttgtaggcccttccccctctgggtgactttccctgcaagctctcccgtaggagcaaagttgaattgttacaaatggtagtagtttctagaactcagctgtttctctttccttccctctgtaaaatgcacttagcaaattgttttgaaagtcaagagagcatgaatgtgtacttactcacttgatggagtgtttttttatacttcatgatgaaatattctctttctgttttttgagacagaagttctctcatgtatactaggctggcctcagactcacgatttaccccaagaatggtcttgagcttttagtttccttggctcagccactttggtattgggattacatgtgtgagccatcacaccccacatatatgttgcttcagctggaattcagggcttgctgcatgccaggtaagcatcctaccaattgatctcaaaaccatctttctgattactcatttttttcataaaccacacacagctttattcagaacagttccctttaagatcaaagtgaacttgcagctgacttttcttgtatagaccttggcccaaaggtcacctctcagggcaacttcctcttcttatctcatttttttttctttgtttgcctgcctgcaggatcgtcagtcacctgaaaaggcttctggggaaaccagggtgtctctnnnnnnnnnnnnnnnnnnnnnnnnnnnnnnnnnnnnnnnnnnnnnnnnnnnnnnnnnnnnnnnnnnnnnnnnnnnnnnnnnnnnnnnnnnnnnnnnnnnnnnnnnnnnnnnnnnnnnnnnnnnnnnnnnnnnnnnnnnnnnnnnnnnnnnnnnnnnnnnnnnnnnnnnnnnnnnnnnnnnnnnnnnnnnnnnnnnnnnnnnnnnnnnnnnnnnnnnnnnnnnnnnnnnnnnnnnnnnnnnnnnnnnnnnnnnnnnnnnnnnnnnnnnnnnnnnnnnnnnnncccatctttcgctgttcccacagatctggccccatgacatccttccctgttaacacgcttgtctttactcaccgagggctggcctcttccagtgcttaaacagtgtgaagcttaagcagtgtgtgcagtgctggtttgatcgaatcactaaacaaaccaataaaggaccagagagcagaacttaccactaactgtgcttacttgggttagtttattaatcataggtgtccagacagccctgccaggcagtgggagagctcaagttttttgttgtttgtttgtttgtttgtttttaaccctaagaaagagtattctgtggacccatgctgatcccagcctgtctagattatccctgacatctggagtttgaaattttccttagcacaggagtcacacaa

SEQ ID NO: 598 - DNA, 506 bp, Mus musculus
agcagaagccatggcaagaacaaggcaataggaggcggaaggaagacagccggagcggtgtagcccgaacgcggttccccggaaactggtgcagcagcagagagaggcctgaacgctggaggacaccgaagagggagcatggctagtgtactgcgcgtgcgcaagtgcttctttctgcccattctggttccttccggggtcacagaattataactgtgcggcttcaccaagtactacgggaatctgcggcagtgctcgcgagcttacggcggcgtggagcacacgcggctgggttgccctaagcaaccggcgcgtccccgcccggcggtcagctgatgggccgcccgcgggggaggccgcggctcgaacatggcggcggagatccactccaggcctcagagcagccgcccggtgctgctgagcaagatagagggccaccaggacgccgtcaccgccgcgctgctcatccccaaggaggacggcgtgatcaccgctagcgaggacag

SEQ ID NO: 599 - protein, 98 aa, Mus musculus
TLEDTEEGAWLVYCACASASFCPFWFLPGSQNYNCADSTTGICGSARELTAAWSTRGWVSNRRVPARRSADGPPAGEAAARTWRRRSTPGLRAAARCC

SEQ ID NO: 600 - DNA, 86764 bp, Homo sapiens
agaatgaaaattactatagttaaaactgttcaaaatacaaaattggagttactgataaatatcgatatagaatcagtcttcaccaaagttacatctgttcaacctagctttggaaaatttgacttgatggaaaatttgacttgatagatctaaaagctgcaacagaaaactcatgatagtaaaactgattagcaaaaagccttagtaaacctgagcaacaaataacatcttaggaaataaatgtggaaaaaaattcatgaaaatacattaagcaatagaaacatgaaaatacaattagaaataggatacttgtgctgtatagaaaattgatcaagaaatttaattggtttcatggagcttattccagaaaacattttctcaaaaaaaatgcatcaatgttagtataattctgttataaacactttaattcataattatggaagcaaaacttttttggtgtgttagcggccagcaagatggctctcaacaagccccacctcctggtacttacacccttgtacattcccctctcacattgtgctgggattagtctgtgtaaccaatagaccatggatgtttttatcaattctggggttaggtaataaaatacatcatagcttccattttggtcagataccttgtatttcttggattagtctcctgtcaggaagtcagctgctatgttatgatgttgcctaagaaactatgtggaaaggcttatgtgatgagtagctgaggcctcccgctaacagccatgtgaatgaatgagctgtcttagaattggatcctccactcccagtcagactttcagatgactgcctactggccagcgctttgactgcatcctcatgagagaccctcagccagaatcacccagctaaactgctcccaaactcctggccctcaggaaatgtatgagaaaataaacgtttgttgctttatgccactaagttctggagtaatttgttacatagcaacagataattaatacacatagggtcaaatcaattggatgaaaatggcaaaataaaaaatgctctatattcatgagacttaggggatggcctcagagtgctggttctagatggaagcgtggattttgctagatgcggaagagatggaaaggaggatcaacattccataacatgcacaaagtcgtcaggaatgatgatgacttagtaaattccgctccaaaaagtgaaagctgcctgaccctttaacccctgtaggtatagatcccctttcctgtcattaaggatacttttgagaaacaagttcaggaaatatcagagaagatgtcaagcacagggtttccactttacgtgttccttgatgtttctgctaaactgagcaatgtttggatctgagagagggatacctattacaggaaaaggaatattttaaagggttataaaaataagtaaaaacttgtaatgagagggaaagtagagatattagaccactatgactataatattgaaacttcacacttttgttttgctttttaaataaagcattgtaaaagtggtttgagatttttgcagtgtgattattatgctggcctgcagtgtaaaactggggtaaaatccagagaatgggttaaaagaactcctggcaaaactactgaacaaaattaccaagtcttctttcctctctgggatgaaactgtgtctccagatcttttggcaaggcccaaggagacgaagcatgtccaaaagcaataaatcactgtagacttctttttcagtctgtcccacagatttaacatgtactgaacagataaacattgattaggtatacattataacaactgctgaaagacactgaaaagttttataagtatttcctcttgattagagttaaccagattatagccattaaaagttataaatttaaaaatctgggctggcacggtggctcatgcctgtaatcccagcactttgggaggccgaggcaggcggatcatgaggtcaggagttcaagaccagcctggccaacatggtgaaacctcatctctactaaaaatacaaaaattatctggacatggtggtgtgtgcctgtagtcccagctactcgagaggctgagacaggagaattgcttgaatctgggagttagaggttgcagtgagccaagatagcaccactgcactcgagcctgggtgacagagccagactctgtctcggaaaaaaaaaaaaaaaagaatctggataatctggatactgcatacgaataagttattctttatgagactatcatttctatcattatatggtttatatctatttttgaaaatactcaattactgaaatattgccttataatttacatatgtaacgtcatattctcagtaagttatgtcctacaatcctcatgatggctttaaaagacaaaccttagacaaattaaatttaagagtttaactgatcaaacaatgatgaatcaggcagcccccagaaccagaacacgttcagaaagactccaggactgccacatggtcagataacatttatggacagtaaaaggaaaaagtatgtacagaaaatgcaaatgagggacagaaacagctggtgtctgctttatttgaatagggctgcctgtggttggatgagactcggctacttttacaagagcaggtgacagtcttttacacatcaagttaggttacatatcaagttaggttcactgtgtactgaaaaacctttaggccaaaattaaaatatgtacaacggaggctttagtccaaacttaatttaacagtactacaagttaagtatcagtattgccataattgtatcagtcagggtcttaccaagagaacaaaggcacaccagatggttccaagaaagaaaccgaatacaaagaactagttacaaaggtgttagaactgaaaggcctaagagattagggacagcaaaactggagagacaaagggaacagatggtaccagagcacaagagttaggtgagccgaatgggaccaagaacccacagagactgcctgttgagggctgcgacaaaagagggaagctatagccagtggggactggagccacagagaaggcatactccctaagcagaaagagtggaggagaaataccctggtttcttctttccttctaccttccaatgtcccaccactgcctccaccatacaaacttatcaggaagcaagtcggttagggagtctgggacatgtagtttgcagaagtcaaccccctgcaatacagaccaagcaaggtacacataaagtggatctgatagcaataggcaaacggctagcctgtgattacacttagagtatctgaaatgtgaagagtagaaagtcaaggccacattagaatgctgacccattaagctaacataccttacttcatccaaatgttaaaggtaagaacttattacaataaataatattggcatttatgattatcatcattatcattcttacagtacaactataaaatactccctcaaggaagtctagcatgacacaggtatttagagtcagaggaggtgatggcgggatagacatttagagatcaaggtccaaggtaaggggccagacacagtggctcaagcctgtaatcccagcactttgggaagctgaggtgggtggatcacttgaggtcaggagttcgagaccagcctggccaacatggtgaaaacccatctctactaaaaatacaaaaattagcctggcgttctggcatgtacctgtaatcccagcttttctggaggctgaggcaggagaatcatttgaaccagggaggcagacgtttcagtgagccgagaacgtgccactgcactccagcctggccacagagcgagactctgtctgaaaaaaaaaaaaaaaaaaactccaaggtaagaagcatgagttaacaataaatactacacattatctctgcttcctacatcaccattaaaaggtaacattattattctcactttagaaatgcaagaaatcaccacaaaatttcttatccatgtagccaaacaccacctgttcctcaaaagccattgatataaaaaaataaataatttctctttgtgtacctagagtctagcagttccaagaggctgtgctaaggctcttctatcaccacttgaactcacttcaatcaggttttacccctggcattcatggaaacttgcagtcatttcatttgcttgatctgcagcatttgacacagtcgatcacttcctcctccttagaacaccttcttcctttgtcttcaggacaatacacacaatatccattttcctcctacctcatagagtcagggggaaggggagcagggggaggttggctcctctccagtctttttttctggttcctccctttcttccagacctgttgatgtttccaaggcttctgtccttgtacctcttcgttatttacacacatacttcctcttggacttcatgtactcttatggctgtaaatgctatatgcatactctataaaatcattttgtgtttaagcactgattttacaaaatgtataaaggtgagttaaatttagagcttaatttgtttatgtaaattgccttcaaaatgtgttacagctgagatgttttccatgtgttttggaagaaatcacacagagtagctgcttttgcaataaactggatcaatgttacatctttgggtcagttcattgtcattgtgcaaggtgagagttatgtgggccttaccttattgttcacattgaaccattctgggtgatgattcatcttatttgtaagacaactcaatacgtaaggcctgttacaaaggtaaaccaggccaggcacagtggctctcacctgtaccagcattttgggaggctgagacagttggatcacttgagctcaggagttcaacaccagcctgggcaatagtagagaaccatgtctctactaaaaatacaaaaattagccaggcatggtggtgcttgcctactcccagctactgcagtggctgaggcaggagaattgcttgaacccaggaggcagaggctgcagtgagctgagattgtgccactgcccccaacctgggtgacagagtgagatcctgactgaaaaaaaaaaaaaaaaagagggctgggcacagtggttcacgcctgtaatcctcacaatttgggatgctgaagctgatggatcacttaaggccaggagttcgagaccagcctggccaacatggtaaaaccccacatctgctaaaaatacaaaaattaccagggcatgatcggcacacacctgtagttctagctactcaggaggctgaggcacaagagttgcttgaaccggggaggcagaggttgcagtgagctgagatcccagcagtacactgaagtctgggtgacagagtagtaacactctgtctcaagaaaaaaaaaaaaaaggtaaaccaaggcacaataatattttaaagggcttatttgtgtaaacagcaattcatgaatcggacagctctaaaccggaagtgtttccagggctctgttggagaagcataagggtcaaacttggaagagtgaatgcagaaataatgcaaagaaaataattgattacagttataaagtggctttatttggtctatcctgtgggaaaatccctagttatttaattgtaagtctgttgactgcttctgaatggttgagcttaagttttgtttttctttaatacaggcatttacaagaaatagttcaagttaagtttcacttatgtttgcaaatcaagcaaggttaagatcacttaggaggactgactggctttgtctcttcggggagtcttcagccctggtttccattttaatttagtttaacaggcgaatccctgattaaaatttttgaacaagtatttgtagagggcctttctctcacttaattttgaccatcctgctgccttaagatcaagcataaacttggctcctgaactctaccaccacccagtgagcatctgctgaccctgcagagggtggcacagcaggttccatcactgtgcatttaactcccagagtaatggctgcagtccagacctctctactattcagtagcatatacaaaactcctatattcaggctggtcatggtggctcacacctgtaatcccagcaccttgggaggctgaggcaggtggatcacctgaggtcaggagttcgaaaccagcctggccaacatggcaaaaccccgtctctactaaaaatacaaaaattagtcgggcatagtggcacacgcctgtaatcccggctgctggggaggctgagacaggataattgcttcaaccaaggaggtggaggttgcagtgagccaagatcgcaccactgcactccagcctgggcaacagagcaagactccatctcaaaaaaaaaacaaaaaaaacaaaaacaaacaaacaaacaaacaaaaacctcctgtattcaactgcctactcagccccttcacttggagacctaatactcgtctcaagcttcctatgtccaaaactgaattctccttcttcccttccaaacctgctcctcctacattttccacagatcagtaactggcagctccacttttccagttgctcagcccacaaatcttggtatcattcttaactatctcatattcaatattcaacaaatttcactggtactaccttctacataagtctagaatctgatgtcctctcaccaccagcacccttagaaagccacatcatttctcaattaccctgttaatttctcaaataacttcctgactgacaccttgcttctattcttgccttttaaaattgaaggcagattagcccaggcgcagtggctcatgcctataataatcccagcactttgggaggccaaagtgggtggatcacctggggttgggagttcgaaaccagcttggccaacatggtgacaccctctctactaaaagtacaaaaattagctgggtgtggtggcacgtgcctgtagtcccagctacttgagaagctgaggcacgagaatcacttgaacccaggaggtggaggttgcagtgagccaggatcgcaccactgcactccagcctggacgacagagtgagacttcgtctcgaaaaataaatgaatacaaatttaaaaacttgaaggcagattaaaccagccttctgttcgaaactctccaatggcttcctatctcatttgaagtaaaaaccaaagcccttatcaatggtctctgggctcaacatggtctgtctggtgacctgtctgtgctgtttttctctgagcactccctcactcactctgctccagcctcacggggtgcctggctgtctctacaaaacccctggcatgtgctcacctcaatgccttaacacgtgctcttttcttttccagaaaagtatttggcccacatttccacatggcttactccctcctctccttcttggctcaaaatgtaactttacaatgaggcttttacttgtctcaggttgcattctccagcagcagatacggtgatagaggttggctcagagggtgtttattaggaatcaatgcctgtgaagggagggggaggtaccaggattaggcaggagaagtcagctgcagtacacgccttacaaagccttgtccaatctaggagagagttctagagcaagtgttgctcatcggtctgtcttgatggtcaggcctttatcctcctatcttgttcagttactgaatgtgggcttccctgtgaagggaacaactgagacccagtggttctcagcagctggggcagtccctgaaggagctgaaggctagaggctctctgctgaccactgttcttccctgaaagcagatctgtgcagtgtattcctgaatctatcacaccatctatttaaaatcgcaacatcccctagagtccctatcacccttccctgctttattttctccatagcatttaatagcattgaacatcttctaatatattatataatttagtttactatctgtttccttcactgggatgtaagttctaacagcagagggatttttgtctctcttgagcactgctgcatttagaatggcacctggctcacagcaggcacttgggagatgttggttgattaaacaaagttgttcagtagcgtgtctagtcattacactgtacagcctcacaagaaccatgtcttattaatctcatcagcaacagcatatagtaagtgtgcgatatatgtctgttgaatataggaataaataaattcatgaatgtttgttaataacttcatcatgagaaagtattagtacaatggtggctcctgcccgtaatcccagcattttgggaggctgaggtgggcagatgatttgagggcagaagtttgagaccagcctggtcaacatggtgaaaccccgtctctagtaaaaatacaaaattagccaggcatggtggtaggtgcttgtaatcccagctactcgggaagctgagacaggtgaatccctttaacctgggaggcggaggttgctgtaaaccgagatcgcaccactgcactccagcctgggtgacggagtgagttcgtctcaaaaaactaaaacaaaacaaaacaaaaacaaaaagaaagttctagtaaatcactgtacatagaagtaccatgtgattcacatccataatttaaagtttttattagctaccttaaaaaaataagcaggtcatattaattttaatagtatctaactcaatatatccaaaatagtatcatttcaacatgtaatcattgtaacaattattgatgaactatattacatcttttttgttttgtgctaagtctataaaatcttgtagtattttgcacttgtactacatctcagtttggacaagccacatttcaagtgctctatagtcatgtggatagtacggttctaatgcaattctgcaattcaggtgtcagaataatatagtggggcagaagtttggagtcattgacttcctgagtccaaattttggctcttgaacttactggttgtcaatgacctctagccaaaaaccaccaggaacaaatggggttgattgcttgttggagggagaagacacaccattgggaatggtgaggtgtctgggtaaagggatgttcggacagttttattataggatttgtgtttgtgttaggtgacctgggagagcttaaggaagagaggctctcctgtggactggatgttgtcaggaaatgcgtataattctaaggttgcatatcttaataaatcttatctaaatggaggaagactagatagcggttaacattataattaataaagaaataagagtcactcatattagccaggatagggggatgtttggtaatttctgtggcttgtacatcgctcatattttggccgtgtttagatgtgattatggagtggcctcgtctgatgtttatgttccacaggaagcaaacacttcctagcaacaccaaagctcagctgatagtaccaggcagctcctggagatcaagggctgcttttctccctctcatagctgtgcaaccttaaggtagtgatcaaacttctctggttgttttctcatctctaaaatgggaatacaagagcatctatttcatctcttaaaattatcagtattaaatgagatgcaaagacactgagttaatgcctggtatatggtcaccactcagtgctatctattgtagttcaaagattctaagatgcactatattttttcacattttaacatttctgaaagtgtgtgcctttcaaacaatggcttcttcaaatggatgaaatgtagtattgtaatttctgaaatctctggtttgggggacaattccttgtcccctccaggtgctcaatttattcctgggtgaatggctttacttttaaaccttccttactttccccatttctccgcaggcgccccgtggcatcctctcccagccacagactttcagcttgcgcggcatccccaggcaatacgggcggtgcggcggcagcactcgggggcttacggcggcgcggcgcccaagaggccccagcagccgaagggaaaccggcgcgtcccccgcccgcccaggcgtcagctgatgggctgcctgccgaggaggccgcagcagtcgccgcgcgaacatggcggccgaaatccactccaggccgcagagcagccgcccggtgctgctgagcaagatcgaggggcaccaggacgccgtcacggccgcgctgctcatccccaaggaggacggcgtgatcacggccagcgaggacaggtagggcccgggcgcagccggggcggcccgaactccgcgacgacggggtgtgggggcggtggggtccgcggccccggtccttcctgcgtgagggggctcccccggcagcacggccccacccccactctgcgccccttagctccgccgggttcccggttccctcccgccggtcctccagcctcgacttgcacctttccagcctgggaccccggtctcgccgcgcccctccagcccggatcccctgtcccaccgcgcccctccagcccgggaactccgtctcaccgcgccgcccaagcccgggacccttgttccaacgtgtctttccagcccaggacccctgttccagtgcgccctaccgcgcccctcccagcccacctcgcccctcctgctcaggacccctgttccaatgctccccaacgcgcccctccagtccgggacccttgtcccactgcgcccgtccatcccgggagctccgtcccaccgcgcccctctagcccggatcttctgtcccactgcgcccctccagcccgggaactctgtcccaccgcgccactcaagcccgggaccccggttccagtgcgccccaacgcacctctccagcccaggacctctgtctcaccgcgcccctccagcgcgggaactctgtctcaccgcgctgctcaagccggggacccctgttccagtgcgcaccaacgcgcccctcccagcccaccgcgctcctccaaccagggaaccccgacctgcggtgtcgcactagcctgggaccttcgtcccggtctctctccctggcggggtttagcctggtactcggaaggtgtttcttggccctcccgggtcagttccaaatcgtctcctctggaagcgtggaggaccggcggctggtcactgcggaccctggtgcccggggcttgcttctttgcgaggaactccagccgccttcgctctcttcctccccctgtactcagggatttcacgccacgccaggcctctagatcagttatttttgccacggctgctagaatcacctgaactcttatttactaaataggtttttgtgaaagtgactcatttttaaaaatatttggatgcatttattttaaaaggaaatcttatttattaggaaaactaacattactcaccagacagagtaaactaataactaaaacatgttaattggcatgcacacagagtcctctcttgcactgtgacatcttgcattggacgcccaccatgcttttgggaaacactgattgggtccagttttctcatttctcctaagaggaagccgaggctggtggaggtgtagcttgctgctaagttacagagatactggtgaagccggaaatgcaatccagaactcccaccagctctgggcctgagtgattggattggaacagtatttatgattcgactttaaactttagcgtctttcaaatcctaaaggtttacaatgtcagtagctttccggtgggaatttgaaggaaatgactgatgtttattgaatgaaactgtgtttccttgatgcaatgagccgtcttaaatagggatagtccacaagtccaaaagctttctggaggatggaaggtactgctattctcttaaagctgaaggcgtggtctctagccttttgtaattataccttttgaagtgacattgaccctatcctgaatgggaagaaaaagcctgaagcccccaactcctgttggtcctttggattttgcttttgagtgagcttgtgcctttttcctcaattagataatgagctgattgtgagcaggcagtggcctctccctgctggttcacctgtagctgacttccaacaaggaggggagtgattggcaggacctggctgtgggtctgtaaagcagaaaggagtgagagagatcgagtgcatgagacctggggagaaggtggggacctgaaaaaggcaaggacagaataatgactttttttttttttttttaagatggaggcttgctctgtcacccaggctggatggagtgcagtggcatcatcttggctcactgcaacctccgcctcccaggttcaagcgattctcctgcctcaacctcctgagtagctgggactataggcgcctgccaccacgcccagctaatttttctatttttagtagagacagggtttcaccatgttggtcaggatggtctcgatctcctgacctcgtgatccacccgccttggcctcccgaagtgttgggattacaagcatgatccactggtgtccggccagaataatgactcttgcatgatgtgaacgtagatgcagacaacactctttaaaagttagcctttgggccgggcgcggtggctcacgcctgtaatcccagcactttgggaggccgaggcgggtggatcatgaggtcaggagatcgagaccatcctggctaacaaggtgaaaccccgtctctactaaaaatacaaaaaattagccgggcgcggtggcgggcgcctgtagtcccagctactggggaggctgaggcaggagaatggcgtgaacccgggaagcggagcttgcagtgagccgagattgcgccactgcagtccgcagtccggcctgggcgacagagcgagactccgtctcaaaaaaaaaaaaaaaaaaaaaaagcctttggccaggcgcagtggctcatgcctgtaatcccagcactttgggaggccgaggcgggtggataacaaggtcaggaggtcgagaccatcctggctaacacggcgaaacccagtctctactaaaaattcaaaaattagccaggtgtggtggcaggcgcctgtagtcccagctactcgggaagctgaggcaggagaatggcgtgaacctgggaggcagagcttgcagtgagccaagattgtgccactgcactccagcctgggcgatagagccagactccgtatcaaaaaaaaaaaaaagttagcagcctttattcggtcaaatattttattcatgaatcatgcgttttgggtaagttgctaaatatttgagattgctggtcaggagcagtgctgataaatgtttctggaaagtgattactaagctgctctgggactgaaacgttctgggggagcttgcatctgctcactttttcactcgtgcaccactgttattgcagagcccaggtagatgactggaccaggatggggttggcgtttgaggtttctgttgtgttcaggctcttgcaacttccttgaagggagaacaacctttttagtaggtgctacacttcatgagatgtaatgaaagcacatgggcgtgggttttttcttggtgttagccatggtggtttgttttcacattgtcataaatatgtgtcacgttcttcactcatttactcattcatttagaaaaagcttttttattgagtgtcaggccctgaggacacaacaggggtcaaaagccacactaccttggccaggcaaggtggctcacgcctgtaatcccagcacgtgtgtggggcccatgctagacctgtgggggagagacagctgacagctaagttgctctttcccaagggctgaacagtctagtgaagagatggcccctatgtattcagcatccagtgctgggaagacacaggaagaggaggctctttgggctggggccggggtttggggacagcctcctagagaaggtcgttgagctggtcttcatggatagaggagtggcatctagaaaggaaggagggatgcaccctcatcccaggcagaggaaggaggaaaggacaggagggaattgtaagagggaaagaaccatagctatttctaagtgaccagagcaaaaggtgggcagtgacaatagcaacagagaagactgagagctagaaggacccagtgtccggttttgttttgttttttaaattaaaaaaaaaaagtttttgggggccaagtgcggtggctcacgactgtaatcccagcactttgggaggccaaggcaggcagatcacctgaggttaggagttcaagaacagcctggccaacatggtgaaaccccatctctactataaatacaaaaattggctgggtgcagtggctcacacttgtaattccagcactttgggaggccgaggcgggtggatcacctgaggtcaggagtttgagaccagcctgaccaacatggagaaaccccatctctactaaaaatacaaaattagctgggcgtggtggcacatgcctgtaatcccagctacttgggaggctgaggcaggagaatcacttgaacccaggaagcagaggttgaagtgagccgagatcatgccattgccctccagcctgtgcaacaagagtgaaactctgtctcaaaaaacaaaaacaaaaaaacccacaaaaattagctgggcatggtggcacacacctgtggtcccagctacttgggaggctgagacaggagaatcacttgaacctgggaggcggaggttgcagtgagctgagatcacgccactgcactccagcctgggcaacaagaacaaaactttgtctcaaaaaaaaaaaaaagaaagaaataaggaatttggaccttattttgcaggcagtgtagaaccatcaaagagttcaaaacaagcaaatgatatgatcggaatttgtaatttagaaataacaatagctaacctgttgaaagtcccttttctctacgagtacagaattggaccttatgtgttattggatccaatcctcacacttcctccctataaggtaggtacagtcaccttctcttatcagcagttccaaaatttagtgcattctaaacgtcagaagtgtgtatgtgtgtgtgtaaattggacctgaaaactcgtttggtgctaaaatttggcctgaacaaatgagactgtttgtaatctttatttactgcatgcatcacagtggcatgatcttggctcactgcaacctctgcctcccaggttcaagcgattctcctgcttcagcctcccgagtagctgggattacaggcacccgccaccacacccagctaacttttgtatttttagtagagacagggtttcaccgtcttggccaggctggtcttgaactccaaacctcgtgatccacccgcctcggcctcccaaagtactgggattacaggcatgagccagtagctttttacatttaaagtagggtccagctgaagtgaattcattttacaaacgctaaaagcagtgagaactagctgagagcattttgagaagaaaagtgaaaggtatgaaggttttcctgaagttagtatccacttttgtaaaatctaggccagtggttctgggccaggggtggttttcccacccagggaacatttggtaatatctggagacatttttggttgtcatgatgtgggggaggtgatatggtttggctgtgtccccacccaaatcttatcttgaattgtagctcccataattcccatgtgttgtgggagggacccagtgggaaataattgaatcatgagggcagtttcccccatactgttctcgtggcagtgagtaagtctcaggagatctgatggttttacaagggaaaacccctttggcttggttcctatttctctcttgtctgctaccatgtaagacatgtcttctgccttccaccatgattgtgaggcttccctagccacatggaactgtgagtccattgaatctcattttgtttataattacctagtttctggcatgtgtttatcagcagtgtgaaaacggactaatactgtatgtaactaatactggcatctaggtagagggtagggatgcatctcagtatcctgttatgccccacaccaaaggattattgagccccaaatgtcaatagtgctgatattgagaaaccccagtccaggcttcatgtacttatctggcctctctagaacactggttccttaacttgaatgtgcatcagaatcacctgggggtcttgttgaaattcgggttgctggaccccacccccagagtttctgatttggaaagtcaggtggggcctgagagttggcatttctgccaagtttccaggtgacgttgatgctgatgctgctagtccagggaccacacttagaaccacggctctacaagaaaggagggttatttgtcactgtgcttgcctatgtacaaccaccaagaaagaatactgaatacagaaattagccaggcatggtagtgtgcacctgtaatcctagctacttgggagactgagacgggaggatcacttgagcccggtaggcggaggttgaggtgagctgagatcgtgccactgcactccagcctgggtgacagaccaaaaccctgtctcaaaaaaaaaaaaaaaaatactgcttacattttatcctctttttttttgtcaccttctgggatatatttacctggggtcattcacagatagccacctagttcactgtaatcaaactgcatatgacaaagctagatacggtcagcactccaaagagtattaagccaatgtggaatatcaaagcttaatgccattacacctgggagtcacaggtcattagtggtttgggtggtcagcttagggttctgcttagaaacctttatggattaatgtctcgtgaatggttaatagaaaatggtactacttcttgtatgaagtcattagtattttgctgaagtaataattaccttaagctctttaatttaaatttaagtttaagaatttgaactacagtggtgactttcctggtaggggaaacagaaaataagactctgctttcagagcggaactaaaatggtgagacagtaggaaccagtatgtttgctttttggacttttttgctgtggactgcaccaaaaatgtagacagtcagttgattgaatgatacaatttttaaaaggtaaaagctttataaagccttataaataagttaaggctataggcctactgtcttcacttttgagaaatagagtttgtggatggacgtacttatactgttgcattaggggctcgtaggccaagattggtttctgcaggaaactcaattttgtttgtcccaagttaaagataaatctcatgtgatttaaaatgttttgagatgttgcacttaggctgggaaagagtaaagattacagaaaaccaacttttagatgttttttagcattttccttttttaaaaattataccaaatatgtaatatatttgcttccacttagatatatctaagtttattaagatggtttggggaaaaatttgtgtatttaccaattgttcacatagaaacaatcttaaataaataacttgatttttaagtgttatgcctgggaggaaggctggcatagctggaattcattagttaatacagaaaaccaggatgttaactgctgtattttcattgtcatgcagagcctaaaagtagactttaatttgtgttataaaataaactgaagacttgagaaggcaggaagcctgggtggccaccccacacatttactcctgtattgttagggtgatccttcattgttacaatcattttctttttatagcatagttaagaacaaaggcttgggagccagaatgcctcagtttgaatcccagccctgtgatcttagacaagttatttaacctcactgtatcacagttttctcatgtgcaaaatggacatgagtccattttgtacctgctttacagagttttgtgaggattaggtgaattaaaccacgtggaacagtgcctagcacagagaaaacattatgcaagtgttagttgttattgttttcattcccatttattttccatttaattgctttaatcttaaagactgggacagagaaagcactatacaagtgttagctattattattttcatttccacttattttgcattttgttactttaatcttacgaaagagtaatatgtttctactttgtatgcatgtttgtgtgtgcacgtgaataagtgaaaataaaaaaatttttcctgtttgaataggacaataccatttgaggggttatttacaatcctaaattcttagaactgcctttgagtcatgccttttctttatttccatatttggttacttgcaggtcatgtcagtgattagtttcacttagacatctttcccctgctatatttgagatcctcaagatcgggttcattgattcactagaaagattgacacattatagtcatacgcatggctgtgatttatcatagccaaaagacgcaaaacaaaatcagcacatggggtgaaatccagaggaaaccagacacaaggcttccaagagtcctcttcctgtggagtcacaggacaggctaattcagattgaattaagacaacatgtgtgaaatattgtttatcagggaagctccttagagactttattcagtgttagaggctggtcatgtaggtgcccttggctaatgttccaaaattccaaactctcagaaggaaggtaggtggtcaacataaaccacatattttatacaggcatgaagcacagtgagccattcttaggagttagggaatggtgaggtcccctctggataaacaaggtcccagacacctgccaagggccaaccttgcaagcaagactttctaaggacagcagcagcaggcctgctgtgggaactcttttctgcccacctgcccataattaccctagtgtttgtcctcatcatcttttaaacctcatttttcaaagcctattaactggcttccctgagttccagcatactgtacttggatctgtcccactaatctcctatctttaactaggcttttattgtgtctttttcctgctcatgacctttcattagctccttatttaatcatgtctgtaaaaggactttgggggccgggcgcagtggctcatgcctgtaatcacagaacatggggaagctgaggcaggcagattgcttgaggccaggagttagagaccagcctggccaacatagtcaaactctgtctctactaaaaatacaaaaattagccaggtgtaggggctcatgcctgtaatcctcccaagaagctgggctgaggcacgagaattgcttgaacccaaggggcataggttgcagtgagccaagatcatgctgctgccctccagcttgggcaataaagcaagactctgtcccaaaaaaaaaaaaaaaaaaaaggactttgggaaccccataactgctccctgctaagctttatttccaccttctatctctcatttattatggttcttttgtgtccagtgaagtcagtgtgtgttctgtcccactcacacctggtacatttcccacctgggtgcctttgcctccctcaccaggaacctcacttgccctctctcctgtattcagaccctccttcatctcctagatccacttcaagttccacctcctccattgaataattcttcccagcccatcattctctgtcctttctgagcttccttcaacactcctagtatattactgatgatgcctagttaattacaatcaggtattagttcctgttgctttgtgtttattcatcttatcttcccacatagtctgtactccaccaggtactgcataactagctactggttgaatgatacagacttaaccatttctgcacagtagacatttcctctgctgtgtttagctttaataatctgctagttctttcctaagaagcagatggtaatataatgaatgatacttgtttctagaatttaggtattcatcttccctctctacaaagtatgctcagcaaatctttctgagagttgttaagacattattagcacatatatactgatttcatgatgtatttttgtcatacttcatggtgaaataatctctttattcatttttctttgtcaaccacatactactttgctcaaaacacttcccttcaaggtcaaggtgaatctacagcagatcaccgtcaaagaaattttaagtaaaaagtcgcctgtgtggattttttttctctttctcctcgtctttatacttgatttagacacttagcgtcagtagagtccagttgcaaaggttaatggggagatgagggtgcttatagtgcaaccagtattgatgggggcatttttggtttctaggttatggtttatagaaaatacagcctagtatggaattcctgggatacctgcagtgtcccatagaggcttcgtcctgctgtgctgttccctcgccgaaaccctcttctcagtttcatttgcttgattaactccttctcatccattaggacttcttgtgcgatgtttgccaaatcccccaacccactataccaccattcccactccctaacattaatctaccctttttctgtcctcatagctcttaccacattatattgttactgttactcatttacatatttgtctttactaattaaactttttctggctgggcgcaatggctcatgcctgtaaccccagcactttgggaggccgaggtaggtggatcacctgaggtcaggagttggagaccagcctggccaacatggtgaaaccccatctctactaaaaatacaaagattagccaggcatggtggcagatgcctgtaatcccagctactggggaggtcgaggcaggagaatcacttgaacccgggaggtggaggttgcactgggctgagatagtaccattgcactccagcttgggtgacaagagtgagactctgtctcaaaaattaaaaaaataaaataaaatttttctaacatgaaaaacagtgtaaagcttatagtaatgtctcaagtgttagtttgattgaatcagtcaacaaatctgttagggaaaaagaagcatggaacgtaatctaaaaataggccactgtctgggtgtggtggctcacgcctgtaatcccagcactttgcggggccgaggtgggtgaatcacttaaggtcaggagtttgacaccagcctggccaatgtggtgagacaccccatctctactaaaaatacaaaaattagctgggtgaggtgttgtgcgcctgtagtcccagctactcggtaggctaaggcaggagaattgcttgaacttgggaagcggaggttgcagtgagctgagattgtgccactttactccagcctgggtgacagagtgagattctctttctcaaaaaaaaaaaaaaaaaaaaaaagaaaagaaaaaggctgctattccttattagaaactgtgcttctttgtgattcctttaatttgtgttttaagacttctaggccatggatagggttcgagacttttttttttttttttttttgaggcagggtctcactctgtctcccaggctggtgtgcagtggcacaatcagagctcactgtagcctccacctcctgggctcaaacgatccttccacctcagcctcctgagtttgagaccacagacatgtaccaccactccttgctaatttttgatttttttttgtagagatgggggggggtctcactatgttgcccaggctggtcttgaactcgtgggctcaagtgatcctccagcctcagtctgccaagtagctgggataacagacgtgtgccaccatgcccagctaatttatttttattttttgtagagacagggtattggtatgttgccaggctggtctcaagcccctaggctcaagtgatcctcccacctcagcctcccagagtactgggattacaggtctgagccactgtgcctggccagactttgtaatgtaagaaagtgttgcctagatcctccatggactccagcctgtctagattattcctgctcttcagtgattagagtggtttctaggcttcttgatggcacaaggatcacaaaaaattatttttatgctaacagtgaaaagattacagcaagaatggtttggagtaaaaaaaaaaaaaaaaaatctgcaggttttcagccaatctggcttctggaagggtgatatttgtttaaagggggtgcaaatgctggggccacccagtggcttcttccctggataaaatctgcctgtggtgacatcagcagtctaattcttggtcacagacccttgaagctgtcctgtgggaggggatggaaatttctgtttttctcagccaatctaattctctacaaaatgaggctggtttctctgccttttaatttagagaataaattcaataacaatctaacattttctctccctgttaccaaaggagaaagacttctttttgcagcaagaatgaacagggcagaattccagagactcgttggaaggaaattgctatttattcgataaaaacagatggcaatgatagctatgttgttcgttccccctttcaggcaaacgtcttaatgttatagaaaccatctagcatgccagaagtacactttttttttttcctgtatcccctggaggtactgtcagactaggaaaaaatatcctttgctataggtgacagaaatgttcacagatttaccaagatttgaaatagtatcagcatccctaagaatgaccagaaaatcagattttctcagaattactgtttgcccagagtttaaaagaaatcaggaccttggacttaatttgtaacatatagtatgcccttttaaaatgattaattgaatgatctctttttatcagtttagaatttaaggatggttaaattgctttaatttagctgtttttggagtgattagggtgtgtttttgagaaagtttaaaaaagatattcagtttcagagatattgctgtttcaggccaggtagaacttggtgtgattttgtagaaataattatgtgctagttgagtctgcttattaaagtctggacatcaatttcaaggtaatcgacccggcgccatggctcatgcctgtaatcccagcactttgggaggccgaggtgggcgaatcacaatgtcaggagatcgagaccatcctggctaacacggtgaaaccctgtctctactaaaaatacaaaaaattagccaggcgtggtggcaggcacctgtagtcccagctgctcgggaggctgaggcaggagaatggcgtgaacccaggaggtggagcttgcagtgagccgagattgcaccactgcactccagcctgggtgacagagcgagacttcgtctcaaaaaaaaaaaaaaaaaaaaaaaggtactcatactggtaatacatactagaaaatatgtattgaacccaaatgtatacccttatggaattacaggtttaaaaatatttccagtgccctttctggtatggggaaaaaaaaaaaattagaccaattaggccaggtgcagtggctcacgcctgtaatcccagcactttgggaggccgaggtaggtggaccacttgaggccaggagttcaagaccagcctggccaacatggcgaaaccctgtctgtactaaaaatacaaaaattagctgggtgtggtagtgcatgcctgtagtcccagctacttgggaagctgaggcaagagaattgcttgaacccgggaggcagaggctgcagtgagctgagatcacgccactgcctccaacctgtgcaacagagcaagactctgtctcaaaaaaaaaaaaaaaaaagaaagaaaaatattaatgactcctgcaagatgcctcctggtttgtgagccagtgcttttcagaggaaaaaattgtaccttgaatctatctttgctcctactgtattgtggcttaaatagatgaggctttcaagacttagtgattcccttaagtgtattttaaccttatttttaattggctctttgatagagtttaacagtagaaataaaaaggaatccttctacttattatgatcatcaggcatatctttcagcagatcaaagattaatctccctggaataaacactttattcttaatcataactgtggttataactccacttttcatatatctactataggaaggtaaagcatacagaagttttatccttggtagacaggataacaaacattactatatgatatttaagagtaataactttattttgtacttcagtgactgcttccatttttaaggattcaaattagcacttttgcaaaatgggaatcctgtatttcaattaagagttgaaatggagttattcgtactatctactttaaaatccttggcattcaataaatgccaaatgctttttatttttaattttaacctcagattcctatggttcttaaaggtatattatttatttggaacagaaagcatggtgtcagttagctcgtgctacataacaaactacctcaaaactcagtggcttaaaacagcagggatttgtcattgttcatgagcctacaggtcacctaggcagtgcttctggcctcagccaggctcactcatgcttgtggccagccgtgggccagctctgctgagcttagctggactctttctcatgcctgggagtgagcttgctacaggcgggccgaggatggcttcagctaggacagttgagctctctcccatgtcgtcatttgtcctctggtaggctggcccctgtggttcatgtgacgtggcagtcttccaagacacagagtgagagcaaaccaggcctcaggacccagtactagcaccccattcagccacatttttttaaacatagcgtcactagccaacccatattcaaggctcagagaaataggcaaggcacggcagttcatgcctgggaggccaaggagggcggatcacgtgaggtcaggaattcgagaccagtatggtcaacatggtgaaaccccgtctctactaaaaatacacaaacttagcctggcgtggtggcgcatgcctgtaatcccagctactcaggaggctgaggcaagagaatcgcctgaacccggtaggcggaggttgcagtgagccgagatcaagccattgcactccagcctgggtgacagaaccggactccgtctcaaaacaaaaacaaggctcagagaaatgtattccatctcttgatggaaagagctgcaaaatggctgattgtaaggagcatggatgcagggaggagtaaagaattgagcacattgttttttaaattgtttcaccacaggcacttacatacaatatcgcacgctgtagctagattgggctaaatctagagctggaggtagtgagagactttgttggaatcaccactcctatttagcacagaggtcagtatttctttgaaccaagtgagctttgaagttagacctgaacttttccatactctgatttatttggggggaaaaagtaatttaatgcttcttgtttccttattgtttaggaattactgctttggaggataaagtgtggatttctaaaaagcctttaaaaaagttttacttacttaccacataaggctgctttgctttgaattgtttactttgataatgttttaaagatgaactttcaccatcttgataagagagaaagttggtcaaacaactaaatgaagtcagtctgatgcagtgctgctgttggtttgtgtgattttcagatcgtatctctccttgcttctgcttccttaagtgtaaaatgaaggcagaagcgcctgtcatccctgccatcaggatgtggcacctcgttctcaacagaccacaagcttttcatgaatctttatttttttaaattttttttagagaaggtggtagagggaagttcagggaggtgcagggaggtgggaaatcacagagttgcttttcacgaatcttgatgtgtgtctagaatgcaggaacattcttgtgtgtgccacaacagttcagtgttgtgagcttgcaggaagttaagcaggaggctgggcacggtggctcatgcctgtaatcccagcactttgggagatcgaggtgggcagatcacctgaggtcaggagttcaagaccagcctgaccaacatggtgaaaccccatctctactaaaaatacaaaaattagctgggcatggtggtgggtgcctgtaatcccagctactagcggggctgaggcaggagaatcgcttgaacccgggaggcggaggttgcagtgagaagagatctcaccatcacactccagcctgggcataaagagcaaaactctgtctcaaaaaaaaaaaaaaacaaaaaacagaaagaaaaaaaaaaagaagttagacagggacacatgctgatggagaggcacagtttattgccttataactttcaggcccaagagctaggtgccttttgggagcatcttctccttcactgtccttctgcatctgatgtcttggccagctctgctggctctgccttctgctcactgctcctttgggaacgatgctatcaaggcccctggctacccaggcacctctagtctggtgtccaggtccatgtctcctttttggtcctggggctctctcaccccccctgcaataacatctgcagacacgttgaatccactaatagactcactgggggcagatggtgctccagaatcccaagcctgacccaaggcacaagttcatttgaaggccagcataggccagggtgagtgtactcagcgatggacaactgaagcctctggcatctgccttatggaaaaaaggaaagttgtgccactatatttgaaattgcttcggattccaatgacttctgtttttgcttttggtggggacagcaatttaaaggatagactcttagggagtggaacattttaacttgtagaattttaggtagccactcttgaaaaccacataaaataagtccctaagtgcctcaaggctcattgcgcaaaatgtttaattgtggctcactggggaggtcggtcagcaggtatcctgctgttctgccagaactcagcctccgtatcttttctctggggttctcacaaggagcccaggacattgtctgccttggaggtgggttctcttctcctccccttctcctgtcctttatcagcctccctacctgccctgcccagcctgatgtagtgtggttgcataatttagttatatgatttgatacaagcataccttgttttattgtgcttctcagatactgcattttgtacacattgaaggtttatggcaaccatgcaccaggcaagtctatctgtgccatttttccaatacattgtgctcactttgtgtctctgtgtcacattttggtaattcttgcaatattccaaactttattattatatctgttgtggtggtctgtgttcagtgatctttgatattactattgtaattgttttggggagccacaaactgtgcccacataagatggcaaacttaaatgatagtgtgtgtgatctgaatactccatcaacgggctgttaccctatgtctgtctgtctctctctctctccctccctctttccctgcctccctcctttccccctttccccccaggcctccttattccctgagacacaacaatattgaaattaggccagtgaataaccctacaatagcctctgagtgttcaagtgaaaggaagagtcacatatctctaactttaaatcaaacgttagaaatgattaagcttagtgaggaaggcacatcaaaagctgagacaggccgaaagctaggccttttgcaccaaacagccaagttatggatgcaaatgaaaagttcttgaaggaaattaaaagtgctaatctagtgaaaacatgaataagaaagcaaaacagccttattgatgatatggagaaaggtttagtgatctgaatagaagatcagaccagccacaacattctcttaagccaaagcctcatccagagcaaggccttaatcctcttcgattttatgaagcctgagaggggtgaggaagctacagaagaaaagtttgaagctagcagaattggcacattaggtttaaggaaagaagcagtctacataacataaaagtgcaaagtgaagcatcaagtgctaatgtagaagctgcagcaagttatccagaagatctagtgaagataattggcaaaagcaattacattaaacaatagattttcaatgcagaccaaacaattcttttggaagaagatgccatctaggactttcatagctagtagagaagtcagtgcctggcttcaaagctccaaaagataggttgactttcttctgtggctaatgcagctggtaactttaagttgaagtcattgctcattaaccattccaaaaatcctaagaccattaagaattatgttaagtctactttgccatgtgctctataaatggaacaacaaagcctggatgacaacatgtgtgttgacagcatggtttactgaatattttaggcccattgttgagacctactgctcagaaaaaaagattcctttcaaaatattattgcttgttggccggaaacggtggctcacacctgtaataccagcactttgggaggccgaagcagacagatcacttgaggtcaggagttcgacaccagcctggccaacatggcaaaatcccggctctactaaaaatacaaaaattagccaggcacagttttgcacatctgtaagtccagctgctcaggaggctgaagcatgagaatcgcttgagcctaggaggcagaggtttcagtgagctgagattgtgccactgcactccagcctgggtgatggagtgagactctgtttcaaaaatacacatacacacacacacacacacacacacacacacatatttgtatatatatgaaatacacacacatatatatgtaaatgtatgtatatttgcttattgaaaatgcacctagtcacccaagaactctgaggatggagacataccatgagattaatgttgtttttcatgcctgctaatacaacactcattctgtagctcatggatcaaggagtaatttcaactttcaagttttgtgatttaaaaaatacacttttgctgggcatactggctcatgcttgtagtctcagcactttgggaggctgaggtggcaggatcacttgagtgaccagcctgggcagtagaatgagactttataaaagccttaaaaaagttagccaggtgtcgtggtgtgtgcctgtagtcccagttactggggaacctgaggtgggaggatccctggagcctgggaagcataggttgcagtgagccttgattgtgctactgcactccagcctgagtaaccgagggagaccctgtctcaaaagaaaatttttttataaggctataactgccgtagatagtgcctctgatagatctgggcaaagtaagttgaaaaccttctggaaaggattcaccattctagatgtcattgagaacattcatgattcttgagagaaggttaaactgtcagtattaataggaatttggaagaagttgattccagccctcatggataactttgaggggttcaagccttcagtaactgcagatgtggaaatagcaagagaattagaattagaagtggaacatatagatgtgactgaattgttgtaatctcatgataaaagctgaatgtttaaagagtttcatatggatgagcaaagaaagtggtttcttgagatggaatcaacatctaatgaagatgcggtgaacattgttgaaatggcagcaaaagatttagaatattccataaacttagttgatggaggagcagcaggcattaagaagattgactccacttttgaaagaagttctattatgggtaaaatgctattaaattgcattgcatgctacagagaagtcttttgggaaaggaagagtcaatcgatgcaacaaacttcttggttgtcttattttaagaagttgccacagccacgccaaccttcatcaacaaccatcctgatggatcagcagcatcaacattgaggcaggaccctccaccagcaaaatgattacccctcgctgaaggttcagatgatcgttaacttttttttagcaataaagtattttaaaactaaggtatgtacattgatttttagatgtaatgctactgcacacttaacagactatagtgtaactacagcttgcatatgggaaaccaaaaatttgtgtgactcactttgttgcgacatttgctttattgtgataaacctgcaatatctctgagggttataataatctctgtgttatgctttttttttttttttttaggaacaaaaaagctgaccatttcataaacattttattggggctccaggacttcataactatttgtaatgattatataagctattgaattactctatcattaacccatttcattctttaacatattttccccatttttactccttggataaagcttatatgaagttttttaaatttgtagttccttttttattctattaaatgatttctatagaaccaatttccaagcctggaattccttaatcaaagtttatcattagtgttgttgtcattattattgggcaggtgtatttgtttctctctatattggagcaaaattcttgccaaatagttagttctaatttacaattctgacaaagaagtatgagagccctagaagtggcattttgttattgttttgagttgttcctttgctttccctgcacagcagtacattttaaaaacattttaatctgaaacatttagcataaaaaagaatcaattttggaattttatttacttggaaaataaatgaatcatctacagtgctgaacaatgataaacaaataaagtcatggggccaggtgcggtggctcacacctgtaatcccagcactttgggaggccgaggcgggcagatcacttgaggccaggagtccaagaccagcctggccaacatggtgaaaccctgtctgtactaaaaatacaaaaattagccaggcatggtgacacatgcctgtaatctcagctgctggggaggctgaggcatgagaatcgcttgaacccaggaggcagaggttacagtgagctgaactcgtgccataccgctccagcctgggtgatggagtgagactctgtttaataaataaataaagtgatggtagtggcgtgcataccctgtaagttatatatgtataacatagtcatatatggagataccttttctcatctgttcctggaagatattgcagctatatgcaagtccttgcttctctaaaagtgcagaggagatagatggtagaagccctccacaggaatggtagcatggagaagtttggaaaagatttattaggctctgaaagcaatgacacatttcctttctaaggatcttttggaaaaatatcagactattgttttaaaacaacttaaaaatagagcttggaaaagaatgaacacgtttctaaggttgtggttttaaggaaagatttcttttccccagattgatgtggtcctggaatataaaagaaaatccagccattagaaaaatgggcagaataagcagcaggaaaaacataagatgagtttatgtgggtgtaaaattgtcaaaatattaaaggaaaacataagctgttttatcttagtggagagagtggtttagacattcaatctagacagaaaatattgtgatttatacaaaaaataataccatctgatcttgacacttcagtgattagacggtttatttatttattttttttttttgagacggagtcttgctctgtcgcccaggctggagtgcagtggcgcgatctcggctcactgcaagctccgcctcccaggttcatgccattctcttgcctcagcctcccgagtagctgggactacaggtgcccaccaccacgcctggctaattttttgtatttttagtagagacagggtttcaccatgttagccaggatggtctcgatctcctgaccttgtgatccacccgcctcggcctcccaaagtgctgggattacagtttattaatattatcctagactttgaaatagtttgctcctgtaaatattactaaactattattatgttgctttcaacttactgaatagtagattttacttccaatttactggatagtaattttttagtctggaatttgttgtattttaaataagtggcccaacttaaaactatttttacaaccatttggtaaatattctggacataatacaaaatacattcgtatattactcatagaaatgagcatctctgtttaataggttcttggggtacaatagtgttaagggttaaactttggtttgatttagtcttggaagaggaagggtctggtttgaaaagagatggaagggaatgccagatgaaggtgtaaagacaaaggtagcgccaaccatccaggccagttgcctcatttggaacctgattcccagacaaggagggccttctctcagctgggatgtgaccgacagttttcaaacaaaaagcctaagagatcgtggaagtcttgacaatttcctagtttattagatgggtcccagcataggtccaatttgtgccaaccaaactatatgctgatgtttgtcttccaaaggaagtaatactgtgttcaaaatgctggaatctaagtaggttcgattttgactttgggctagtttaagtattctaaagctgtatgaaattaacattagacttttccaggttaaatacttggttggaagagacaacctttaagattttctcctcccagcagagttctctgatttctgaattgtgcccttctttccatgagcactgagcaagagcacatgccactagatcctttgagccacctacacattcatgacctaagattgctggaattgatttgaagagttttagaacatgtcagcattctgttcttcctttgacctaagaaacccgaacacacaggcagctggcaggtttactttgtgattgtacgaatgaagcctgtgagtgtgaagtgctgctgcatgaatccttgatctccaggtgccttggcctttgtcactgtgtgtttggaggtggaggagaatccttgaacagagttaatgcttagcaggaagttggcctcttgtttatttcaatggttttggcttcatcccctatgtcggaatgtatccataaacattctgatttaagtaatatggaatatagtcaactcactgcaataatatattggctgttcatgtttaaggatcatcattggatagaagcatccactgattcttttagatgaagaagttatgctgaaatggcatccatcctgtgatctgctcagaaaacactgtctggagagaagagttcttggtagggtggggaggaaggtggatttagggcataacctgagctggacgtattcagggaatgtgaggatgacagctcactgggatgcaggctctgggatggggagtcataggcgctaaggttgtcagttgaatctggatttgagataaccactggtgggttctgagcataggggcactgtgatccaggcggctccttgggagaggtagctgggggtcagcacactggaggtggagcagagggaggcaagagtccactactcctgtgagagcaggcctactgctgtgtgaaagatgggacctagactgtggtagtcacgctgaggatgacaaatgaggatggcaaacgtgatatatgggaattatcgtttaattcttaaaaaacaaacagcgacaccattaacacacccaaaggaatgagcaacagccaggtgtggtggtacacgtctgtagtcccagctgctcaggaggctgaggtgggaggatcgcttgagcccaggagttcgaggcttcagcgagctgtgatcacaccactgcactccaccctgggtgacggagcgaaaccctgtcaaaaaaaaaaaaatctttaaaatatcctcaaatatctatacatatcttttagtttgaattaggatttaagtaagtctacctattttaattgctggatagacctctaaaatctctttaatcataggtttgttcttcctctctatttttttttcccttgcaaattatttgtagaagaaagtgagtcatttctctatggagtttcctgcagtcttgactttgctgaatggtgctcagtatgttcccatgtcctctgtatttcctatcaattggttggtggatctaaaggattaatccagttgtgttagccctaaggcttgtttctatccagttcacatacagaatagcattaatctcactgtggtgctaggtcatcttatttgtttggataaataaagaccaactactagttttacttttaatcatatataatagtgtgtacagatcttgggtagagttggacaggttctaacaaatacatatatccatggttaccaacacccggagccttgatgttcccctagaaagttttctctcttctgattgcattcagtcctcctcttaccccagaagcaaccactattctgattgtccctctggtctctgatcagtttgacttgtattttttgtcgttgttttacatcagtgattttaataaagaaaaacagacttctgagggaaggtaaccaggcccactggtccgcagtcctgtaaacaaagcgatgtgatgcttagctgaaggcgaggatagccactgtcgagagtaccttgtcttccgtacggttcagccactctctgatttaagcaaagataagccttgcccatctttttcccttgaggagggatgcatccactgaggcaagggccaaactccatttttcacgagatggttttactttgagctccattttctcctcaggatcgtgcaccagccatgcctggtgagactttgttttattgcaaggtttcctgcaaggtttcccacagccggcgtgttcacacacaacagggcactcttactcctgaaaggagactgtggctctggaggttacatacagctgtgcaggttccaccctgttcttctcttgggcagcaacccatgtctctttcttggatatgttttcatgtgctgctgaaaatcatctttccatgtaaatatttcctggcatactgcacatgttattaatatttccttcttaggagtttctctcatgtttcagaagttctatgttttggccaccagggaacatccctttgctatatactgtgcagccctcatgggcctggccgcgtgggcccagcctgctgggtgcagtgggtgcttcctgatccccctgggcacacttgagcagcgggtcactggtgtgctggccctggtggatgtccagctgctgatgcttcttaaagatcttctgacagccttcaaatcgcatacctgttgtctttgtgcattttcaagtttgcattgaaaatatttcttcaagtttgattttgtgttgaatttgtgcttatagccaccagccgcacagctttcctccagtgtgaatgaggacgtggggactcaggtgggagtccctgacgaaggtcttatcatgcccttcattgccacaaacaaatggtttctgccttgtgcttgcatgggtctggcttgcaggccttgtggtaattggcactgtgtcgaggagagtggatgaacctcctgggaagtgctatggtcagggtgtgtgagggtctccctggtctcaagggtcagggaggacgctgcctccaggacacgctgcctatgcatcccaccacccagttttacttgtctaggcctcaaaactggaaacatatggtatcaatatttaggcttcatgtattttaggttaagggtgtaagcatttattcagctcctacttatgccagaatctacattgccgttagaaatacaaaaatgggtcacgtgtggtggctcatgcctctaataccagcaccttggggtcctgaggtgggaggattgcttgagtctgggaagtcaaggctgctatgagccgtgattgcaccactgcactccagcctgggccacagagcaagactgcatcttaaaaaataataaataagggccgagtgtgatgattcacgcctgtaatcccagcactttggaaggccaaggcaggcggatcacttgaggtcaggagttagtgaccagcctggccaacataatgaaaccccatctctactaaaaatacaaaaattagctgggtgtggtggcgtgcgcctgtaatcccagctacttgagaggctgaggcaggagaatcccttgaacccgggaggtggcggttgcagtgagccgagatcgtgccactgcgctccaacctgggtgacagagtgagacactgtcccataaataaataatgaatgagaaacataaaagtgattgtcaccgagttggcagtggggacagtaaggtggttatgagtaactacagaggcagagcagggcgatcacctgtggaatccccggtgtcctagggatgcaggagatggagaggcctggcgcccagaggccctgagagtgcaggagcaggaactgcaggactcccattgtttctctgaggtcataaacctgaatattaaactttggctattttggtcgtttgtcattttcctgcatgggcacaggatttcctcatcaccctgtgcatgttccgatgaaagagggccccagagatgtggtgtggaatgatttcctctggggagcagaaggcagaattgccatgcccaagcccgagcctgctgtgtgctcctggtgtgcgtggcgcccctctccatgccactcctccatgagcctcttcccactcacagccaccgccttcctctcggcccagacggtcaaccaccaagtgcacataatttgtttttaccaagaaaagcagttaacagttctgttttctttctatgtcattttgtaatgaacatttgtttttctttttttttttttgagacagagtctcactctgtagcccaggctggagtgcagtggcgcaatctcggctcactgtaagctctgcctcccgggttcatgccattcttctgcctcaggctcctgagtagctgggactacaggtgcccgccaccatgcccagctaaatgttttttgtatttttagtagacacggggtttcatcatgttagccaagatggtcttgatctcctgacctcgtgatccgcctgcctcggcctcccagtgtgctgggattataggcgtgagccaccgcgcctggccgaacattttcatattattgaaatgatttgaaatcctgactcctaggtactgcataacttaccttatatcatcatactttatgtgactatatatagtatgtatatgtatatggtgtgcatatacaatatgctatatatgtatctgtatataatatatatgttatatactatatatgtatgtgtacatgtatgtatatatttgtccagtttgtccagttagttttataaggtcagttaggaaatagtgttaaacaaattttaaaaattaagttctcatggaacacaaaagataaaattactaaaacctactctattttttcttttcttttctccacagaaccatccgggtatggctgaaaagagacagtggtcaatactggcccagcatttaccacacaatggcctgtaagtagctgaactgttccatttgagagaaatgtctctaatgtttttgatgatttaaatttcaaaatgtcggctgagcatggtggctcacacctgtaatcccagcactttgagaggccaaggcgggtagatcacctggggtcaggagtttgagaccagactgaccaacatggtgaaagcccgtctctactaaaaatacaaaattagctgggcgtggtggtgtgcgcctgtaatcccagctacttgggaggctgaggcaggagaatcacttaaatctggagttggaggttgcaatgggtcaaggttgctccaccgcactccagcctgggcgacagagcgagactccatctcaaaaaaaaaataaataagtttcaaaatgtctgattaaatattgctgctagatttcaaaatgagtttcttagttgcctaatacctctgacaggctgtaataaactgcaggaaaagtccttttcttttgcaaaggaagttgagtctctggcttaactgaagcagacttgagcaaaactgaaaaaaaaataggaaaatgaacatgttctcctcagtttttctttgtcttaatttggccaacttacattagtagtaactttgtcctttatggtagccgatatcaacactaaaaaaggactgtgccctccatagcgtcatgactacctttgcccaaccttttcaccaacctctggacctattgagagacatggtccaaggtacaacacattctaaatagagaattttctcagcagtcaggtatgttctataaataaatctggacgatgaatcttctgctttgagactttaaagcagccctggaggccgggcttggtggctcatgcccgtaatcccagcactttgcgaggccaaggcgggcggatcacctgaggttgggagttcgagaccagcctggccaacatgatgaaaccccatctctactaaaaatacaaaattagccgggcatggtggcacatgcctgtaatcccagctactcaagaggctgaggcaggagaatcgcttcaatccgggaagcagaggttgtggtgagctgaaatcacaccactgcactccagcctgggcaacaagagcgaaactccgtatcaaaaaaaaaaaaaaaagcagccctgggatataccaacataagatgacacataaactttagcccttcatgtgaatctaagcagcgtcaccatccttgtctcccacttcctttcttcaacctttcctgaaaagaaagccctgtagagaatgcctggatgtcatcaaagttcaaatggggagtcaactccgttatgccaagtagccagacaggaggcctctgtagctgctaatttccttgaggtttcgtccttaatcagtgattttcttcagttaagggttttaatacacagaggacaaccccctaagaaaagaaaaaaggctttagtgcatgcgtgatgatttgttactgaagaccattatcaagttttccaaagaagagctcttgacagtggttgcagatgctgctgatgctgtccactgctttcttaagaggtattccagggctgtggagtttgttataaagacagagcagccagttattcagcaaactgcatctcatcagcttgagtcatcctttcaggcacctctctcctctggtagcactttctcctttatacctatttcattgtgcatgcagcatttagattctgtaataattttcacaaaaagttagtagtttattaggattttttatttttctgccttctaccaacagcctgggcaggctggccagcttctttgtcttggtagtcattcagtgaaattgagagagaccttttggaaccctggtataaagataactattatgaaaggaagagtaaaggcttataatacataagacatttgaagacttcttgaaaacctgatcataatttattgtgccaagcagtggcatctcttctgttacccatgtctgcatgtactgtggatgcgtaaccttggttctcacactaaattctcaccttgagatatgaagtaaccaatgtcttagtgaaggtgcttatggagcctgtctgataaatttactttggaaattttggcagcagggcagagataggtgggacatcctgggtctctgagcccacctgttacccaacctgccccagtctcccaaaaagacttctgttaggctaactccttactttccagtggcccagagatagatctgagagttggaagtagcaacagcctgaggaacgcgtatcagtgctgggaaatgttttgtcatcattggggaaaattttgttaatactatggctcttatgcttcccactcttcccttcctccatcattagcattttggtcatagcttaatctccctgagtccttaaccttgaaattcatgctcattagaatagagacagagactagagggattttgtcccatatttggttcagttactccttgacttgcatttcccccaaatagtacaactttgtaattaatttctctcccaggacaccaaaacctagcagtagaaatgtgtgtgttctcttggctgttagatctcgggcaagtggcagtggatctctctgtcttcagccttttctaacttggcttaactgtcccctcctgaaggagcttctagctcaagaaggaggaacttgaaagaacagacacagcttcgccgtgggtggtcgacacctacatgtttgtatctgcacatgttcagtgtgttacttctagatgcttctttattgcttctatttggacctgtatctgctgataaaactgcagatacaccacaagaagaaaacagagtgaatgcattgtgagaaataactgcatgtctgttttagaatgactttttatttcaaaattaaatttaggatacaaaaagaaggatgccatgttagttctaaaagctatccgcagattatccaatttaggatgtcttagtggttatatccaccaatttaaactttttcctgtgacttgacagagtgatcaataagccaagccttagtatattgctatatgcagtccaattgtgttctataacattacctcacataaaaaaaaaactttcagaatctgctttagctgaagaaaaatggtaactcttggcttctatctttactgtgtacttcatgcctttttttggtaatataattttatgaaaccatcacaacagctatgcaaggcagataatatttttaccattttgtgaataagcaagctgaggttagaagggttgattgcttgtcattggaattccaatccatgctcatctatgactccaaacctatgcttctcaccacagtgatgggtaggtctacaaactttttatgcaaagggccagacagtaaacatttggactatgtgggccaatctctgtggcacttactcaattctgccttcctatcatgcaaggagtcataaacaagacataaatattgcatgtgagcaatcataagttatatataaatgtagcatgcaagcaatcataaatgaaagggtttatgttccaaaggaaaaaaaaactatttattaacaaaacatgcagtcagctgaatttggccttctggtgtgatccaaagttttaaacatttgattttggactgcagtgatggctttttaaaagttcattgacttggctgggcatggtggctcatgcctgtattcccagcactttgggaagccgaggcaggctgatcatttgaggtcaggagttcgagactggcctggccaacatggtgaaaccctgtctatactaaaaatacaagaattagcctggtgtggtggtggctgcctgtaatcctagctactcaggaggctgagacaggagaatcgcttgaacccaagtggcggaggttgcagtgagctgagattgcgccactgcactccagcctgggtgacagcaagacaccatctcaaaaaaaaaaaaaaaaaaaaaaagctaactgatttgaaagatgattcctattttgctttatatccaacccctccccttctacattaaatttatattgcttatctcagttagaaacctcctttctagggagagagccaggatattactatataatacaaaacaaactaaggaagccttttttttctttttgaaatgttatagttgtctagcttcataaaattacccagcactttgtaatttttacacaaaagagggattttacatatttatgttgtttgttatagggttgggcattaaaaaaattgaaaagaagcttaaaactaatgcatttagtgccagctagaaagcaagcaaaaatgatgacagtgaatctctgaacgcatcaaagcatgatttgatttgtcaaagataagtgtatgcatggtttattaaagaacattttgattgtataaagatatgtatatatatctttgtggtcataatacttgatcgttcttttaatctcaaacatcactgtgtcagataagggtatacaggctcatagtcaattctaattgttttgtgcacaatttcagtacgtacctttcagagccaactacatagttcttggatgcaactgaaacagtctctatggtctgatcatgcagttagctatgtttttgctttggggtacgatccagtattatagtttacttccttcctttggtgaggatatcaccctactagagagagagaactttatattcaaatggtgacttcatttaaaagacgttttttcttttatctttttttttttttttttttgagatggagtttcactgtgttgtccaggctgatctcaactcctggcctcaagcaatcctcctgccttggcctcccaaagtgctgagattacaggcatgagccaccctacccacccgtcttttatgagaagttttattccaaagtgaattcaaatttgtttgttttgttttgtttttccctagcatgcatttccttgttttggttcttccattgctaattaaaattccttaggctgaaacaaacccacattttttttccaaatgttccaatttataaatcactttaattctaatttttggtaaaagacaatttagaatttctcctttctgaaactcattctctagcctgtgatttctggaagagggtagggtagaacatggaaggaggacaaggaaacctgtctgcacttcacaactcacatatgccatatatctgcacctcacatatgctcacttatgccatagaatgggaattctggtgctgggaacccatctttgcacagctactctttgacatttgatgggaagggtggcaggggcgggatgacctcctgagcttttgggcagcaggtcacacactacaagcactggtccccaaggcttgccagactacaggtagtactttcagtcagatgaagcttcatgctggctcacttcacccagcattatagaaacaactgagaagatttgtgaaatcaaggttttaaactaagacaacagagagaactttaataacattttcaatttacgtaatttgtataaaacgtttttaccctctttctgtgaacctaaattatatagttcttatcatatagttcttaatcactttgaagaacaacttaaagtgcttagctttgctggtaatgtggtctttgtctttctggcagctccttgctctgctatggcttaccatcatgacagcagacggatatttgtgggccaggataatggagctgtaatggtaggtagcttttagaatgtatttattgtattctttatattatattctttatattgacctcccatgtcccatattggccagttaactttggattaacaatggatgctcgattgtttggcatgaaaaatgtttaatttaggccaagcacagtggctcacatctgtaatcccagcactttaggaggctgaggcgggcggatcgcttgagcccaggagtttgagaccagcctgggtaacatagtgagacctcatctcaacgaaaaatcaaaaaaattaattggtagtggtgcatgcctgtggtcccagctgcttaggagactgaggtgggaggatggcttgagcccaggaggtcaaggctgacagctagctgagattgcaccactgcactttcgcctgggcagcagagggaaaccatgtctcaaaaaaaaaaaaaaagtttaattcagtatagatattaggtcaaaaatggattaaattattgcttaattttaaactagttccttggagctcagaatgctgtcgtaattgatagctgggtgctcgggctgacccacagatcatagccttcatagagtgaatacgtcacctatagcagcccccatcccttagccgtgatggtggagagcctctgtcactctgtgtgtgtgtgtgtgtgtgtgtgtgtgtgtgtgtgtgtgtgtgtgtgtggtcattcagctagcaactcacagaactctttaaggcaatacttctcaaactatctttggcaaaggacctgatattcaagtttctagtctgttatagactggcatttttgtgcgtcaaattgtatgcatacatttgttttttcttaattgaaatataacttaaataacataattatatttaccattttaaagtatataattgtgtggtcttgtagcatattcataagattgtgcaaccattaccaccattctctaattccagaatattttcatcacccctccctgcaaaaaaatcccatacccattagcagtcactctccattgccccttcccccagctcctggaaatcactaatttactgaatccaaggatttgcctattttagacactttatataaatagactcatacaatatgtgtggccttttatgtctgtctttcacttaacataatgttttcaaggttcatgcctgtttgaattaattaattatttttgcagtggaatagcattctatactgcatttggttgatccgtttattagttgatagacatttgggttgttttcactttttggctattatcaataacgttgctatgaaaattcatgtacatgtttttgcatggacatatttttttctattctcttgggtatgtatacctaggagtggaattgctgggtcatatggtgactatattgaacttgtaagcaactatgaaactgttttccatagtggctgcaccatttacattctcaccagcaacacgcaaggtttccggctctccaaatccttgctaacacttgttattttctgcttgttttgttttgctttgtttttgttatggtcatcctggggggtgtgaaatggtaccagattgtggttttgattcgcgttttcctaatgactagtgatgttgaggatcttcttaggtacttgttggtcatttatatcttctttggagaaatatctattgaagtcctttgcccatttttaatagagtattttttaattgttgagttgtaagagtttttttctgtatgttagatactagacccttatcagatatatgatctgcaaatatcttctcctaagagctgcctttttactttttttttttttttaagtttggtgaagtccaatttatcttttttgtttttggctacttaagctttagataccatatctaagaaactattgcctaatccaaggtcatttatatctgtaaagataggtgtaaatcaagatttacacctgtattttcttctgagagttttatagtttagctttacatttagatctttgatttattgtaagttaattcctatagtggtatcagggaggggttccacatttattcttctgtatgtggacatccagttatcccagcaccaattgtttaaaagactattttttttcccccatttaagttttttggcatctttgtcacagagccagccaggcagagagccagggaagagtttccagaagtcaatgttatagtggcttgatggtgcagggctatatagggagggcaccctagggcgattggagaattgggcagaggccgggtcatgcaaggtcttgtaggtctgggtaaagctttaaattttattgtaattgcagtgagaagctgttaaagtgttttcagcagatgaatagcatgatgtaatttacatttttcgaagatcaccctagctactgggtagagaacagattgaggcacggccagagtggcggtgggagaatcagattgttttagcggcctgggtgaagggacagtggccatgaagaaggacaaatggatggacttgagttgagataagtcttggagacatctgagataagttggctgtgtagaggagaggaagagaagtcagatgacagccaggtttttggcttgagcagctgggtaggaagtagtattgttcgctgagaagggtaaggctgggtgggggaggcagttggagggagaggggacagtgagagccagcctagtttaagataccagtgagcttccaactggccatgtgaagttggcacaggataaacaaaacgagtcccggagaggtctgggcagagggcatcatcatcaggtcatttttcaagccacaagaatgactgtgagtagctggggagggaatgaaagaagtcagggcccagacctgctgcctaaataatgacactgttttggagtggggtcaaaggggaggccagccagggaggaggggaaatgatgatccttgagtgtgactttaaggggcccagaccacgttatgtaagctgaatttcctgaccttgcatagtcacgccaatcattgagggaacttactaaaatacagattccccggctctatgccagacctagagcttcggaatcactagggaggggcctggggatctgtacaataagtagcaagtcctctagatgaaccctagggtcaagtgctttagggaaactacatggttttgctaaaacctctgaggagcaggagcaggtttctggtttttgtgagctcagaaatttgtagcaggctttgaagggacaaggctgaaagtgcaggtgccagttaggaggctgcctccggaccccagtgtgaaatcatgaaatactggggtggtgatggagaagaggctgtggcctcaagaactgtccgggaagcagggctgggtgtgtgaataaaggtgtgtgttgaaatagggagcagctttaagatgactttcaggtttctagccaggaattagctgtcttcagagacagaaaagatgctgatcttttttggggaaaggtgatgagttcagttttgagaaccgaccttgggtgtgtgtgctggaacctcagggtttggtctgggcaggggttgggagttccctgaacatagacgtcagtggaaactacaacggtggctgccgtgaactagagagagcaggtacattgagaaaagcagagggccaaggtcacattcctagggaaatgtcaatatttaaagaaaagccagaggactgggagcctaaaggagagacaggaagaatgggcaaagtgggaggagagccagccaggacagtgcagccacggaagctggagggcagtgagtttcagggaggaggtgagtaaaggtgtcaagggcaggagggagaggatgaaattgggcctggctagtgcctttgggatggcacgtagaagacagctgctgataacaagaagagcctttccatgcagtggggtagccctggtgagccatggactgaagtgtgactgggagatgtgggagccagagagcctgagggtaaccagagtggtctggtcattagagaagcttttggctgagaaggggtcaaggaaagtagaagtatagttatgagagtttcattgtttttatttatgtatttattttttaatgaaagaagcagccttggaccaggtgtggtggctcatgccaataatctcagcactttgggaggcttaggcaggaggattgagcccaggagttagagaccagcctgggcaatatagtgagacctcatctctacaaaaaataaaaaaattagcttagtgtggtggcatacccatatagccccactactcaagaggctgaggtgggaggatcacttgagcctgggaagtggaggttacagtgagcagagattgcaccactgcactccagcctggatggcagaacaagaccctgtctcgaaagagaaaaaaaaaaaaatagcagcagcagccttgatgtaagggccgagaagaaagatccagtggaagggacaggctccctgcccatgcagttcacacagcagcaggcggcaggtgagggtgctggaaatgcatgacacagtagtgaatgctgaagctctccgttttagctttcagaaaattttataggaatatcatcatgtgcatacacacatataatgagaagccactaagtacaagcttcatatagtgcagtggtgcagtgttggtgcatttatctccctagggacccttcttgtggccttcagttcaaggggagactgtcattataggatggcacataagaactgttacagttgttcaatggaaaggggcaatgcaaatccaatttagcattagttagcaattgatcaattgctcttccactgaatacagattaatatatacagtgctgatacattttttctactttacaaaaacaagatggaaaacaagaaatctgtattcgtttgtgtgcttttttcccccctcactctggtctgtcagcaattcataatatccatgtcaatttagcattgatcaataatagtattcttggctgggcacggtggctcatgcctgtaatcccagcactttgggaggccaaggggggtggatcacttgaggctgtgagttcaagaccaggctggccaacatggtgaaaccctgtctgtactaaaaatacaaaaaaattagccgggtgtggtggcatgcacctttagtcccagttactcaggactctgaggcacaagaatcgcttgaacccaggaggcagaggttacagtgagctgagattgcatcactgtactccagcctgggtgacagagcgagactctgtctcaaaataatataataataataataataataataatagtagtagtaattcgtgatttttctttagagttttatcttcatagctttagttgaggttgatttttttgcaataaaacacatgtactttaaatttcttttccaagttataaagtattacatctatagaaagtttggggccaggtgcagtggctcacgcctgtaatcccagcactttgggaggctaaggtgggtggatcacctgaggtcaggagttcgagaccatcctagccaacatggtgaaaccccatctctattaaaaatacaaaatttagctgggtgtggtggtgcacttctgtaatcccagctacttgggaggctgaggcaggagaatcgcttgaacccaggaggcagaggttgcagtgagccgaggaagcaacaagagcgaaactctgtctctaaataaataaataaataaataaaatttggaaaatatgggatcataaaaagacaaaaaccacccacaatctcaaaatttctcttttgttgttgttgtgtttgtatattaaataggtgtactttcccccactaaattgctgagctacccagtgccctgtttttactgtagctgagagctctgttagtgaggggtctttgcagttttgctttaatatgcagtgtcttgagggattttttgtgtcactaagagaataaagttttgtagtaggagggagaaggaatatggagtgctgatctgggcaggaagaagtggacacaaatcccatgctgatcagcagcacttactttattcaattcggtctgttctcccaaacaatgttggcctgaggacaggtctggtgaaagaagcaattcatatcattcctaaataactcgccttaagtcctaggtcttgtgataatcatttttggattttacttcatttttgaaagtcaagtttctgttgttttttaaaaccataactcttttaattttttattttgtgcatttgcttttaggaatttcacgtttctgaagattttaataaaatgaactttatcaagacctacccaggtaattataatacacattatcttgcgtacacatacatgtagacatacacaaaactagaacatcatctcttatgatgaaaattagattttcacattaactttttagttttgttacccccactatgcaagagacttgtcttttagtgatatttcagctttttcttgctcattaacatttaaaattttgtatatcaggcacatgtatcagatttaattaaccattcttttattattggatatgtgtactgcttccattttttttttgataacacacattactcttcatacatgtatgtgtgtgtatataactgagtgtacaattttttgatatgtgtatacacattgtgtgtgtgtattgaataagtatatacacgtgtgtgtgtgtgggtattctccactgttattctgactctaatcctataattcattgtttctattttattttgttttgtttaaatggagacgaggtctcagtatgtagcccaagctggtctcgaactcctgaccttaagtgaccctcccacctcagtctcccaaagtgctagaattcaggtgtgaaccaccacacctgtccaaattctataattccgattatttaagacaaatccctaggtgctcagtgaggaattttttttttaagacaaattcctacaaagtggaataaccgggtcagacattaaaaagttttttaagtgccctagatttattttgcagactgcttcacagcaatagtgcaagtttttacagtctgcgaatggcagctgagaatacctgttcatgaagtcttcacaacatggctgcctcataatttctttttcctgttttatagtcaagaaagttctcaatttgaaaatgatttaagctttatttaatgttgaccatttgttgtcttttctgaatgtccgtttatgattttacgcatattcccagggagctggagtgttttctaactgaattgtaagcacttttcactacaaagctatcaatactttgtggcatctgtgacatatacctttttttcagtttttactttattttgtaaatttcaatattttaaaacttaacaaaagcaagatcccaatgacaacttcagattgaagttgcaaaactaaagcattttgattaagttgtggattcccatcagagcaattagctgattcccagaaacttcaccagaggacatgacatttagcctcattttattcactctatatttctaaaattttatacttaatgcttgtggataaaggtaaaaattagagtgtagatgttttacgtatgtgttgttcatcttggtgaaatgtggtctaataataggatactttaataagaaggccaaattgcttttccctacatattgtttcacctgttccaaatttaaaataggagaaaagcatccaggcacggtgactcacccctgtaatcccagcactttgggagcctgaggcaggtacatcacttgaggtcaggagtttgaggccagcctggccaacatggtgaaaacccgtctctactaaaaataacaaaaattagctggacctggtgacacatgcctgtagtcccagctacttaggaggctgaggcaggagaatcgcttgaacccgggaggcggaggttgcagggaaccaaaatcgcaccactgcactcctgcctgggcaacagagcgagatttcttctcaaaaataaatcaataaataaaataggagaaaagtgatataacaatgaccatacatttgtccttggagtatgttggtcagggaaactgttttgtaacaatgaatgataacactttccaatcttgcactgagtaatgtactagcattatggtgttattataacaccagaagcaactttgaattctcagctatcatgtgcaggtttatctttaaaataatcaagaatccgtaaattcctttatgaggtatatacctatgagtttggagacctttaaatgccaggcttggagacccttaaatgcctggtcaatgtttttgtcaaaaggcaaattccttaataaattatttcatctggacagttgtggtagctcccacctgtaatcctagcactttgagaagccaaggagtttgagaccagcctgggcaacatagagagaccatactgctataaaaatgtagccagccatggtggcacacgctgtagtcccaactacttgggaggccgaggtgggaggatcacttgagcccaggagttagagattacaatgaaccatcatcagactactgtactccagcctgggcaacagagtgagatcctgtccctttttttaaaaaaaaaaaaacaaaaaacgtgtgtgtgtgtgtatttttcatctttcattaaggatcaaattatttcatattcacatctcatgttattatctatattttggttgtcaaaggtttttttttgttttgttttgttttttgagaaagagcctcactctgttgcccacactggagtgcagtggcacgatcttggctcactgcaacctctgcctcctgggttcagtcaattctcctgcctcagcctacctagtagctgggattacaggtgcgagccaccacggccagctaattgtttgtatttttagtagagaaggggtttcaccatgttggccaggctggtcttgaactcttggacccaagtgatcctcctgcctcggcctcccaaaatgctgggattacaggcatgagccaccaagccccgctggttgtcagagttctttatgggctataaggcagcataggtttcttgtgcagtggttcttggacctttatatttcattgactaataacattttagaaaacatttggaggactaatatagggattgctgtattttttattttgccaagtgagagtttaaaaactaaaaatgaagcaaaataagcatgactatatctcaccatactttcataaaagaaaggatatcagaaaaaaccaaacagcagaaaggatataatcttagaaataggatggctcttcccaggaaaaaatagttgactattcactacagcatctttaccacaaactagtttaaaccctatgactgtttggcccgagtttaacaactacagatttagtggaaaaagtgttttgagtgagacagaccaaattaatctatcacttattagactttaggcgtatattaatatttatatttaatatatatttataaatattttataaataatatttgcatttcagttttcttatctgaaaatcagtataataatacacaccctgtaagtatttatggaaattaaatatcattaaaacagaaaaagcattaggctccacatcagacgctgagacagatcttatgagatatggcctactcaaatttaacattattttcagttttaaatttttattttttaattagagacagggtctcgccgtcttacccaggctggagtgcagtggtgcaatcatagctcaatgtaacctccaactcctgggctcaagggatcctcccatctcagcctgctgagtagctaggactccaggcaagtgccaccatgcccagctggttttaaaaaattttctgtagaggtggggtcttgctttgttgcccaggctggtctccaactcctggcctcaaacaatcctcctgcctcggcctcccaaaagtgctgggattataggtgtgagccactgtgcccagctgaatttaagattaatagctatcatagcatcctttaagtttcagaatccttcatgagtatttaattgttcagtgtaaccttttagcagtggatgaatctgacctgcacgtagacttttggggagagtccctcagttcttcctaagcagtctgtacagctgagagcaaggtcagcagtttctctgtcaggcctttgacttcattcatcagactggatgcttattaaacatctactacatgcaaagttctgtaccagatgaagttgaaggcaggttacactgccccggtgtggcttataattgacctggaaatatttccagagttaggtaacagacagaataccttcctcattctcagctgttattttggaacagagaactttacaaaagctttgtctttgtaaataataaaatgttacacactgataaaaagtattccagaaaccaaacacataacaccattttttaattttagaaaactgccattgctcttacttagaatgccagtgttttctgaaggttcaaaacactgaagttacagacgattaaaacattgcactgttacaactgctgctttccacatggttcttgttcatacagttttttagagcaaagtaaaaatgttctcttgagcatagcaaaaaaaaaaaaaaatctgttctctaatctattatttgatttctccttgagcgttactctttaatgattcctagcttctggtggccatgcctgtggggagcagagggcaccgccttggagagagcctgtgctagtgagttgttgagctggggcgggttgtctgaaatatactcacagaggacaggcatttccagtacactcttgtacacagctgtgccctggctgagcagattgagaggttgagcctcagttcttccccatagagtgctgtttctggagatgacatctgttcacctttctgttcctgcagctcatcagaaccgggtgtctgcgattatcttcagcttggccacagagtgggtgatcagtaccggccacgacaagtgtgtgagctggatgtgcacgcggagcgggaacatgctcgggaggcacttcttcacgtcctgggcttcgtgtctgcagtatctttcagagccacggacctctccttcccctggcctctgcttctcagtgtttggttctgaatctcatcccaaatggctgagatctaaagactgaatgaaacctatttaagtttgtgcaaaagtaattgcattttttttttaccatggaaagtaattgcaaaaattgcaattacttttgcaccaacctaatacatatttcactgaaaatccgagaacttccgtaagtttgctgtaaattgggtttattaaaaataatgaaatgaattgttctgtgctgggaggtgctataggtttttaattcaaaattgtggaaaacccaagcccattaatgcaaacccttcctctcacgtctttgtgtttctaatggaaagactttttattgtgcgaagaaaggaaaaaaggaacttgtcttctagtaattggttatttgcagactctgtaagtatatgtactgaacattaagggtttatagccctggggtttgttcctaaatgggctacaaggagttttacacaaaacttttgcttaatgcttttttttgtgtggagaggacccataatccttataatactctcaaagatggctcaggatcccccaaaatgctaaaaatcacggcctaaaaaattcctgctactacatggaatttgcttcatgtagagctcgcccttacctaaggatacctctgcctgctgtgtatcttagtgatggcaagatcaaggttatcaacaacaggcagacaccccgcagtagtttctctcttagagttgaatgtctggcttagtaaaattctgtccattgaaagcctttctttaaaatgtttgctacaaatgaatgcacagcatgagatatttaaaatagtatcatatactttaggatcaaacaagcaaaaaatactctgatatagtatgtgctacataagcgtttttgttacgtgctaggcctctcaaaatggatttgtagaaaatgacacagaatcacagttcatgccctagtttacggtgctctttttgacccgtgttttggaagagtgatagttatcctactgtaaatagctttcctattacaaatagtagttaacatgtcgtgtataaatttctggttttccacaaatatctatgaccacaaatcgagaaagtaatgagttgtgaccaatagttaatatattttctaaatttaaatgtactaccgccacaaataactgcgttttggattattaaactatccacagtaatttaaagtgaatcatcctcttcatttatagctaaattctctaggccaaaagaaacatggattcatgtcttgtatttactgtcagatttacattattttcagagatatttcataaataaccattacgtttcagagctttcttgctgttttcagtagttagcaatttctttttcttttctttcctttttttttctttttttgagaaagagtcttgcactgtcacccaggctggagtggtacagtggcaccatctcagctcactgcagcctctgcctcctgggttcaagctgttctcttgtctcagcctcctgagtaactgggattacaggtgtgtgccaccacgcccagctaattttttgtgtttttagtagagacggggtttcaccatgttggccaggttggtcttgaactcctgacctcaagtgatctgcccgcctcagcctcccaaagtgctgagattacaggcatgagccactgcagccagcccagtagttatcagttttactctttgacactttattgtacttgattatatctacttgttttcgtgtgtgtctgccctaccagctctttttttattgccagttcctgggatcttgcttgatatagtaacaggcactcaatgagttcctgttgaatgaatgaatataaactttctcagtaataacagctgttttaatttttaccttcaatatttacatattgcatgcttttcagttgggtgtttcctttcttgttatagttttacgtgtatgcttattctctttaaaatgcatgttttctaactttgaaaactaactttgactaatgctggtatctctcttatgagaggactttcaggtgatttctattctacatccttgactgcttctcctcagatatgactttgacactcagtatgctttcgttggtgattattctgggcagatcaccctgctgaagcttgaacagaacacgtgttcagtcatcacaaccctcaaaggacatgaaggtaggctatattatcacccaagagttttttttgcctaacttggacatccaaattcagttctctactatgtggattcatgaatgctgtgttcctcatgatctgtcagatttcattttgattggccagatatgggatttagagtgaaaactaagtgaaggtggggtgatgggttcatttcatattgtcgaaatcccttctaaattgcttgtgtggataatactttctacgttgcttacctttttaaattaagttatggctggcacattggttcacacctgtaatcccagcactttgggggccgaattaggtgtaccacttgaggccaggagttcgagaccagcctggccaacacagcaaaactgcctctctactaagaatacaaaaattagccaggcatggtggcgcatacctgtaattccacccctagctactcggaaggctgaggcaggagaatcacttgaacctggggggcagaggttgcagtgagccgagattacagcactacactcctgcctgggtgacagagtgagactctgtctcaaaaaaatagaaataaaaataaaataagttattgtgctgggaagacctttaaaattacttctaactggtaaaaaccttttggaagaattgttgttattactttaaaaaaatttgtcagtttctaagcccctgagcaagacctgataaatacaattagaagaaatgtgtgggctggttcagcctctgcttgggaaacataccctgtgtagggactgagggaaaagaattactgggtggaatttcatttctgtagtgcagtgggttggtgaagctctgtggaggggtttttaaagtccattgattgtattgagtgactcgccacatacacatgtgtaataaagaggtttcattagatgctgtattgggccattcttgcattgcagtaaagaaatatctaagactgggtaatttataaagaaaagaggtttaattggttcgtggatctacaggctgtacaggaagcatggtgccggcatgcttctggtgagggccttaggaagcttacagtcatagcagaaggtgaggtgtgaacaggcacatcacatgacaaaagcaggagtgggggtgtgggggtgccacacacttttaaacaaccatatctcaagggagctcatttactgactcaaggagagcaccaaggggatggcactaaaccattcgtgagaaatccacccccatgagccaactaccaagccccacctgcaacattggggattacagtttaacatgaaatttagaggctgggcccgttggcttacacctgtaatcccagcactttgggaggctgagttgggcagatcacttgaggtcaggagtttgagaccagcctggcaacatggcgaaaccccatctctactaaaaatacaaaaaacattagctggacgttggcaggtgcctgtagtcccagctactcagggaggctgaggcaggagaatctcttgaacccgggaggcagaggttgcagtgagccaagatcatgccattgcactccaacctgggtgacagagagagactccgtcttaaaaaatatatatatatatatatatatatatatatatatatatatatgcgaaatttagaggggacacatgtctaaactatgtcagatgctaagctgtaatggattgcagttttcatacagatcacaagatcacattctgatatatgtcacaaagtacaagctttgaggccatctggtttatggagaactggggagttgctgaaagaatcaatgatggacttatttatgaccatagtaagcgtttcagttgtaacaagttataataaatgtacactatgctttctatgtaatctatttaggtgaaatggagtatatcaaatcaaggaccctgtaggggaaaagaagaaaagagaacagcaagttaaaatagctttgggcaggaaagcagaggcccgtgaagaaaccactttctgtttatgactaattctctcatgacccccaggctcgccagttttttcagggttgctaaaggcagaatgggttctagtaactaccagaatgggtactggttttcatgctgaaagaccgtatttatctgctcttaagcctctaactgaaatggatggcacatagattacacagggtcgaaagtcatgtgaaagtaacccctgaagcctttgcagaatatttgtttctacttttgttctgtttttggaaagtgtatgtgataaagtagtttctgtttgcttttgaatatggcatcattaattttctatatacctaccaaaattattattagcttgtgtggctggttcagttttactaagttgattaatgtttcttctagacaaacagcagtcgatgaacaaggaaaggacctactgaaagatatacctgtagaaagaaagatttccccaagggtttcaaatttgataagttagccaatataaagtatgaaatgtgaagttcagatttttcacataaattacttggcataattatgtagtgtacaacagacttttttctgtggtacttaatgtaatttgcttaaacatagacatcttggggtaaaacacctgccatgtcccagagacccagaataatctagattttttatcttgtgtaggttggacacagtaaactttactggtttttgtcactaaatattagtagcaatttttttcttcattctgaacattttgtatgtaagctactttgtaatttttgtcacagaagaacgaaaaacttctttaaaaatctttgtattacaagcagttttttttttttttttttttttttttttgagacagagtctcactctgtcacccaggctggagcgcagtggtgctatcttggctcactgcaacttccacctcctgggttcaagcaattctcccaccttagcctcccgagtagctgggattacaggcgcctgccaccatgcctggctaatttgtttttttggagagatagggtttcaccatgttggccaggcctagtcttgaactcctggcttcaagtgattcgccctccttggcctcccaaagtgctgggattacaagtgtgagtcaccatgcccggcccaaagtagtttgatgcataattgaaaattgtaatcttatgactgtggataatggtgctgtgtcttctgtatgactcatgatagcatggttgaatgacccgttgtacaccatgaagatacctttttgcttaaagactcagctgctcctagtttggtcttcagctgtcaaatgtatacgtcctgatgtagagttatattttacttctcccctgcctccctctctctctctctctcacaaatccctaggtagtgtcgcctgcctctggtgggaccctattcagcggttactcttctcaggagcatctgacaacagcatcatcatgtgggacatcggaggaaggaaaggccggacgctgttacttcagggccatcagtgcgtgaccacttgtgggggtggggaaagaatccgagttagtggggagctagtgaaaggcattaatagtctgataccactttctgcaaaccccacgttctaagatggcaattatcattgatagggctcagttcacttttaactgctttctgtcagccccgagtgtctgatgtttagtagcaaaaaactaaacaaaacaaacaaacaaacaaaaaaacaaatgcagggctttcttcctccttagtccaaagagcacttgccactttttctctcaaggagtcaccctgttgaaatatctgattaaggcaggcataggatagagatgcaggtgaggactttgaccatggaaggttgcatgtaacatgatactaagctgttgttgagctgggagcctaacttgttttttgttctttgtttttttattctaaaagatattaaattaagaaatgttgtctagtttgacagtggaattcacctgagtgataccattgtatatttaggatcttgccctgtagccctgaaagaaaaagaaatacatcttcaccttgctttcttttctttcctttttggctaggctgcagctgttactataatcacagtcaagctgaaaattagctgaggaaacatattatacacaagtataacaggccaagagcttgtttccttgggcatcctaaggggtagtatgacaggcatgcaggagggacagaggtcttcaccccatctgtgtgtgtctgtgtgtgtttgtgtgtgcacactagtgatctttgtggtgtttgactccttgttcatatgaattgtggtcagtaggggagttatacctccttcgttcttgtttctgaacaagtaggtaaatcttatgcatctgaaagggaaatcatgttgattggtcccaaaaaccatagccctcatcaaatctctggcctacaattcttaatgaccgatttgaaagtagtcatatattttatagaaagtatcattctgtattatgagttataaaatgccaagtaaagtttatactagaattcattttaccatgctaaatagtcagtggtaaaataccacttgctgattttaatgaggagagcaatttgagcctaaatgaagacagttcctgtgtttttccgcatggagacaagtgactgttgtgtgtgctgtttgcagtgacaaggtgcagtcgctgtgctaccttcagctcaccaggcagctcgtctcctgttcctcggacggcggaattgcagtgtggaacatggatgttagcagagaagaggtaagagacaagggcaagtccaggctgatcgggggagacccccaagaacctggcttcttcttggcttttcaccccgcaagctgtaaatgctggtccaggtgcagacagtcccagcttccccttctgctaatgggttatttctgacaaggtcctttgtgtcattttgcattgcttcctctgctcatttgagagtttctaccaatgacatgcagtatatacaatcagcgtttaggctggttctcagccttgagcaatacactgagataacactttgagacagatttctggcatatccagtgatttggactgcatagaggtcctccgaagcaccattgtggtcccgtagcattcctgtaggaaaccctgagagatgcatcagtgactgctgtcagggacatagctaaacacttgacaggtttctgggaaaatatatttccatttctctgcttttacttcccattgagttctagttcactgaggccatgtcgacatagtattcttttcaggtgacctaatttctaacttggttcggccactaactagttgtgagaccttatttggttaagtgccttaatttctctaagtatctgttccctcctacataaagtggaattgtggaatgaaatgacttctcagttgtcttccagttctttagacagacagtctaattgtctaaacaatctctctctctcttttttttttttgagacagggtcttgctttgtcacccaggctggagtgcagtggcatgatcttggctctctgcagcctcaacctcccaggcttaagcgatcctcccacttcagcttcctgagtagctggggctacaggcatacactaccatgcacagcttatttttcaattttttttttttttttttggtagagacagggtcttgctgtatcgtctaggctggtctcaaactcctgggctcaagcaatcctcctgcctcagtctcccaaattgctgggattataggcatgaggcactgtgtacattctcttttttaaatattttgaagaatgctgcagtgaatattcttgaccttgtcattgtgtgattgatcaattatttatttcagacaaatttctggaaatagaccttctgggtccaaggatatatacattcttaaggctttttatagatgtcgtcaaatgatttccaatcaaggtttccattctcatctctgcctgtactgtcattatctttcttttctaagtgacatctacaacttacgatgttgttagcaaaaaagttgattccagagaagattttagaccatgagggatgttaatgacttatagtttaacttcagaaatatttgttgggcacctacagggtgtccttacagtcgggaaactcaagtgaatgtatttaataaatggcttattgatattgcattgcagtacctactgtgttgcatgacatcacatgatctgttcagtatcctgtcctttatggcaatatgttgttcagtgtgctgtgcaccattgtaatagacattatgcgttgatgcagaattcccaccagtccctgcacatgtgtctgctttgtgttgtctctgattctttgtgagtctgattctcactgattaaaccttcatttttagcatattccagtagaagtgatcaaggggctttcatctattttttttttaaatggtgacattactcatttccagactttatggctactgtacacaaagatacttgcccacaagaaatgtgtaatctagtggaagaaatagactaccctataaataataaaatgcaatccataatacagagacgtactgattgtgagattttttggtaactttgtaagacaagtcagatagaggaaatttggattacatgtctgctggttaatttctctttttgaattttctaaaaattatttggtaaggcttagaatattttattattaaacacagatacattggctcaatagtataggatgtggccagcgcagtggctcatgcctgtaatcccagcgctttgggaggctgaggtgggtggatcacctgaggtcaggagttggagtccagcctggccaacatggtgaaacccagtctctactaaaaaatataaaaattagccaggcatggtggcaggtgcctataatcccagctacttgggaggctgaggcaggagaatcacttgaacccaggaggcagaggttgcagtgagccaagcttgcaccactgcgctccaacctgggcgacgagcaaaactccatctaaaaaatatgtatatatatatataaattataggatgcataatactatatttgcaaagatttattcgaactgtgttttacgtttatcagctactagttatatgcagcaagaaaagctagtaaactgttcttggctcttggcctattatttttcagtcttattctgagagagcagaaaactcagagaaaggctgtattccctggatgatgaggggaggagactgttggtgcccagcactgctggtggctttcccgagggtttcacaacttagattttaacctgctctttttatcgttggtaaattcttttagaaaaagtacttagaaagtagaagtgggattcctaccgtcaaagtgcatcactgtggagtgtatttctctatctagggaaagaaaaaatagtcccatcaatcaaggcatttcctgtgtgcacaattcactgcgtctgtagaagagacaggaaggcaaattgtgtcaaaaagatgcattatttttagtgggtttttttgtttgtttgttttttaataactgagaaaatgtattgcaaggataaacaggctataatctataaggttctgaccctgccttaggatttttgggctttttttttttttgagacggagtctagctctgtcactcaggctggagtgcagtggtgcgatctcggctcactgcaaccttcgcatcctagtttcaagtgattctcccacctcagcctcccaggtatctggggtgacaggcttatgccaccatacctgtacctggctaatattttatatttttagtagagacagggtttcaccatgttgaccaggctggtcacgagcccctgacctcaagtgatccgcccgcctcagcttcccaaagtgctgggattacaggcatgagccactgtgcctggcctttagggttttataggactttcttagaccagggcatagaggattgatcccagatcctctagctctgcaatgcttgcctggaatttctctccaagtcccctgtcaatactaactggagcatttactacccactgtggcttcaaccactacgctgtcgagttggaagcagatttgcttccctgccagatcataatgagaagggatccttttttggaagtaggcacaaaatataaatgaggaagtaacaataattagaatgaatcttcttgaaaagagaactttattttaaaactagtaggttacagaatgtatagcattttatatactagtgcagtgtgacgagtgcagcagttagtggcagtagagcaatggaatttattcttgccatatctttgttcagatttggcaggtgcaaaaagatggagaaaagagagtgaagcaattataataactgattaatactctctcttgctcttctcagcacaaaacgaaagcttcttcttagataataagtataaggatggctcatgttagcttacagtgtaatgctatattctgagtattaagtgaaataaagttaggggtatctcttatattaaaatatgttctaaaaagctatttgtttctgattttgattttaatttgttatctcaaatttttttaagcatatatttttgtcactgcaacctctgcctcctgggctcaagcgattctcgtgcctcggtcacctgagtagctgggactgcagacatgtgccaccatgcctggctaatatctgtatttctagtagagacagggtttcaccatgttggccaggctggtctcgaactcctggcctcaagtgatccacctgcctcagcctcccaaagtgctgggattacagatgtgagcaactgcgcccagccaaagtaatattctttcttaaacctgtaaacagaatcatgctccctgaggcaagagctcagatctgtaggttgccctagcccaggaccatgtttggagacccccataggtagaagtggataggcctcatatacagaggctgtgtggagcatagggatacacagagagaggcaggctggactcctggatctgcccaggatctgcgtgtactcattgacagttgctttaatctctgagccagtttctttgcctgtaaaatagggatagtgttgctcggtatctcctaggacataatgaaaattaagtagaataaaaaaacatgaaacacttggcacattgcctggacttagatgtcacttattgtatgccacgtagtattctgaacacttcccaaatattaactcacttaatcctcacaaccttatgaggtatatactactgttatcccattttacagatgtattagtccattctcaggctgctaataaagatatgcctgagactgggtaatttataaaggaaagaggtttaatggacttacaattccacatggctggggaggcgtcacaatcatggtggaaggtgaaggaggagcaaagtcatgtcttacatggaaggcaagagggcatgtgcaggggaactcccctttgtaaaaccatcagatattgtgagacttactcactaccaggagaatagcatgggaaaaacccacccccatgattcaattacatcctactgggtccctcccatgacacatggggattattacaattctaagtgagatgtgggtagggacacagagccagaccataacagtggataaggaaacctaggcacagagaagttgagtcacgtgcctgaggacactgctgacaagtggcagagccaggattggaaggcaagagatctgactcctagactttgtgacgacttgctacgaaccacttgctatgaaccacttgctatgactattagaaatgaattgagaggccagacaccgtgattcatgcctgtaatcccagcattttaggaggctgagacaggtgaatcccctgaggtcaggagttcgagaccagcctggccaacatggtgaaatcccaaccctactaaaaatacaaaaaatagccaggcatggtggcagacacctgtaatctcagctacttgggaggctgaggcaggagaatcacttgaacccaggaggcggaggttgcagtgagccaagatcacgccattgcattccagcctgggtgacagagcgaggctccatctcaaaaaaaaaaaaaaaaaaaagagttgagaatttaggccaggcacggtgactcacgcctgtaatcccagcactttgggaggctgaggcgggcagatcacttgaggtcaggagtttgagaccagcctaaccaacatggtgaaaccccatctctactaaaaatacaaaaaaatagctgggtgtggtggtgggcacctgtaatcccagctactcaggagactgaggcaggagaattgcttgaacccgggaggcagaggttgcagtgagccgagatcatgccaacgcactccagcctgggcaacaaagcaaggctctgtctcaaaaaaaaaaaaaaaaaattgagaatttaaaaatggcttatctgtatttatttttaaaatccttgcttgaaattgaatcacttgaaaacattaaaatattaggaaatccattgatgtactgcttaacagacattgctggagatagaggccttttgtgttaaaggaatgctctgggtaattgaaacataattcaaatgccagccccttatgaagacaatcactttgatgaaaatgtacagctgggcacagtggctcacgcctgtaatcccagcactttgggaagctgaggcaggcagatcacttgagcccaggagttcagcctgagcagcttggagaaaccctctttgtacaaaaaatttgctgggtgtggtggtacatatctctagtcccaactactagggcagctgagaggagggaggatcgcatgagacagaggttgaggctgcagtgagccatgattgtgcccctgcagtccagtctgtgtgacaaagcgagaccctgtctcaaaaaaaaagtgtaaatttaatgtaatttactaatttcttgatgatgcagtttcaccattctgaccacaaatgttgcatgtgtgtttcatggtaatacaattttgtatttgtgtagaaaactatttcatgtaggactgagaacgtttttcctgaaactatgttcttgccttcaattctacccaccttagtccctttaatctgttatgtcctaggaaacaaattttaaaaatttgtggatcaaaccaggccaataatgtcataaatgagaggctaaggggggaaaatgcagacatttcattcagtgatttttctttattttttttaaccaaattttaactcaagaaaaatagaaaatttaatcctccctctgttttggttgagagcgagatttctgaattccagaccagtaaagtttaagatttttattttaagtaatacttaatagacactgtgtgttcaaggaaaatagaaaatccagccattaactgtagacaaaagaaagaagtgaatttctaaagcactgagcaataatgggcaagtttgcaagtcaggtcttttttacacttaatgtttttgtgcactaaattaaacatcgaattccctgctgctaagtatggaaagtataaacgggaacaaactttcatctattagtctgtttccattaaagccttcattgtgtcgtccttaaagcatattagcccttactgaagttgtttggagatggcttagtgaatacatttttgtgctgctttttggtccatgtgactgtggttttgcaagagttacgcttgggcatgtcccagacataagaactttccttcttccggcaattaaataccctgtgccattggcagcacagcctgctgtgtctctcttagggacagtgtccccaggtagtatccccacacatcaccagcctccatcaccacctgccttgcattgatcacagaaacaaagaagtaattccatatcaagaaaataatctttctcacatagatacacatctctttattcttctttcatcccttctcatctccaacattccccagttatttaaggaaacctttcttctatctcagcctatttcagtctacttgtgagtgccttctgcacccccacctcaaaaaaaggcctttctaatgtctgttatatgtagaaatatttctagtgaccgatctaaaataagaaataggaaggccaaaagttttgatgcaataggagagaaaatgaagaactaggggcacccatcgttcaaaccaccaaatatattaatatatattttagaaaaaatattttctactatttttgttgcacatatataatgttaagtgattggggttaaacaggctttttttttttttttttttttttagacggagtttcactcttgtcgcctaggctggagtgccgtggtgcaatctctgctcactgcaacctccacctcccagtttcaagcgattttctctcctcagcctcctgagtagctgggattataggcataggcatgtgccaccacgcctggctaattttgtgtttttagtagagatggggtttcactacgttggccaagctggtcttgaactcctgacctcaggtaatccgcctgccttggcctcccaaagtgctgggattacaggtgtgagccactgcgcccggcctaaacaggcttttagcaggtttgtcttagaattgagtatagtttgtaattttttgtttagagaaatattttctaagtttttattttgttttgttttgttttttgagacagagtcttgctcttgtcgcccagactagggtgcaatggcatgatcttggctcactgcaacctccgcctcctgggttcaagtgattcttctgcctcagcctcccaagtagctgggattacaggtgtgcgccaccacacccggctaatttttgtatttttaataaagacggggtttcaccgtgttggccaggcttgaactcctgacctcaggtgatccatctgcctcggcctcccaaagtgctgagatgacaggcgtgagccaccacacctggcctattttctaagttttttaacaaattaattttgagactgcttcctctgtttcaacaaaaatgcattaaaaacctactgtgtgacaggctgtggctagatcaagatgaataataccaaaaagtaactcattggttagaggggagaagaaacgtgcaccaagagttccagtaccagagcttgctgctcagtgaagctgcaggatgcctgtgtggacccaggagggagggacgtgctgctgtggctgggaagggaaggggggcaaatctgccggcatagtccctacccagagcaactaggtgatggggttttgtcagatctcttctgttagtcacctgtgaccccgcaagcctttccaagtggtaggtcaccagattctgctgcatgcactgggtttctactcaactggatttagagttcaaacatctttggcataaaaaagaaatacataaagacaacccttaagggttcacaataaaaactgatttactccctcctatctatagattacaaattgaacaccctgtaaccatggctaaaattgccatgattactcggcacacagttaaggctgggcgcagtggctcgtgactgtaatcccagtgctttgtggggctgaggcagaaggattatttgaagccaggagttcaaaacaagcctgggaaatatagtgagatcctgtctctacaaaaaaataaaaataaaaaattagctgggcatggtgacactcacctgtggtcccagctattcgggaggctgaggcaggaggatcatttgagcctgagagatcaagcttgcagtgagccatgttcacgacactgcactcgagcctgagtgacagagtgagaccctgtctcaaaaaagacccccccccacacacaattaaacataatattgaatatgacaactagctagaatatttcgtggaattaaaaagaaatgctaactggccgggcatggttgctcatgcttataatcccagcactttgggaggtcaggagtttgagaccagcctggccaacatggcaaaaccccatgtctactaaaaatacagaaattagcctggagtggtagtgcatgcctgtagtcccagccacttgggagcctgaggcaggagagtcacttgaatccaggaggcagaggttgcagtgagccaagatcacacatactgcactccagcctgggagaccaaaaaaaaaaaaaagaagaagaagaaaagaaatactaaccttggcaaggtctagaactgttgtattaattttgaaacatgggagtaaatatagacacactgatggtggctttgactttctgctcccccaggctcctcagtggttggaaagtgattcttgtcagaaatgtgagcagccatttttctggaacataaagcagatgtgggacaccaagacgctggggctaagacaagtgagtagccactgtcgagtcatctctggcttgattgtgtatttcactatttgcatacttaatctggggtttttttgaaacacactttgtttttgcaaatgctattaattcctacattttctatgtctttatcattgtgtgactaacaatgaggaagacctttcccagggccagtgagactgttacctcacttttccattgcttgtcctgtattggaaaggcaggggtgcgtagaaaatcctgagagcctatttttaaacagataaaagatctttcagtttaagactattacttattaaagtcagtgttttatgctagccaagaacaaaattagaataaagtcatacagttatataccttatgctgtcacaaacagataaaaagtaataatttagtcctcacttgaatgcctgaccctatgagttttagattattttaaattgttcccttataagcatacctggaatatttttattaagcatgttttgagtactgttttttaaattttttaattaaagaaatatgttccaaatagcctgtagattttaaaggtgctgttaaaggattcttgtaatactaaagttctacaaaaaaaaaaaaaagcaggtaagtaaaaaagaatgctgattttattccttttattattggttgcatctctatgagcgattagcctaaagtttgtatgtgttaataaacttttttggccctgcatggtggctcaggcctgtaatccctgcactttgggaggccgaggcaggtggatcacccgaggtcaggagtttgagaccagcctggctaacatggcgaaaccctgtctctcctaaaaatacaaaaattagctgggcgtggtggcggacgcctgtaatcccagctactcgggaggctgaggcaggagaatcacttgaacccaggaagcggaggttgcggtgagccaagatcacgccactgcactccagcctaagtgacagagcgagactccatctcaaaaaataaattaattaataaataaaatctaaaaaattttactcacagagatactccacagtaaggtctcatatgagactggcaggcaagaagggaattattagtgctcagaccattataaagctctgaaatagcacctgagttctgtctgtcattagccaagttctcacaatgcatggctgatggtaattagtgcagtataattaataggtgaagtattccctacttctaaaggaaacacagagaaatggattttacttccatttattaacagttaacagaagagagaagaggtgctggtcactaaacttttggcggtaaaagaatatgtcaaaatcagtaataataattggactattttgtaatgttcttgaggcttatttccagaatcacagtttgagagattttagaaaatagcaaaatacatgattatgggcattagtttcttaatgagagcatagtgcatttaaaacttattttagaccgggtatgatggcttatgcctgtaatcccagcattttgggaggccaatgtggaagggtggcttaagcccaggagtttgaaaccagcctgagcaacatgatgagaccccgtctctataaaaataaataaataaaacttattttaaaaccctttaggctgggcatggtggctcacacctgtaatcctagcactttgggaggccgaggcaggaggatcacttgagcctaggtgttcaagaccagcctggacaacatagcaagaccctgtctctgcaaaaaaatcaaaaaattagccagacatggtggcagacacgtgtagtgccagctacttggaaggctgaggtgggaggatcgcttgagtctgggaggtcaaggccgcagtgagctgtacgccattgcacctttgcattccagtctaggtgacagaatgagaccctgtctctgaaaaaaaaataataataatgccttttttatgatggaggaataaatttttctttccctaaatctacagtgattaggctcctaaatgaactaaatttggtgttaataatattgtttgttaacatgtagacagataatatgaatgaatgaaaagcaacatttgaccagtacagcaaagttttttggaaatccttgactagtgtcagaattgtctatcttgtgagtgttaattgatacattgaattggggtgattgcaattcaaggcatatcctccccgctcctgttgccctactttagagggaaaccatgtgctttaaagcaaaagctaggccaggcgcagtggctcacgcctgtaatcccagcactttgggaggctgaggcaggtggatcatgaggtcaggagttcgagaccagcctgaccaagatggtgaaatcccatctctactaaaaatacaaaaattagtcaggcgtggtgacaggcacctgtaatcccagctacttgggaggctgaggcaggagaattggtagaacccgggcgccagaggttgcagtgagccgagatcacgccactgcactccagcctgggtgacagagtgagactctgtctcaaaacaaaacaaaaagcgaaagctaacaccctgttttcctcctcccggtcacctgtgaagcatcactgcaggaaatgcgggcaggctgtctgcgggaagtgcagcagcaagcgctcaagttacccagtcatgggcttcgagttccaagtccgggtttgtgattcttgttacgactccatcaaagatgaagagtgagtgtttgcatatttttgtctcattgcctcttattacatctgtctaatggttctctgaaatgtgaagagcttcagaagtgataggatatgtttagccatgtgtttgtttctcctgaatttcctaagccattttatttgttgtttgttttttgagacagagtcttgctctgtcacccatgctggagtgcagtggcgtgatctcggcccactgcaacctctgcctcccgggttcaagcgattctcctgcctcagccacccgagtagctgggattacaggcgccccccaccacctggctaatttttgtagttttagtagagatggagtttcaccatgttggccaggctggtctcgaactcctgacctcaagtgatctacccaccttggcctctcaaagtgccaggattacaggcgcgagccaccgtgcctggcccctaagccatttttgaagagaggacctgccctagctttatgacttaagaccatgactatgcatcttaagttgcccctctgactgggcagctttctcctgaacacagtgaggaatgctaagttacatggtccagtaactgagtggataccctgagcccccgcatcccactggctgctatgcagggataagtccatgcacctgtggatggcagtggttgagctggttctctataaaagtatccagtgcccagacctttgttcacacatgcatgtaaatttactgggaaaactctagagaccaatgttctttcttccacagaaatctggcctagcagtctattcttaaattgctctttgtgtgtaagacacatctgtttgataccccactctgccctgacttttaggcaaatccgttaggacagaaccactattttctttccttccctttgaatcatcttttaaagcagcagaggcaaatgttggcagaggtccacattggaaagctagtgcatcacgactggtgttggtaaatgaactagtgatgggattggggcagctgggctttgaagcgggtgctgtaagaggcactgctcctgtgcatggcagaggtttcagggaaaacggcagctctctgatgttttgcccatgctgtatgattttattcaatgcagttcttcttttatattgaagattcttgtttttatatctaggaatgtatcagcctttccagtaaaaaaaaaaaaaatcagttattttgggaattttataaaacaatcttgtgatttaacatgctttctgtcatcattaaattataaggttagttttcaaaaccatagccacaattttaggagcaaattttaacactattatcataagcatttactttcttttttttttttttttgagactgagtcttggttgatcacctgggctggagtgcagtggtacaatctcggctcactgcagcccccacctcccaggttcaagcgattctcctgcctcagcctcccgagtagctgggattacaggcgtgtgccaccacacagagctaatttttatatttttagtagagacggggtttcaccatgttgaccaggctggtcttgaacccctgacctcaagtgatccacccgtctcggcctcccaaagtgctgggggtacagacatgagccactgcacctggccatatttgcttattttatgttgctaaaaaagcttaccccactagctctaggtacagtcaagtaaattttcagtgatctcttttctcttgttagtcggacttctctagcgacctttcatgaaggaaaacataacatttcccacatgtccatggacattgccaggggactgatggtgacctgtgggaccgaccgcattgtaaaggtaagctggctaattgtctgtcagcatctcagttgagattgcctattaccatgctgtgaatgtgcaggagacagtcactctttctgactggcaagctttataagcaaatgattgccagtttaaaaccttgagtaacaaactgcttgcctctgagtttccatgcattcattggtggtcagtcccagtggcacctccctctgcagtgtctgtctggcagagtgagtctggcaccctgtatatccctatgggtggagttgacctctgggttctcccttgctggcctgggtcctcacccctgacccatctcaagacattcctacgcttgccaatgttccttttcatcctgggcagaatgcgtcctcagtataaggaataaccacacattttaacaattaaatccctgggtcactaacacataaattgaaatgaagtgttttatacttagtaccactcttttttttttttgagatgggtcttgctctgttgtccaggctggagtgcagtggcacagtcactactcactgcggccttcaccttccaggctcaagcaatcttcccacctcagccttccaaagtagctagaactacaagtgcctgccaccaggcttggctaattttggggggatttttcatagagattgggtcctactatgttgcccaggctggtctcaaactcctcggctcaagcgatcctcccatctcaggctcccaaagtactgggattataggcatgatccaccatgcatggcctaagtaccactcttcagtggtgaaactgagatattctatattcctgatgggcttttctaaaaaaaaaattgaatttatactaaaacattattatgatttaatttttatgtgtaaagacactacctatatgctttattcacattttagtgaactacattgttttatctttctgaaaatctttttgtttgagacaaggtctcgctctgtcacccagactgtagtgtagtggtgtgacctcggttcagtgcaacctctgccttctgggctcaggtgatcctcccacctcagcctcttgagtggctgggaccacaggcatgtgccaccacaccaggctaatttctgtattttttttggtagagacaaggttttgccacgttggccaggctggtcttgaactcctgggctcaagtgctacacccgcctcggtctcccaaagtgctgggattacaggcgtgagccaccgtgcccagccacctggcctctttctataaatcttaagaaggtgttatgaaagaggagaatgagaaaattcattaatttgacaccttttcaggtttaacagtcgtttgtttgtctgtgttgactcttgccgttagacctggttatcactgctgccttttctgcgtttcttccttccttgtagatctgggacatgacacctgtggtgggctgcagtctggcgactgggttttctccgcactgatctgagagctgggcggcgtccacacctaagaacagcagctccaccaaatgaagtccctctcacgcagctccacagcgctgtctcgtgaatggacagtagccacttacaaacaaatcaacatttttaaaaagaaaatgtaaaggtgtgttttggggcatttgtggaacttacccatggggactaatatggaaaaggtctgtccatagtggttccctgaagactggaattacttcagcaaaacttccccatgaacagctaatgtgtagtgaaagaatgagctagcaaatgagttttagcggggacaaaaaatcaaacaaaaaagtgaatgcttagaaccttctcaaagcagtcacaagtacagacacttcacttagcctagggggccttccagggttcttgtggctgttgtcagagcaggagctgggggagggaagacttgttctctctttcttgaggggtggcattaggaacttacgaaaccagagacctttccctatgacttggcagtatgtgaatatcctctacacttagttattgataaacttcttaaagagatctgttattttcaggtagtgccataatctgcacttagcattggcttgcttcagttgtttctcttcccagccagtatgccacaggtgaactttcgaggttgtcattaagtaagttgtgaaatttctgtaataacaaaggcagtccgcattcttccctttcccccaaattcctagggcaaaacttttttatggtgctgttaacatgggagtcacacaagccgcctgactttttctcattgccattagtaatgactgatggaaaacccagccaccactgtgatgcgaaatgatcagtctgttgcctgaaacagcccagtcctcttaactgaaacagcattctacttcttgttccaagatgagcctctgcaatattctggcaatttaatataccccctacaaaagcactccacagcttttacactattttgactttgagttataactagtattattcatgttttcataaaaagaagttagtgacccagagctataatcatccatcaagtcttccacaataattcccaactcataaattgctttcctaacaactagcaaaagctattgttcataatggcatttctaaagcttttgggcactgtgtaccaggatgaggaagagaagaaatgaggagcctgtcttttaatattccagtatttgtgtgtttgattttttttgacaacagtacatatatctatttctctagggatatggaagtaagtggagaagggcctacctttttaaaggacaaatataaaaatagcaacagtatctttgctaatcttactaatggatattgattaaaaaaaaaaaacctcagtactgcatcactgtgttgggatcgtaccaggacaatagggtcattccatatgataaaactaaaggactaaatttgttttataatgatgtcttagagggactgaaaagtttaaggaggcgatcaaactaaaatgtcttaatggctgtgtgacacacgtaaggaaaggaaagggggtcacgcacatcatgtactggaatgatctgcattaaacattgacttgtcttcagaaataagactgaagggttttgttgttccttagagttttcgtgttacatcacctaaagagatttcttttaaaaactttctagactctttgcaaaatgtatattactaacatagtttggaagaaaaattgagtagtggtaagttttgttcaagcacaatgttgaatgttaagcttcctgtattaattttagttcagttaatggttcagcccatacaaaggtgctatcctagggattttatgaattcctgaaaggaaaatagaatatgatcaattccttgccctgtggaagagtgcagaactgtggttttgttttcctttgacttctgtaaaatgtgaccgtttgacatctgtggtagattgaacggaatatcacagctgctgagtttactccatagctttcaaaccttttttattttaagaaattcttgaaaaaccctatgttccatgggaacataaagttattatagtgcctcctaaggggttaatataaatcaaggaggaagtttatatttaaggaagaattggagtgacgtatcttagaaaaggaaaggctgatgtttccatatagcttgctctccaccaggcctatcatttttctttttagagacaaacgtgacaggctagtcttgtctctctcatatgctaggtagcaaatggggtgatatttttatagaagtgggcaaaaattattttctcaattttactgagtaggcacagaagaaaagtacagataggctgatggttattgccttattttgactgcatttctcttaaatggatcatttaaattagttcttcaagtaacagtttactggttgttccattcctgaatatgcaggctaatttgtacagatagggattaaggaatacagactattagagaagatccttatatttacatctagtatatatgtggtaaggaaatgccgattcttcattataaacaagttttaaaattgttctttcttagttcaaatgatagcaatacccctatagcattaggtagaaacaaattattcattacatcgtaaatctctttactatgtcctagctctgtcctgctacctaaaggatataaagaaatattattgctctagaatgtattactttgttctcccatgaaagaattcagtttgttagtacctatatttttaaactggtgaaactgacccaaatatgtaataaataccatagtagctcagacccaaggagatatttttctaaaatcagttttcgttaaagtacttctacttccgttattggatatggtatctcctaaagtgtaaaaaaaatctgttactatatagtgataaaccatctgctcatcgtaagtgtaaggcttaacaaataagtaatacatgctatatttattcaagtgtctattgcttaattgttaattgtgagcagatttattgaatgcctattctattttctgcagtttacaatacaataactctttgagtaagttgaagtttaattgtgcaacaaatttgtattagagtacaatttaaagtgtttttctctatagccttttttgactggggaagcaaggggtaatgttaattagtacactttgttcttgtactagctatgtttctataagatatggtgccctgtgtatcccagagatgctagaaaactgttctttgctcctatttgtgggttctgtttttgtgggtttttttttttttgagaaaatgtacacaataaaacattccttgcttgttactgtgtttgcctaatatcacttttgttgtagtcagcctggacgtagggcaataacagtagcaaccatttattcagcaccctctgtgtgctgggtgctttcactacattatcttactcaatcctggcaacacttgggcaaggcatcattcctcccattttacagatgagaaaaccaagagaatgtgtgttattaagtctgcctttctgtcttgaaaacacatgccttcttcctgcctctggcctgaatgtgctagcatgtcatttgtgctgtctgtaagggtggtgggtattactgtctctgccgcttgaggtagcagtcagcatagtgcaggatatttaggcgctctgactacacagagctatctagtgataacaagatcaagctctacttctcctcagcagctcagttttgtgagtgaacacgtgtggttcagacccagaagaactgatacctcaactaaaccagagattgatttagaaaccagaaaggcagtgaatagtatgtttttcaaaataaatatggctttcttttctctcatcatcaaaatattatcttattataataaaaagaaaaggaagctgggcgcggtggctcacgtttgtaatcccagcactttcggaggctgaggtggatcacgaggtcaggagttccagaccagcctggccaagatggtgaaaccctgtctctactaaaaatacaaaaaattagccaggcatggtagcaggcgcctgtaatcccagctactcaggaggcgaggcaggagaatcgcttgaacccgggaggcggaggttgcagtgagctgagatcgtgccactgcactctagcctgggcaacaagagcgtgactccatctcaataaaataataataataaaaaaggaaaagaaaaagatagaaccaaaaagtataaaacaagttgtttttaaaatcatctcatcccaccacctggagaaaacaccattaaacttatcctgtatatctttccaatgtttttataaatgtctccttacatatgtaacacacacttagagatacattgttttaatgggaccatacttgttttcccacttgatacattatggatagtttgcccgtgtcaaaaagtagagctccatgttagtattttttatggctgtgtagttgcagtagacatttgctcctgccatcatctggacacatgttgggatcccacgtctccatttgaggtcaagaaaggcccttgtaacttgctttagcaaatgaaacgtgggcagaagctctttactgcaggtgagcctctggtaccatgacactttcttccatgcccctcatgaagcatgtgttggtgaagtgtgacgctaagccattctacagatcacaaccgctctaggactgcagtggactttgcatgatcgagaaataaatcattgttttagcccactgtggtaggggtgtgtggtgtgtgtgtcagggatgggagagtggctagggatttgtgtgtgtgtgtcttacagcataatactagcatgtatagcagtatcccattgtcctatgtggctaagccatcatgcattttaccaatctcataaaattagattatatatgtttagattatcattgtaattaaaacactaaatatttttcaaatttttacatttaaaaatatacaagctcagcatgcttatatgtttatcttgcccacttttccaattattttctgaggataaagtcttaaaaagtgggaattgctaggtcagaatatgcatgttattaagtgttttattgttattgataatatcctcacactattgccaagatttgaatttgtgtttttggataggcgataaaaaggtatctcttagtgtctgaatttatggaatggcagttactttacagtgaaaataatatcagtttcccaagtagaaaactggaaattctgaggccaaagtccaacctccttttctagtaaccctgtattgcaaaccaattatttacttcctatattctctaaagaccagtgattcttagttagtgttttatgataccgtattttctttattttgaaattttttaaaaaaattatgctttaagttctgggatacatgtgcagaacatgcaggcctgttacataggtatacacgtgccatggtggtttgctgtacccatcaacccatcatctacatgagttatttctcctaatgctatcccttccctagccccccactccccgacaggccccagtgtgtgatgttcccctccctgtgtccatgtgttctcattgttcaactcccacttatgagtgagaacatgcagtgtttagtttgctgttcctgcattagtttgctgagaatgatggtttctagcttcatccatgtccctgcaaaggacatgaactcatccttttttatggttgcatagtattccattgtgtatatatcccacattttctttattcagtctaccattgatgagcatttgggttggttccaagtctttgctactgtgaacagtgctgcaataaacatacgtgtgcatgtgtcttaattctttctagaaagtacattttattttttattttttgagatgaagtctgactgtcacccaggctggagagcagtggcgtgatctcagctcacttcaaattctgcctcccgggtttaagtgattctcctacctcagcctcctgagtagctgggactacaggcgcatgccaccacgcctggctaatttttatatttttagtagagacaaagtttcaccatgttggccaggctggtcttgtgatctaacctcaagtgatctgcccgccttggcctcccaaagtgctgggattacaggcatgagccaccaccccggcctaatttttatccaaaatagattaacattaatgcacagcaaggaatggaggggtgtcccaaaattgagctaataaatttgaaagaacttgggactcagtcttctagagtatggctgttaaacctatgatgctcttaaaggactttgttacttaaatcctcctaatagggatattatctcttcctataatattgagaatagccaatagctttgcagactctaccatgaaaatcaaacacaactaataaaagttacaaaacaatcacatgattttagtatttcaaaactccaggtatcattcatttattaaataaatgtgatattgagttttggcaagataatagcaaacaaccagattttttaatagctgtagatttctttggttaattctgtgatattaagttttgcaggcttgcataatttgttgaattcaaaataccttaactcgaccaggcacggtgcttcacgcctgtaatcccagcactttggaaggccgaggtgggcagatcacctgaggtcaggagttcaagaccagcctggccaacatgttgaaaccccgtctctgcaaaaatacaaaaattagctgggcatgatgacgggtgcctgcaatcccagctactcagaaggctgaggcgggagaatcacttgaaccccggaagcggaggttgcagtaagctgagattgtgccactgcacttcagccggggtgacagtgcgacactcggtctcaaagcaaacaaaccttaactcagagaaagaaaaattgtttttgaacaacttcacatttatttaaatgattcttctagatccaccacatgcttaaactcttgtgagactcgacccatgcatgataatggcctgtaacctgcatttctgctctagcttggaagcctctggaagacaggggctggtcttatcctcagtgtccatcacacaagacctgctcagtccctgatctttagacctttgatttagatcttgttttcatttattccacagattggagagcaaaacttgatatgtttcttctcatgctttgaaaatgccactttaggctgaatgtgtggaaagttctgttgtgcaattttcctcaagctgttggggatagaggaactcattaaagagcaacttttataattaggaacatctggttgaatgaacccactgtggtgttaggaagaaagggaggggagaaagaaaacatatggtcaggcagaaatttgttcatttctggagttacctgtataaaaacaattctttgctcaggtgatttgaggactttatttctaagttattcatgtactttattttttatttatttatttatttttgagacagagtctcacccttttgctcaggctggaatgcaatggcgcaatcttggctcactgcagtctccacctcctggggtcaaacgattctctagcctcagcctcctgagtagctgggattacgggcatgtgccaccacatctggctagtttttatatttttagtagagatagggtttcaccatacttgccaagctggtcttgaaatcctgacctcaagtaatccacccgtctcagcctcccaaagcgctaggattacaggcgtgagccaccacgcttggcctattcatgtactttcatatttcttgtattgtcaggtatatattatctgttatctgagggagtcatatcagccgttatctgtccaacgaatatcaagttgcaactgtgcgccgacaacataggcgagcttgccgacatcaacctcggcacaggcctaagggcactaccttccaatagaccctcagaacagccgcttctcaccattctgctgctactaccatggggcagcccacactcatctattccggcagccccctggattagtcagggttctttagagggacagaactaataggatcgataaatatatgaaggggagttgactcacacgatcacaaggcgaagtcccatcatgggccgtaataggtctgcaagctgaggagccaggaagccagtccaagtcccaacctcagaagtagggaagccgacagagcagccttcagtctgttgctgcaggcccgagagccctggcaaatcactggtgtaagtccaagagttcaaaagctgaagaacttggagtctgatgttcgagggcaggaggcatctggcacgggagaaagacagaggccagaagattcaggcagtctaggcctttcatgttcctctgcccgcttttattctagccatgctggcagctgattagatggtgcccacccagactgagggtgggtctgcctctcccagtccactgactcaaagttaccctcctttggcaacaccctcacagacacacccaggatcagtactttgcatccttcaatcaagttgacaatattaaccatcagccgggcatggtggctcatgcctgtaatcccagccctttgggaggctgaggtgggtggatcacgaggtcaggagtttgagaccagccaggccaacatggtgaaaccccgtctctactaaaaatacaaaaattagccgggtgtggtggtgtgcacttgtaatcccagctacttaggaggctgaggcaggagaatcgcttgaacctgggaggtggaggttgcagtgagccgagaccacaccattgcactctagcctgggcaacagagcaagactctgtctcaaaaaaaaaaaaaaaaattaaccatcacaccccctaaccagtctccttgttcctgcccctgccactatcagcttgttctcaatgctgctaccaaaacgtgactcaaatcatgccattcctgtaccaaaaaaaaccttcacagctcccatcccattcatagtggaagttccagttctaaaatgtccgtcattctctctctggcatctctcactagtctccctgctgactcctatcaagccacatagttctccgtgttatcctccctctaacttctataaggacagggaatttgtgcctacaacaacatgagcacagtgtcaggcacatagtaggcacttaatacataatactgcttgtatatgtagaatttgggtgctatatgcataaatgaaaaggaaattatgtggatttgcttagggagtgagcctgtagtgaaagttttgaatggctgttcccccaccatgattattcctacccatcccactacacctgccaagctattgtcccaatctccaaatgcggaaaggagcatttaaaggaaggtttaggagagattataaaggataaatacatgacggatgtgatgagatttttcttgtctttctaaaacatcagactccagttctgaggggtctgttcatcattaagctttctttaagacaactccactttgcagcttatgtttgtgtgtgtggtgtgttggttttaaaatatttctgcaaatgtctattttttattttttgaggcagggttttgctctgtcacacaggctggaatgcagtgatatgattatagctcactgcagcctcaaattcctggactcaagtgatcctcctgtatcagcctcccatgtagttgggactagagggatgcacaaccacactcagctttaaaaaaaaaaaaaaaaatttgtggagaaaaggtctcactgtgttgataaggctggtctcaaatgcctggactcagctattctactgcctcagtctcccaaagtgttgggattacaggcgtgagccatcacacccagctctgcacagttcttatttatttatttatttttgagacggagtctggctctgtcacccaggctggagtgcagtggtgcaatcttggctcactgcaagctccacctcccaggttcatgccattctcctgcctcagcctcccgagtagctgggactacaggtgcccaccaccacgcctggttaattttttttttttttttttttttgtatttttagtacaggcggggtttcaccgtg

SEQ ID NO: 601 - DNA, 1378 bp, Homo sapiens
tcagctgatgggctgcctgccgaggaggccgcagcagtcgccgcgcgaacatggcggccgaaatccactccaggccgcagagcagccgcccggtgctgctgagcaagatcgaggggcaccaggacgccgtcacggccgcgctgctcatccccaaggaggacggcgtgatcacggccagcgaggacagaaccatccgggtatggctgaaaagagacagtggtcaatactggcccagcatttaccacacaatggcctctccttgctctgctatggcttaccatcatgacagcagacggatatttgtgggccaggataatggagctgtaatggaatttcacgtttctgaagattttaataaaatgaactttatcaagacctacccagctcatcagaaccgggtgtctgcgattatcttcagcttggccacagagtgggtgatcagtaccggccacgacaagtgtgtgagctggatgtgcacgcggagcgggaacatgctcgggaggcacttcttcacgtcctgggcttcgtgtctgcaatatgactttgacactcagtatgctttcgttggtgattattctgggcagatcaccctgctgaagcttgaacagaacacgtgttcagtcatcacaaccctcaaaggacatgaaggtagtgtcgcctgcctctggtgggaccctattcagcggttactcttctcaggagcatctgacaacagcatcatcatgtgggacatcggaggaaggaaaggccggacgctgttacttcagggccatcatgacaaggtgcagtcgctgtgctaccttcagctcaccaggcagctcgtctcctgttcctcggacggcggaattgcagtgtggaacatggatgttagcagagaagaggctcctcagtggttggaaagtgattcttgtcagaaatgtgagcagccatttttctggaacataaagcagatgtgggacaccaagacgctggggctaagacaacatcactgcaggaaatgcgggcaggctgtctgcgggaagtgcagcagcaagcgctcaagttacccagtcatgggcttcgagttccaagtccgggtttgtgattcttgttacgactccatcaaagatgaagatcggacttctctagcgacctttcatgaaggaaaacataacatttcccacatgtccatggacattgccaggggactgatggtgacctgtgggaccgaccgcattgtaaagatctgggacatgacacctgtggtgggctgcagtctggcgactgggttttctccgcactgatctgagagctgggcggcgtccacacctaagaacagcagctccaccaaatgaagtccctctcacgcagctccacagcgctgtctcgtgaatggaca

SEQ ID NO: 602 - protein, 406 aa, Homo sapiens
MAAEIHSRPQSSRPVLLSKIEGHQDAVTAALLIPKEDGVITASEDRTIRVWLKRDSGQYWPSIYHTMDCSAMAYHHDSRRIFVGQDNGAVMEFHVSEDFNKMNFIKTYPAHQNRVSAIIFSLATEWVISTGHDKCVSWMCTRSGNMLGRHFFTSWASCLQYDFDTQYAFVGDYSGQITLLKLEQNTCSVITTLKGHEGSVACLWWDPIQRLLFSGASDNSIIMWDIGGRKGRTLLLQGHHDKVQSLCYLQLTRQLVSCSSDGGIAVWNMDVSREEAPQWLESDSCQKCEQPFFWNIKQMWDTKTLGLRQHHCRKCGQAVCGKCSSKRSSYPVMGFEFQVRVCDSCYDSIKDEDRTSLATFHEGKHNISHMSMDIRLMVTCGTDRIVKIWDMTPVVGCSLATGFSPH

SEQ ID NO: 603 - DNA, 38239 bp, Mus musculus
cggccagctcatcccgggacttgagcagaggtctccccagtttcgggggtcttacactacctgtgtgtatctgttccagctgagacttcatagttgaatgcgacagagaactgaaagaacgctaagatgagggagcagctggcacacaagatcatctgaaaacagcagtgttagatcgggcctcctacatcagggacagaagagaagttcagcaaagaccctttcttgggtcctgtcttttgttccttctacctaagccttgtccaggattccctatctcctaggcactgtgatacatcaaggccatcggtgctgatctaactagcctgtgaaataagctatgcagtagaacaagtggaaaccagaggcggtgcaatggaaaacattatgcaaatgtgaaagttgttagtcattagggaaatgcaaattttaactaccccgagaaatcactttatattcaccaggttggtcgtaatcaaaaaaaaaaaaaaatggaaaataacaaatgttggcaaggatatagagacattggaagcctcgtgcattcgctggtgggaatgtgaaatggcacagcagctgtggagtcagctgtggaaacggttggtgtttcctctgaagttaaatggagaattaccgtattaccctgcaattccacttcaaagcgtacggtcaagagaaatgaaaacaacaggtgttcaaacacctttttgttgacccaaaaatgacatcacagaacttttttaagtacaaaaacttttatgtatacaattaaaaatatatacatgtctatgctcaaagactttgtaatgtaaattgggagataaaataaatgtaataaaacaagatgttcatgggccagagagacggcttagtggataaaaagcacttgctgacaagctttaccaccagagttcaatccccaggacttacaggatggaatgagagaattaaatcccacagtcatcctctggcctttatatacacagtgtggctggcacttgtgtgcccactctcctacacacacactaaataaactttttaaaaaattcttgggccggccgtagtggcacacgcctttaatcccagcacttaggaggcagaggcaggcagatttctgagttctaggccagcctggtctacaaagtgagttccaggacagccagggctacacagagaaaccctgtcttgaaaaaaaccataataataataataataataataataataataataataataataacaattattattattattattattattattattattattattattattattggagctggaggtatagtgacaaagtacttgcctggcatgcatggagccctgagttcaattcccagcaactgaaagaagaggaggaggaggaggaagaggaggaggaggaggaagagaaagagggatgcaagaagaaggaagaagaaatatatatgagagaaattttgagctgtgtaagtaaccatctacacccaccacacgcactcaggcacacacttaatgctgtcttctgcaaacgccacagtctcccttgctagtctgtcatttcaatcttttccttttttttttttaagatttatttatttttattatatgtaagtacactgtagctgtcttcaaacactccaaaagaaggagtcagatctcattacagatggttgtgagccaccatgtggttgctgggttttgaacttcggacctttggaagagcagtcgggtgctcttaccaactgaaccatctcaccagccccccaatcttttccttttaatcagaacctttttctcccctgctttcaatgctcctgggcaagcacttaggagtgaatacttagtgatgcagaaatgctgggcttaacgttgagactacaccacgtgttcgttcactgcagcagccaggacaattttaccttcccaccagtaatgcacactgacaggtgctgttagtttctaaattttgttcctccgcttccacctgtatgaaacaatgtagcagatgcgaggtgttatctagtggttttgatttgcatttccctaatgactaacctccgttactttttaaatctacctattttgtatcaatccactgactccgctgtccttatactgcagcaaacatcttcatagtgtaattactaaaagcaaatgaatttttatatgattccacgttgtcagctttggttaaagttcccctgagccactgaagactttccaagcctggctgagccttttcagccaaaggcaagggtctcttgctgaagggtgtttctatgaaagctccctggagagtctaatacaaagttacaactgaaagcctccagcctaagacactgctattcaaactagtcagatcatgatatgttccccctagctacctcttacaagaagtttccctgtctctggcttgtgactcactctctgaaggaatatagccccattaccaacacccttattctgagactgccagtccttaactctttgcagtctgcaaagtttagaattcaatgtgaagctcagaaagtgtgagctgacccttcatgctggttcatgcttggttttggttcttcatttttttttttttttttggtgaaatcagaacagtctgactctgtgagggaattttgcaaatgcaactgccactaatccagaatactggagaaaggcgctcttgtctcccccattagagctgtggctcagaaatatgcaggcactaactcaaggccatgtactttaacatgtggctaagcatgattcaacccatgtaatttcagagctgtggcacattctaccttgccacactgttttggtgacactggatggttataagcatggggggctggggagggggggagctgtgtaagtggctgtctcatctgtactccacatgcacccagtcacacactcaaggctatcctctgcaaacgccacatttatgtccatgcaatgcctgttataaatcactggatgattgtgcccactgttatttgcccagcttcgctcaactgaatgatgtgaaataccttgaacaattctgcttgaagaaatccccgagtgggtgtcaaagaagctttgggaactgagagttcagttagagagaagccaaggcaaggtgacaccttgctctgagaacagatggcagtacttctccgtaccacccacatccctacatcctcttcaagctgaatgaagccggaaggggatgatatcacctcagctccaggcggcaggaaagaagtgacctctgggaggatggcagtagggaggggttacagcaaggggaaaaatgggagggggtacacacactcagaaaaacaaaagtcaggaaaatttccagccatgctgggctagtcttgtgactgtggcatgctggtgagggactccaaatctatgggactctggaattttaggatgcatcaagacagctcccaaagttgatcttaaaggagctcttagtggtcagccgctgtacctgaaggaaggccgtagagtttggagaaccatgggatacaatagcaaatgaactgtgaattaagacaagtgtcaagcaagactggaaaaggcttacccaagaagccttccctaccacccacgtcagctgacaactacctgtaactccagccccagttttcttccaacctgcatgtgaatacacacacacacacacacacacacacacacacatccacagaccagcacacatacacacataatgctaaataaaaataacactttaattttaaaaagacttcataacttaatttttcattattagtagtatgtgggcagcaggtacgcacatagaggtcagaggtcaactctgtaaaatcagttctttccttccacctttccatgggtcctaaggggttgaactatatcagcaagtgccttttctcactgagccgtttcactggctcagcagtagacacatctgtaaggccagatgaggaacatgtgagccccttgggcacatggaagtccaagtcttacaaaggggtcatgaaaatgctcagagacccacatttatggcttcctgacacttcctgacgctcatggctgagtcttgcctggagtatctggctggcttgctacctgctgctaattcctgtcttttcatctgtgacctttgctccccacatctgtgtttctcagttcatagactgcagctgctctctgggtacagaaaggataagagtcttcctcttctcaaggttacaggtggctggactggaaggaagcgtgcttcccccgggctctcttgctgtctaactctacgaatcagcataacatcggccacagtgtctaggccagtctcctctctattacccatcatactatcaaggccagttactgatctgactatctcccaacagacgttcgccgtattttctgagcgcttactgtgtgccaggtgccagaggtacagaagtggttaaaacatgaaggccataatcctgacccagtgatcctggcccttcaggatatcccagaagaatgtcttctgcgctcacagacttaaagaaatatttgtaatacctaaagctaatgaaggactcatatccaaaatatatgaactcctaaaaaaaaagtcaaaaagccaggtagaaagttgataatacttaaaaacgatccaaatggcaaagaaatgtggaggaaaggtgcttaatctcattagctatcagggcaatacaaatttaagccacaggaaataccattatatacccactagaatcgctactctttttttttttttttaaatgagtcagagtttcatcatggtagccttgacgggcctggaacttattatgtagaccagcctggccttgaacccataaagatgaacctgtctctgcctgctcttaggtgctagaattgaatgactacaactttaatcttttcagattggtgataccagtgttgataaggctatgaaacaataaggcatttctagcaagaatataaattagaaaaagcacgtcagaaaattgtttagtagtgtttcctaaagctaagcatttgcctgccctatgatctagccctgttccaatgtgccaattcaggctgggtggcacatgcttttaatcccgatgtttgaaggcagaggcagagatggaagcagaggtacgcagatctctgggagtttgaggcagcctggtctgcagagtgaattctaggtcagccagggctacacagagagactatgtttcaaaaacaaaaagatgccatggcagattcataaaataacaatacctggaaacaactgaaatctgcatcaacggatgcaaattgccctgtgctcgcttagtgacatcacgctgcaatgaaggtgaattaacaaatggtactggggttggggatttagctcagtggtagagcgcttgcctagcaagcgcaaggccctgggttcggtcctcatctctggaaaagaaaaacaaaacaaacaaacaaaaaacaaatggtaccatgtgtgatgtatgagtaagagaaactaagcacagaatagtagtgcctcctgagaggttctgttatagaaagtccaagcgctcacagacaaaatgaacagtgtcagacagaggccaccctagggaagagggtgagagagtgaccaagggagcttctggggtggcagtaatgactgaattcttccttttggtggtggtttcatcagcctgttccctgtaccataatttggtggtccatactctaggttttacgcactttcccatatgttcagtttacttcgactaaaaagaaaaacttttcaagtagataaagagtatgggggtggaaataagagaaggacaaagattttgtttttaagttgctattggatgaaagtttttggccttgaggcagagtctcaactgtataactctaactatgaggcactgtctcttggtagacccagacgacctcatatttgtagagtctcctgcttctgtctcccaagggctaagactgccaacactcaggcagccatataatcagtcttagttttcctctcaatctatactcattgtgcacaaaaactggtccttctggcgaagacctagtgttgcccaatctaggagtaacttccatatccaaacatagacttggctgtgaaaccaaaattggagttcaactacagtgacatttgctgggcccttaaaaaatatagacctttgatatcctagcagcggagctgagcccggggttgctggattagcaggtggggacaggtttttgtggctacatttgttatcattgtccaaaggaatggccctctccagttgctgttgagcatgtgtgctcagtagccagcactctttttctctcctatatacatcctatccttattcaacggtctagagaaatgctcaattgccccaaggaacctttctagggaagaaagtgacaggaaaggaacctctggtcataggctctatggtctagaaaaatgctcagttgccccaaggaacatttctagggaagaaggtgacaggaaaggaacctctggttatagactctaccgatgaagggggaaaggctggaaatgggagttcctttatagggaggtcacatccccttcacaaaaacaacccaaagagaactaactggtactgattttggattgatgaagtgaagacaccccagggaggaagtggcaaaagcgaggatgaaaacactttgattccacaaggtgcgtcagggaaagttggcgttcatttcgcccgggatggagacttctctcccacggggccacgattgggtcaaaggaaacccccgctcccctccgcccttacctcattggtgtgtgtagccccagccatgagtctaccaaattttccctccagtctgcccatccccacccctatcaaggctggaactttattaaggcagattaaggttcggtcagtcgcccagaggaacaaggaacctggaaggagagatgaggagcctgatgaataggaactgtgcccaggaagaaggtagggactgggcgtggagaaggaacacgcgatggctgctgcggcccgggcgatcgccagctggccggctcaaaggggtggtttcgggtcttctggaaggcccagaggctcactagagatagtcaagattcaggagtacatgcgtagcagaacgctcgccttgagaggccgtgggaactcaggagcgcagcacccgcccgcgcttgagcaccgcgagcccacaacaccctccaattctgagttcccgtcactctgctgcgttttccccctcaccccgcccccagctcaagaaacgccggggaaatgggcggggcctgggcggggcccgccccttttcctgctctgattggctgatgcagttgtccatcctgactctattcttgatggaggggggttaccacccgctctgccccagatcacgtttgccacccacagccaaacactcttgtccaagtccgcgggcaagaggcgattggggacgagcgagctcggcatctcaggcccagtccggtccacaccagcccgaggcggaatatcctgatcgccccccaccaggccacctcccctcgtggaatcggagcggcggcctcacaggaaggcagaagcgaaatgtagcgagccgggtgtcgcggttggacgctcgccttgcctgggggtgtagcggggaacacgcgggggctcgaggaggacggctgagggggaggagtgatgagaagagggggtaccctacatcccccaattccgcgggcccctgctaccactctccaggcgccctttctccccagcaaggcgcaggtcagtgttgttgggtctgggagggagggagacgagggcgggggactccaggacgcagtgcttttgcagtcttgagttgccgggagtcggcggaaatcaactaggcactcctcctccccacccctgtagttggggatacctaaaccgggcttttttgtccatccccgcttggaaaggagacgcggcttcctagagcctgaggcccatcggtagtggctttactgctgatgtagttgagagactggcctgctccccttgctagcccccttccaggtcaaagtggcctgccagaaagacgggagggagggggcagtcaggttttagcgaaggaactcagaaactttgctggctcgggggcggtggactcagactgagtgtttcctcttggctgactagtgaggatctttgaaaacaacggtgctgtgttaaggtggcttggctggtgaccgagttagtggaagactcataacttgggccctagagtttgattctgccttaaccaaactggagttgactaattgtgagtgtttggaatactaacagcctgttcatcatacctgcaaaaccctctggatttttttttttttttttttttactattgagagccatgctggtgaaatgcaacaagttggtggcaattcgtggggattcctttaagctaagaaaagcagggcaggcaaagacagacatgatttgggagtaaatgcatattagcttgtgacacttggatttgcctgactttgtttttctttcctctttctacaccttttaccgatgatatttttgtttttaagagttacaccatgtctggctgtcagtaacccgagaggaaagggggaaggccaggcaaccaaaaatgtaggaataaacagtagcttcaccctctgtctcttcaatctagttaactgccgggtcctatctgacaggctcacaggatctagcatagagagaagtgtaaatgcagcctggaccagggtttagcctgtggtttctgtaacactcgactttcaagggcaagagtaagaaggaggcctctggttcttggccttggtcttggccggcttgccctgccccggttgcctggggagttctcctggcttcctctcccatcccagcagggggctaggacaattagaggtctagggatgctcccctcaatgaccagcctctctgtttgccctgtcttgctgttgctgtcttgtaataagtcactcaagaagagtgaatgcgtagggagtttgcatctgaatctgtaactttactgataagggactatacttaagtaatactgagttcttatcaagatccgagaaaacaactaatcacatccctgcccaccccaggttgctcaggaggcaatgccaaggtctcctatgaagcatcctccttttgggtggtggtttgctggctgggaatctgctgggaatagaactcactgcatctcgacatgaagtggggcaggacagtgtaattctagcaggaaaagaacagctaatagccacccctgtaacaccacatgctctgcagatcatcctagtaggaactggtttttgctatgtaccaacattcattctcccccccccccctcttctttttgtccttcctcccaacgtaaggtgttccacaccaattcttgtgactttaaggaccaggcaactgagaaagtacaagatcctctcaagaagggaagacatctctgggagagagaggaaagatagcagacactgggaccagctgagcccagccacggtgctgtgagaagctgaagccacccagcaggagtgagaagaaaccctggcctcagattgaggcttcgttctcaacgatctgaactcattcagcttttcccaagagagggctgcagcatcaggcactccagactcaggttgagctcttctgctcctgctctgaggagctggccactgagaaccaaagattgcccctggcacaacacagagctgctgggagcaggcacccactacccatagaggcagctgctgcatctggtgaggactttgtttccttccagctccaggctgcattgcttgatggggctgtcttttggtagatcagtttttacagtgcccggtaggagtggagagccgtgggaagaggtcttgcggcaatcaagcctgggttcaccccaagactaagttctttcccaagtcagagtcgaagagagaaagaaaaataaataaattctcccctcctctcctccctgcctgtcatgtcctctaagccagagccaaaggacatccaccagccgaatggtactggccctactccttctccctgttcttcggatggccctgggcgagagcccttggctgggacctcagagttcctggggcctgatggggtggaggtggtagtgattgagtcccgagctaacgccaagggaattcgggaggaggacgccctactggagaacgggagccagagtaacgagagtgacgatgtcagcacagaccggggccccgcgccaccctctccgctcaaggagacctccttttccattggactgcaagtgctgttccccttcctactggcaggctttgggactgtggcagctggcatggtgctggacattgtgcaggtaagacctgaggagggtgtcctctgctcacaagcccttgctcaataccttggcctttggggaaactgactcttagaagttcctctccacttctgtgtcagaagcagctgctgcttcctagaatactctttccctttggattacatccttggtttcatcgatgtctctgttacttactgcagaaccttcagagaggccaagtagccccagggaggtggtcagagcagtattgcctaacagtaacagatgtaactccagagctcagcctcggggtgggaagagaggagcaggcctgttgcttgctatgcctcctcagtgctgttgattccagctcagtaggagacatctagataggtctcctctttacgcctgctttcctttctccagaggtttcaaggataccaatgatagaacactccttttcaagcctctcctccattcccccgctgggcaggaatttactcagctgtcaggaagggtctcagacccagtgagaaagctcttaaggcattttgtattgctgatctttgtgcatccttggcacggtctccttggtgagcgaggatggtttgggaaggtggtataagatctgaagaagctctaagtgtcgtggatgggaacagaatgtaaccagaccttagcaggagcgtccctctctgctcctcgtctgtcacaaacatgctctgggcaaacaggaaactttgtgaggatactggatagacaaaacagtacgagttggtaggacacctgggaactaagagccagagcaggggcaagctgtatttagtgcattgtgagtcaggacttaccaagagcctccaggttggaaagagaaaaagtcttgttttgaagttaaagcttttgaagctcagtgacacacacacacacagctttctaccagtgctaatcagaatatgtctagtgcttgctaaatgctggctttatcctaggtactccaaaggacaggggcagaaggagattggtccttggggaccactccccccaccctgccccagggctccctcactgtgacatctcccgaaaggataggaggttcagcctcgcctccctttgtgcccagctaacactcaagccgggctcacagagactgccatgggggtctccaggtccttctcaggtgactgaaggtagtgggctgtaggtgctgtatgtaacatccatgtagaccatgaggcttgaaccttgcaacttaggaagcttaatgagaatatttatagctggtgaaagtgtctggtgctgccttccctctcttcaaacctgttattgtgaggactgttcctacccggacttaggaagccaatccagagcttggggctctccgtccaccccaccccaccccaccccgctgattgctcagagcagggggaaggaagaaggggagaagacatgagactggctttgtagtctccctcacctctcctttctgaggccttggttctcattcttaccatttgggggttctcgatgaatgcctgcaaagagcttcagggctgtgggtgtagctcagtggtacggtgcttgcctagcacgcacaaatccccagtttccattcccagcaccacagaatgaaaacaaggggcctacagaacgagcatcctgtggtgagccaggagacatttagcttagtttctgataatgatgatgctagcataggttaatgggggtctttcctgtaagcctaaaaagtaggaaaaaggcatctccattttgtggatgagaaactgtggcatagaaataccagtggttatctcccccagagcttgtgtcagtaacccctgtgaccttcattatggccgggatttgcagactggcttaagactgaggagcctgctgcttttgtcttgtcttgaagaacagggcaaactgggaaccagaacgattggcattggcttttaaagtgaacaaaagccaaagggagagtagggtccagctcccctacccctcactctccacctctgacatggcaaggtccaagagtaggaacagacctctgatgccttgctttatgtcctaggttgtaggggacccggagctgcctagtgtgcccacagagggttggcatctccctcagtgtggcatcttggctcataccagagctagggttccgttggtgtagatgacaatgactggcttgtccttgtgcccccttcccccatggtcccaccacagctgggctaaagcagggcccatagatggctacagcagtagaactggagtgggcgagtatgggggggtgggggtgggggacaggggcagggagccccaagaaggttcttactctacatcctggggagtgatggggatggttgatgctctgagatacaggagtcacacctgtgttctcctttcaggataagattacctgcagtgagacaatcccaaagtgcccagatagggctggttgctggttgctcaaggcccccgtggttccagagcatcaggagtctgcactcagtacagagatgccaccttgagccaaggttcccactgcagctaatactgggcttttcctagagacctgcttctgtccagtcagaccccttgcttcacttcctgcgtgtagtcgcctccacagtgaaatgaggagcagagggatcctccaggttagaagagaagcagactgcagtctgttctgacttgcccactgcagccaatagttttgagggaagtaggagcgagcccagtgttggctttagaaagagactgcataggagcctcaagctgcccatgctttattgcccccctaccccccattctttcctgggctcctgcaggagggcattacaaccattttctatcagcctttgtgagaaatgggagggttagaaggtggtggtatgtggtcttcataggacctctcaactagattaaagtagggaagctctacactccttgttttaatgcactcttacttgctgagtatccagagagattaagacaccccccctccccacgctcccccagcagagccttggggaagggtatgggagagaagcagagatgggagctgttttcctggaggctgctggagcccctgagcaggccactcagttcctgtcttccttgactaccttccgcactgcccacctctgccttgcgtgtgctatcagagccatttccttttctcctgcttcatacagctctggacatgcaggcattgccctgaggcccctctgctcgaacacctccaggaggccctgtgggataagcctctatcagatagaaactgtgatctagcctgacccaagattacctgaaaagttcttgagcatcgtggtgccttagaatgggtgtgggtgtgggttgtcattttaatgtcttgattccatcttctcctcaccctggcttgacttcttactaatctgcttccggaacaggaggctgggccagatgaggttacaggcagaagagcaggttagatggccaaggaaggagtcacagcgagatctcggagctctggggcttggagtgattgctctgggtcagggttagttttaaatgtgggagcagttatctgatcatataccttacaggaactgaggcgagagaacaaagggagagaggctaagattctgagaagcagtaaagatccataggtggtcctaacccccacccccgcaagccaagcagagtttcctggaccctgttccatgcccattggttcaggaaggtgtgggtggtagcttgcctaatggcttagctgactggtttgacttcatgggcagacactcccagccagggtgaactggatgggccggaattaggccaaaggagtaagagaaaccactctaatctataccgatccatcctcaccccctaacctcaggaccacactgctttctggatggctctgcttcccagagtcctgtgcaagcgtacagtcacagactacctgtctgagctgcatctctgagagagttttgtgagtagaaaaattggatatggagattggctctttagtcccaggtgccagcttagggctttgctgggccaaaagtccagatagtgtgatttccaggctgtattctgtgagtcgggaagacttcttctgcagggggctgctactggccctgatcctttcctttgccgatacaccctatctcatcctgcccaaaatcccacaacttctaggttcccctgtagttcaaagcagagggtgcgtatgtattgaaaggagaaaattaggggtgcttagggtggcagctaggggagttaactgaactttatacgttcttttctccaggattttattgctgtgtagcccaggctagactcactcacatgtctcagcatcctgaagatagacttacaggcttgtcccaccaaccccgctatatatttttttccttgatgatactatatgctatactccttacaaacagtccatacactttgagagcttccctctactctttcctctttatcggcatacacccatcaccttcagagagctagcagctgagatacaggaaggcaggcatttgagatgagggtgggatgagggactgtgttctaagagagctccccgggcccacactcattaagggagggaaagaatccttccctctctgaagctgcttgcccattgtgagcagacggaacaaggctgcttaggcctcagctaaagggagctggatccccaaggctgtctctcccagccttgtccaacagtaacggtcccggggctcatgaggcacctcacaggggctgcctaagagcggggaagatcttcaccttccccggtgtttgaaaagcagtggctgaaaggtcagaactgccatggggtcgggagtgcctcttctttcctgggagtcttcagagagtccaggtcctttaggagtcactacaaaatcctaggcctaggagctcagacaaggctatgctgcagccctgcaacaaatgagctgttctctggatcctgttcacttcacacactctaagaacactaacaagaaggcaagttcttcgccttataggaccaccagtgtcttcatctctgctccctggcccaaccttgtgcatcttgttgtttgtttgtttatttgtgataaagtttctctttgtacctctagctatcttcagactcccaatcctcctgcctcagtctctgaatgctagaattacagacacaccatctgggttgtttgtatgtttacttttaatgttgcagaaaatcacataacacaaaactataccgtaaccatcttgaagtatgtaaactacattctcagctccactctgcatccacggaatgctgatcctgttctctccaggccctttgcccttagcaaccacaattcattctctctctctctctctctctctctctctctctctctctctctctctctctctctgtgtgtgtgtgtgtgtgtgtgtgcgcacatgtgcacacttctatgaatatgatgactactgcagaccttatgtaagtggaatcatgcaatatttgccttgtcatggctgactgttgtggtagaatgtccttaagaatgtccttaagttgtggcatgggacaggatttccttttcaagacagtcatacttcaatatttgtataccatattgtactggtccactcagctattggtggacagttggatcaattctacctcttggctgtcatgaatacatgaagctatgaacaggagtggacagatatttcttcaagatcctgctttcactcagttattttggataaatacttaggactcagggctaagtagtcaggagaagaaataggattgctagaccatatggccattgtacttgtttaattgttcatttgtgtgtgtgtgtgtgtgtgtgtgtgtgtgtgtgtgtgtgtgtgttacatgaattgtatacatgttgtatgggtatgtgcacatacatggagaccagaggtcaacataggacattttttttctgttgctctccaccatatgtgtgtgtacacacacaagcactcttttttgtgtatgcatgttttccctgcacatgcacatctgtgcatcatgtgcatgcctaatgcttctggggaggccaaaaaagggtgtcaaatctcttgggaatttagacagttgtgagccactatgtgggtgttgggaatagaaccccagtcctctgctagaggaatgagtgctctaaaccactgtgccatctccccagacccacctcttaccttagctttttgagatagagtctctcactgaacctgcagctccctgattggctaagctggtgactcattaatcttcaaggcccagcaagccttagtgctggggttagggacactgctgagcctggcttttcacgcgcaggttagggaatccagactctagtacagagacttgtgtagcaagcattttacagaccgagccatctccccagcatatttgggtatttatttatttggttgattagtttggggtttttttttggttttggttttggtttcaagacagggtttctttgtgtagccctggctgtcctagaactctctgtaaaccagactggcctcaaactcagagatccacctacctctgtctcccaagtgctgggcttaattaaggtgtgcgccaccactaccacctggcttattcatttttaagacagtcttgccacgtagatagctggccctgagctttcagaaatacctatacctcccaagtgctgggcatacacatgcagttgatttttagtgtgaggaactgtcttattgttcttcaaagtagccccattttatagtcccaccaatagtgcagacatgttcccatctccatgtctgtgctaatacttggtattttctgtttgtcctcttaactgtcttaacaggcatgaggtgacctctcactgtggtttggattggcagccttgttctttagcagtagggtcgaggggctggaattgccttatgagctagctctctagtctagcccctgaccgcttaagcaggagcttggtgccttgtagcatgtctgaaggccccagcctgccatccatcgtgagaaagcttgctgaggaagcagcgtgagagccctcgctgtatctcttagaggctcataaggctctcagctcagcacacttacgttacagctccttgtctccagacacccaaaagaacctgtatacctccacctgctgcctgcccctcctcccctcacaaacgtgcaggctttccattcttagaactccatgccctttagggcgggagggtggtggggataatcccagcttctttagggaaatcctcagttttggttacaactaaggggactttgagtggccaacctaggttccaacagtaactaagacagtacttcctgagcctcagttttctcatgcgcaaaatgggaacaaaaaaaaaaaaaaaaaaaaacctctttattggcttgttgaggtgactaagtgaaaaaaaaatgcattaacataggttggccaaggaagttggtgggagagccaggactgattgacccaggactagaacccatatctcctgactccaggcccagcctctcccaacaggggtgtatttgcttctgttagctaagagattgggtgcatagaaaggaatcagaaatctattgcagatcagcataggagaagcaatgtctaaattcagaacctgctaggggaaagtcactgtggctgagacccaaagcccttggaaatagaaaccaaacaaacgctctagtcaccccggccccagccctgtggagctgagctctccacagctgagacaacacctcccaaggccgaggccacagagcaactggataaaggcaggcgagggggctgcagagtgctctctgagagagtatatcactaagggttctagaacataagccagcgtggggtggctcctctgcaaggtccccatgaaagcatattagaagtcaggctagggatccctcctgttctgagatggtggctaggctgtgctttttggaattcatagacttattctacttttaggcttcttgcggggaggtaaggtgcctctcgtgcttgctccagctggccctgtttccctctgctgtcccctgaccccactctgttcagctccaatgccagtcctttgaggtactgaaattcttggactctgtgttcatcttatagcactgggaggtcttccagaaggtgacagaggtcttcatcctggtgcctgcactgctggggctcaaagggaacttggaaatgaccctggcgtcgaggctgtccactgcagtgagtgtcctagctgtgggaagtaggggagagggtcagggagaaggtagcaggcaacatggagactggtaagtctccacacaactgcctgggctgggggaggaaagggaagccgtggagggagatcccagactgggtgtcctgtccctgggcaggggctccctgcccagaatggttcccaggctcaggctttggatgtcccagccatccctggatgcctgccccacctcctgctttgcaacctgcctcgtgactgtttgtgcagctttgacaggcaggcatcatgctggtccctccagccacacaggtgggggcctcctctgatctccagccctactctgcagctgggcaggagcagagccaggccttccccacaccccttcaaaccaccccctttccctgtggcagcttattcttcaagagaattggcctttccacctcccaaaatcctttagatcagccacagatagacatttcgtggactgagcccaatagaaagccatggctgagaggcaagaggtgttaaaactcaggaccaggcatgtctctccgtggccaagtctggagaagatggtgttgagggcagctagcctaacccaccccaacttgttcttcctttctcctggctggtgcaacccactctttcctttccaaatactggcagcctcagcccttgggccagcaactgaccttgccttccctaagagaacaggctgcttctgggccaggacagttatacagacccatgcaggaacgtgctgcctggataaacaggacagagtgggatctgccacaagccccctcacagcccagagtacacctgccctgggtgctctcttgctctggccctagagccttaggctatctatatgcattgcttttttgatccagtcaaacagatagagccccaaaccctgtgcagcctgctccagcccctcaccctccctctttcaggccaacattggacaaatggacacacctaaggagctctggcggatgatcacggggaatatggcccttatccaggtaagaaaacatagaccagagacaataggctaagcatctccttagtcaggaatccctgaaaggcttaggtcagcccagctggatcctatgtgattctccggcatctgcaaagtaggctaggaggtgactagttactcaggaaaatggccaagacagggagtgccccagcagcttccatatcacatgtccaggcactaggtggtttgggggattttgagccttcactaatctttgcagtagaatcagatgtgtgaatgttagagtgtcctctgccactgctgtcccatcttcccaggaggccacacagatcaaatttcttcccccttgaatcctgggccttgactctgactgatctctgggctgttgattctcaccccatctccagagaagcatccaaccagccagtaacatgtctggatttttgtagggtacattaccctattctaaggtagcacaaaaactaaataaagtcatccttctagcctgcaagaactgtagggcccagtcctgcgtgcttgctaaggaccaggaattacccattgggtgtttagtgacctcagctaaggagctctgctccagactccacattaccatgcctctccccaggtacaagccacggtggtaggcttcctggcatccatcgcagccgtcgtctttggctggatccctgatggccactttagcatcccacacgccttcctgctatgcgccagcagtgtggctacagccttcattgcctccttggtcctgggtaaggaagggaaggctcagggtgtgggggtgctgctcactctgtcttgcacgtcgacgttcccttttgtttattaatatctttttccccttctcaccctacccggcctgcctctccttcctcaccaggtatgatcatgatcggagtcatcattgggtctcgaaagattgggatcaacccagacaacgtagccacgcccatcgccgctagcctgggcgacctcatcaccttggcactcctctcaggcatcagctggggactctacctggaactgagtaaggctaaggccactgagaatggcttgggtgggactgggagagatagggaccattttgcaagcgtgtgaagatttttcctgtactgttaactgtacgaacagtttgtcacaacttctgggcgcagggtagcaaggctagatagacactgatgtcagatcctgtaggcaggcaccagaggaaggaccgtatcagcactcatccctgcctgaccctaggggttttgtttctcctggagaggtgagatgtggggaagggaaaggaaagaatggaagactagaatctgctagcaaactggagaggaggatggatgggaggcagagattgctgggatcagaccaggagacatacagtctgctctctgcctgttaactttcttgcctcaactgggcatggtggtgcgcacgcacacctatgatcccagctactcaagaggaaaaagcaggaagaccgtatgaggccaacttgggctccatagtatggcactgtctgagaagccatacagtgcctgggtagctctaatacttcatttcttcctctgcaaaatgggcaaagctggcctcattgatgaggtgaggtgctgtgcatccaggcacttagggtagaatgactgactgtggatgagctggtctcttgggacatctgcagcttaagctggggaaagctgggaactaaaggtgcttatttccctctgatctctgcccccacagagcactggcgatacatctatcccctggtgtgtgccttctttgtggccctgctgcctgtctgggtggtgctggcccgaagaagcccggccacaagggaggtgttgtattcaggctgggagcctgtcatcattgctatggctatcagcaggtatgctggggccctgggttctcatcccctgtaccaacctcaccatagaccccatctgaacccctagaggggcagaaacggagcacatactggaaatgcattagtagtgtcagccatgtgtcctactgcaagtgacaggaatgatctctactaggtttcattccaaagcagaacatactgaccttgggaactaaaaagcagccgcattctgggacacacgcagtgtcgtcagggcccagagtgactctctgtcactctgccttctcagtagggggtcagcagtccaggttttcactcttctgactcctccccattccagcaaggggacagagaggctttcccccaacagggcacagagacccagtatagagtgtcactgcttcctcttcaatcggtcacagttctgtccttgtatcagtcacttgctcttggaaatgcaactgtctggttggactgcctgggcttagccacagttgaagcacagtggctgggttcgagaaagccagctccctcagggaggagccagtgcagttacccttgaggaaatcagtgctgagcaggcaggccacagcgagcctcactcctcacgggaaggtggctgtgccttcccttcttaactggagtcactgtgccaagtcaggagattatgagcgacaactgttgcatgcacgagaactaaagactgaaaggagagactcctggaagccactttgctgtccttgtccccaaggttagctaggcctatgtctctttgtcccagagactggagcagaaccttccatggtttttatgtcatttgtcttcatgtctgtatagtgtgggaggtctcatcctggacaagaccgtctcggaccccaactttgcaggaatggctgtcttcacacctgtgattaatggtgagaccttagcatcagctgctgggggaacgaaaaggcttctgtgtcactcagggctccagcaggccagagaatctagctcagagagaacaagacctaataaagatagagatggcgtgacaggaccaacaggggaccgtgagaaacccagaaatcagcaacatgaaagcttctagccctgaagggccagggaacccagaaattgtcttgtgggagcccagttagaatttcaccccgctccctacaagagtaagctcctgccaaaaaagcataaaaggatccagaaggaaaatagaaaacactaaacccctctccttgtttacctgcgggggccttccactgcacaagtctaagtagaagcatccagcaggagagactggtgtggggcctaagcagttcacctctcagggctcagggtaaagctgagaggtacagaggctaggttagggggtgatggtaaagggaaatggtaaccagcggtttaccagggcagtgccagtttagagctcacactggatactggaagctggttatcgggtgagtgtttgagtgctgagtgcctgccggggtcagctccagagaaagggaaggcaaggagagctttggagcctgctgtgtagtgagtggggggtccatgctgcacacacgggtgcagcagacaggccacatccctgccaacactccaagagcctagatagagcatccctcagaagctgtggaatatttgtcttcttccatcgtattctgttggcaccagagggaagagtgatgtcggctcagccccgaggaaaggtagaagacagggcctctacagatacgggacaaagaacaaggtgttttcctcccggtccttcctcctccaagtctgagtcctgtgtgtctctctgcaggtgtcgggggcaatctggtggctgtgcaggccagccgcatctccaccttcctccacatgaacggcatgccaggggagaactctgagccaactcctcgccgctgccccagtccatgcaccaccttcttcagccctggtaaccatagcatctcaccctcccagatccattcctgccttaggggttgggggggggcagccaggaacctcactagagaaccagctggggcccaagttcaagggtctcctctgctgggctgtgcctgcatttctgaagagtggagcgcccaggtaagacatcattgtcttttcctgaaacaccctagagagatagctgtgtgctgacctagaatacggcgttgaccatcctgggacctcctggggccaatgcttctcttcccatcttcctctctcctcttgtagatgtgaattcacgctcggcccgtgtcctcttcctccttgtggtcccaggacacctagtgttcctctacaccatcagctgtatgcagggcgggcacaccaccctcaccctcatcttcatcatcttctacatgactgctgcactgctccaggtatggcagaagcagggcacagcccgggggccacatggaataagaaccccaggtttggacctggtcccttgccaccttttctctggccgggactcaggaggatagacactggcctggaagaattactgccattctgtgacttcagcttggtcgtgtcccttctcagcttcagtggcacactttgaaagtgagagtagtagaccagccgcagggtgcctaggaggtgggcttgaaccacccataccctgtcctctgctgggcttcctttaaaataagggcttttccacagctagaaaaagcatcaaaaccattgtgcaagacaaatccatcttcaagactcatccaagcctttcctttcggtatgctatggcattcccatggtattattaatttagtcataagcaattttccttccaaaccccgaaccgagtgcttagaaaagttgtctgttaggaatcttggcgagagccaggctgagaaccaaccatatgctgttcccagcagtcattacccagttcaccacgctcccttgccgatgtagtcaggtgcacccctgatgggaaaggagcgtgagcaagccaaaggtcttttgtggccgcctcagttgaccccttcccctgggttgaaagccacacccccattccattgccccatcctaggggtcatgaccctgtggtcaattttagctgtgcttccttctctgagtctgtggagaggcaacgtggtagcaattgctccctgtaaagttctgccaggtccctttgccacctgtccctgtatgtgtccttgtgctactcgggaggctaaaatgtgaagacagctgttgacgtttccaccctagcacatatactaaaagcctctggctgcatcttctgcagctatcagaaaggctgtgaagttctagggagactggatggcacccagggccagggccatgggagtacaaggtagctgtgtgcagagcagagggtgtgaaaggttccagaatagtcacccctgacttccttacagagaggccaaaacaaccaaatttgcctaaaaacagggaacattactggctcctacccctgagtcccttaaggcagaattttcatacctcagtctttacaaagtacagtcaagaataaactccaccagcctttaatcccagcactcgagaggcagaggcaggcggatttctgagttcgaggccagcctggtctacagagtgagttccaggacagccagggacacacagagaaaccctgtctcgaaaaaataaataaataaaataaaccccaccagataaccgtatgtcagtctaatggttagaatgcatctcattctcatatagacgtgatcatgtagggacccctaaaatcaggtgttaacgtcctagatgaagtgctgctcccagtgcagagcacatgtaattcttactaacatgccgattcccattcacaaggcccagcgttaggcctgaggttgtatgtttgtgacccactgtccactgcaagcgataggtaccactggtcctggacccagtacctatattccaatctcatttattctctatatctattatctattctcatctatagttatagaacataagcaagggagcaaataaatcgatgtagataatccaagatgtatttttgaactgttatgcattataactgacgtatttcgctgactggctcataaacctactttacagatgaatattagaataaacagcagggtgggaagggtgaagagaaagcagcttgtgtaatcagctgttacccagggccttgtaagagaaactggctctacctgccagcccctaccaggctcctggagaggccaacatggcaggaattgcagtaactgaagaatgatctgacccagaattgagacaagggcagccttcctgtaagggcaggatttagtttagaaagcccctggcttgctgtgagctgtcctggcaaaaaggttgtgaccggccaagccttgtgatccactgaacacatccaattttgtggcctctggctccccctgcagaaagcgggtggctacaagcagaacccctgtctccccaggtgctgattctcctgtacatcgcagactggatggtgcactggatgtggggccggggcctggaccccgacaacttctccatcccatacttgactgctttgggggacctgcttggcaccggactcctggcactcagcttccatgtgctctggctcattggggacagagacacagatgttggggactagcttagccattcagtctttcccccacccctctgcactttctatttggatttttattttccttttgtttccctaccccaccctacactacactcccatgcctttctgggatttcactttgataccaaattctcattattttcaatgggaattttttatacattgagccaagtttggataggaagaattcgggacagacagatgggctgacataagcagtaaaagtagacttttgagacaatcaccaagtgcaattccacggtgggtgcctccagaggaggttagatcgggaccttggcatcctgtccagcatcggggacctttgcattagctttagcgacctcagcctcggccctaatgagaaactctcaagtgggctctgggttgtttagggtttggctgaacagagggaggagggataattaacactcccacacatgcacgcacttttatagatgtggaccaacttcacagcactgggcaggggaacgttgcttcaactcctcgtaatcacaggcctgctccaggccagcctgcccgcagagtcacgtgcactggagattccatctgcgcacatgtgccttgcccaactgcctgattgcttcccagctgaaatgagtggtagtgacccgggctcttcacggatccatgtcatccacaggtttccaaaggtccatgtgccccctgagtctagagaaccgagttcaagcctcctctctttaattctctccacacactccgtctccgcgcagcttgccagatgggcttctaagattggggataggacaagggaatgtgccaaatgacctggagattgaggcaacggggaggggtggggggtgtctcactgccgtctctcatgacataatcacgtggtcagtcttggcctctgtcacttcctaaacacactcattctatcacacgagggctccgttggcctttctctcggcttctgcccacagacatgcatcaaccattcactcattcagcaaatctcagcctccccgagatgagcccttccacagcaccggcctgcaataattcttcactgagcagtcgttacggggcgcatactgtgctaagttcagtgcctggcatcaacccaccagtgctaagggaatcgctgctctaacctcacctcatcccctaggctacagaggccattgtgcctcttcaacctgacagtaaatgttccctcgttcgcccctaactctgcagtgactgccaaccccgttgctcaagcagcagcatgtcctccaataccctcctcccgcagcctctctcctctccacatcttgctacccactcagaagagggcttggaattagcaagctggatatcaataggctgcttcagtatctgcctcgtccatgattcaaagaaaaccaaagtcccttccctacacatgccccaaactgttcaacaaatggggtgcaggctgtacttctggcctgtctgtctggaatccataaattcttccccctgtgtagcctaaagggtcagcctccaagaaaaggattaagcagtgctccgtgtctaccaacactgtgcttagacctagagactcttctcggcctcatttcctctgtcatcacctgaaatcagaactgtcgaattggacagattcatagagattgtctagttggggttgtgtcaggcagatcagtgtggatctgagtttatttctgctcttccctctggcctaactccatctcaaaacacaagactcttgcacaggcatcataccctaagactgtgaccccagggtccccagccacttgctctatcctgacatctggagttggatcaggctgtctggagactgaagcatccttcttcctttgcctagaaaacagaaaggtaggggcgcccaggctcagcgcatgtgagtggaggggcctggagtgacaggagagtgacttcaggagattcatttcttcccaccgggttgcacctattgcatgtacttttggcctgactggaagaaacaaaattggtttactttcatatccttcaaaagttacagaactgtgtcttaagagaattatttatagttactataactgaattgacaaatgtcgacttaactgataaattatatttggtaaaataaaatggaagtttatttcaatggcttgtatccctgtgtgtctcatcaaaaagcagactcagctatttccttggaccctgttctgtggtcccgcccccacctcagaaatgggaaggggtcgatgtgccaaaagtgaggaaccatcttagaatataatagaaaacacatcagacacaagcaatgatgctatggggcggatgttaagggtacaaagtccttgtgttaaaggatattagacggtgctctcccctccctggcccccatgcattaccttggtgcaggtgataccagcatctatgggttagaattccttccttgcagaggtttatagctgagttgagtcagtgtagaaatgcttttaccttgagtatttaccatgtaactggctgcaaaagaattgtacaattttatatgaccttccatgaatcattagccctttcctaacctgaattataccctgtttatagggtaagtgtaagatgaggctccagtgatacatgcatacatacatacatttatgcatacatacatacatacatacatacaattctgttcctggtacatactaagcccaaaaatactatgaaatattaaaagtagattatgttattcaaccttccattgctgtaacaaaacaccagaaatgccttataaaaagaggagggggctggagacgtggctcaggggttaagacgctttgctttgctgctattgtaggggataacagtgtggtcctcagcacccacatcaggcagcttccaacctgatgctctgttctagcctccatggacacctgcgcagacaggggaggtgcacatgcatgcacacacatgcgcatgcatacacacactttaaaaaatagttttcagtgcctggttaataggccccactgtttctcacttgtgatgtagatgttgccaaggaacccagggtagggcaggtcgtacctcgtggcagccagtaaatagacaagggggaattttgttccacagcccactacaaagcatatagctccatgatctaaaacaacctcttaggctccacctgttaaatttccagtactttccagtagtgtctagctgagggtcaagtctaatacatgggctttttaggtagacatcccctatctaaaccctatcagtgggaacagtgcaggcctatgatgagcagtgtccagacaccacaggggaagctgagaaaggcctcatgaatggggttcatggaagcctgacttcctcagggacggttagctcagagactagcagggaggagagggaagggaaagccattttacagaggagtaaggaataaaaagtcaggctgatattttggagaactgaaaatggttccaaaagccctggaagttgagctcacagcctgtgaaatgcatattatgggataggagcagacagggacggtttccgttttgtttttctttcattttgttttgagacagggtctcacttaacgcagcctgaccttgaatttgccatgagtccaaagatgaccttgaacttctgatattcttgcctctgggattacaggcatgcggccccctgtccaatttatgtagtgctgtagatcaaaacccagggtttcatagatgctgcacaagccctgttaacagctgggcacagatatgtgatgaggaagatgtggataggcaaagtcagagaataaacctcacctgggtctatctgatgccaagctcttggcagagaaacaccacccataaaggacaaggttcctgcaaggtaccacaccacagtctagagcataaatcttgtgcagactcagcctctaactgccctgggctctagaactgactcttcaaagtacccatgttagtaagactgtgaagggttaacgagaagatgataattgcttgtcaatgatctacatagtgttttaccatacagcccgctgtgccatccagcatactgttaaattagtaagcttatttacaatgttaatatttctagtagctatgagtagatatcatcactatttttcaagacagaaacggaataagagagattaaatatctggcccaactacagtttttcaagccaagtttctcccagtccagtgcttcctgctgtgcctggagacagatgaagctgctggccaagccacccctttataatcataaagcattgctgaaatcattaaaatgtctgtgtattaccagctagctcagttttgctcaggcaacaaattaactgcaaaatattagttattaaccccaagtagccttcttaacacagcttcttttgaacccaaagtgatgccacatacctgtattccaacccttatgaaacagaggccagaggattgccccaagttcaaagccagcctggtcttcatagtgagttccataccagccatggccacagagtgagacatcatctcaaaaccatccaaatataaaatgcaaaaagagagagagaagaagagggagagggagagagatgggtggggtcaggggaggaagggagggagacagcccaggatatacagctacctcgaatggttactcctagaccagagctgttaaagaataattctgagactggaaagcactcagcagcaattcctatcacattatgctgtgtgtggtggggtcaggtttgaggtagctcccagcagattcttggaatacacagtatgtcccaatggatactttaaaaacacacctgccaggcacagcctatctctgatgatattttttaaaacataattacagacaacacttccaatcctgcaggcagccaagcagtcaggtgacagtcttctaaacttgggcctgaaattggtcatccccttcagctaaaactcagcactttgggtgcacggtcctgcattttatattacctaaacataagatgttttaatttcaccactctggaaatgtttgacttagaagattaaaagagactaaaaataaacctgaacctgcagaaaagtaaggacagtttgatcaagaaaatgacttttaaactaatttgaaaaactttgagctggagagatggctcaacggttaagagcactgactgctcctccgaaggtcttgagttcaactcccagaaaccacatggtggctcacaaccacccgtaatgagatctgatgccctcttctggtgtgtcaaaaggcagctacagtgtacttccttatagtaataaataactctttgggctggagcaagtggggccagagcaagcagaggtcctgagttcaattcccagcaaccacgtgatggctcacaatcatctgtatagctacagtgtactcatatacataaaataaataaataaatctttaaaaaaaaagaaaaacttcatgattatattcacatgcagttccatactcatgactaacacagtctagccattgctgttattcttaaaaagttagaagaccagggctggggatgtgctcaattggtagagtgcttgtgtagcatgcttgtgtagcatgcctgggtttgattcctagcgctgcataagaacataaggttgtgcatacctgctctcccagcacttgggaagtataggcagagatttgaagttatcctcagtaagtctgaagccagctggggctacatcagactctcaacaaacaaagccaactggatacagtagcacatgcctataatctcaggattcggaaggcagagggaaaacggattcagaaaaatagagggtatcaaccattgccccgaggactcttggagacctattcccaagacaagaatattaccactctgtcccttagcttcctatgctctagaagacagagcccacagtgtgcccattcatgccactgccttctgtctttctcattggcttagcgtttggttatctttttcctctatcaaggtgaaagacagcagctggaattctctggatgagtcagacttacccaaagctctacttccaactagacacgactgcctataatatttaatctttttaaatatatctaatgtttataccaataaatgacacctgagggggctggagagattgctcagcggttaagagcactgactgctcttccgaaggtcctgagttcaaatctcagcaaccacatggtggctcacaaccatccatgatgagatctgatgccctcttctggggtatctgaaaacagctaccgtgtacttacatatattaaataaataaatcttttaaaaaataaaataaatgacacctggggtaagagcgaatgtaaaaacctgctagctcagtcattaactttgttttcctaactgtatacaaaatatctatttacaagcctgattctacaattgaactgctagaaatctctttccatatgggtcattctaccaagctagtctacctttctcatgagctcctccagacccagagggctccttagctctctttccgagaattctgtctcacctgtgtcctgccagttgctcctacaagcccaaatcggaaaaatcactcttacctggagcttcttccaagaagccaagagagagagagagagagagagagcgcacccaaaaactcaagccagtgcagagctctcaaaggtccaattgctatcaaagtctctggatcttccactgcaccattggcaggctgagcacttgggggcaagacaaggccatccagctgattttgcctcagtcctcacccaagcaatttaccttaaaataagcagaacctttccattctttttgtttgtttgtttgtttgttttggtcttttcaaaacagggtttctctgtatagccctgtctgtcctttgtagaccaggctggcctcgaactcagaaatctgcttgcctctgcctcccaagtgctggaattaaaggcatgcgccaccacgcctggcttaacctttccattctttagcattcttatctatggaggcttctagaggaacacccaaacttcctgtctgcaggacacacctagctacatctgacaaacacagtatctttttaggttttcgtgttttgctaacaataatgttttctatgaacaataatagaatatcctataacaactgccaggctgctttccctgtcagatcattgttcttttaacttggtaagtaaggggtttcttgcccactttcagaataaggaaactctcacagagaacaggtggaagatactttcccctgggaaatctccctaacccacatacacaacttaatggtttgttgtttgtttcaagacagagtttctctgtttaacagccctggctgtcctggaactcactctataaaccaggcctcgaactcacaaagatctacctgcctctaccttctgagtgctgggaataaagtcctgcgccaccacgcacagtcacaatactaatacttagaggtagacagataaagacttggatcccagcttctgatcataattagtttataagctcttaaaaatggacagtaatgcctcctcggttggtcagacagaaaaatcccaaaacagtagttttgctattatgatgatacaacatgggttaaattgtttgaatatttacaaggtaaagttaaaaagaaaaaaatacccaaaatatagagctgggataatatgaagaagtagacaggagcgcagcagaagtggaacccagtgccccaacaagctgcacagagattctcactggttaaatgcatcaaggccttgagcccaacctcattttccaaaactcaggaacccagtcccacctagaaatcattttacatagggagggagtttgactcagactggtaaagtcatagaggtgtgtactagacgtctgtggcctgtgagcaggacagatctgtttgcctgataggcacaatcattctctagaaacaagcttcataggcaagcggctgatgaggaggtacctaggaaatctaacagagagttcagttctagttcttcagagttcaagggcagcggtctgtggtgctgaggaaaggaaatgttcgtttattttaaggcaaattgtttgggagaggtcttaaggtctttgctctatgacccaggcaaaatcagctgcaatagaaacacttaagagaacccagatcttgtaggaaaaaatggtccctctgccatgggaagccctaagttgtgtggccaggattccttcagaggcctttggtattttcaactcctgagcagggtgacttcagtggatggcccgctggaaggacaatctcttcttcctcacttctgagctcatgagtttgtgaagaggacggcagaagctaggacagaacccacacatgccactttctcaaagccttgctggcagctgcggccacaggctacgttttgaaacctcaattactctctagtttctgtttctcctctctctctctctctctctctctctctctctctctctctctctctctctctgtctctctcgtccttatttggaacaagagggaggatatttaatgaatgaggcaatctgtcaacaagtgtggttaaaaacattttcaatgattcccagctacacccagcctcaaaacttgccctagatttgggcacaaactggcagaggagtggtcagcagctcgcccttcagctccacagcctctctctctcagggatctgcctaggtacttttgtcgtggagcctcagagttatggcttggctgggccacaggcatttcacaaagctgccttcttgccccccaaaagccatcaccaaaacaccacgattggaactgggactgtagcttcggtcggtagagggcttgaatcccttgcaggaaacctggggtttgatctttggcactacaaataccaacaaaaccatgatcgggagatcctaggctacttgcttgcagaagactgtctcagggtctgctgggccgtttgttgggtcgtcttatgagttccgaagcatttttcctctcttgtttctaggatactgatggatctccaaggtctggatatttgaagtccaactcctatgctcttaggcaattgtctggtacaaggtcatttctttggcaagtgttggttgggtgcatactgtaggcatcaccaagagttgcctggcagtagcaactaggatgcataccacatcctctgaggaaggcacttgccaaaaatgtttttccggctttattaatcttgaggaaacaatcacacaatcccgaatgcgagactttctattgagacgactagactagtcgggtttgtttttggagacagaacttggcttcatagctcaggttgctggcttactcttgaggaagaaaagcaatgttatttagaaagaagggaagccaggaatggtggcatatacctttaaatccagcaaaaagcagaggcaagtgaatctctgttaagtctgaggccagccaaagctacatagtgaaagtttgtctaaaaccaaggttggggtggggggttgctacaatttctgtagtggcagcaacagtgtatgtctctattagtcaggcttctgtgctgtgataaaatttctggcagaagcaatttaaaagaggagagacttagttcggttcagtttcaccacatggtagaggtagggatacggaggtgcagatcggatggaaccctggagaccaggaagcagagagaggacgcatgtgtttgctgcaggatatttgatcacattgtgaaccccaagattgtgaactaggaaaaaaacctattgtggtgtggcccagccctagcacacacatttaacccaagagctttctataaacagggttaaataaagtcaaccgtatgtccagagcctgagcaagcaactagttgacagggagtgaacctaagaaaacccaggaaagagaaaggaaaggcttgagttgagttgcagcctggagaaggagccctttccttctgggaaggcggtggagtaggaaggtcagctgggtgctttctctgcctctctgagctggcaggctttcaccacagcatctggttatttggtaaatcaaacatttggggttttgttgtcaaaagccgtgtgtggcagcaggctccccactcttccctctttgttctctcctggcttctgcctatgggatgatgcctctcacatatatcacagctctccccctttctgaaaaccccctcacagacacaccaggcatatgctattaattaatttgtttgtttgtttattataaatttttatttatttcccatgcaggaaactttgggcttaatccctagcactgcaaataaacaaaacaaacattatcaggagagctatatgcctacagaggacccacagcctccccgttgtctgggtctctcctttgcctctaggttgctaggctatttgttggggcaccttacctgttatatatgtatacatacacacatatatgtacacatatgtaatatattatatataatgcatttatatataatatatttatatattatataacacatgtatatattttatatagatatatatttatataaaaatataaatatatgtataattattgattttgtataaatagttcaggccagcatgggctgcgacatgagatgttatgttgcacaacactctagttagctgcacatcaaataattaagtgaccaaaacggaacggcaagaacaaagggagaaattaactaagccagtgagatgggccagtgggtaaagatgcttgtgactcaagcttcatgacctgaatctgatcccctgaacttacacagtgggaggagtgaactgactccccaggtttgacctctgaccaccatacatcatgacacactctcacctgcacatgcatgcagagacacatacacaaaataattcatctattaattaaaacataaactaaccatcaaaatacctgagctgtccatgtagtaactactagcccaaggtattttaatggtaggttggggtctggagagatagctcaagtgcttaagagcactggctgctttttcagtggacctatgttcaatttccagtagccacatgtcggctcacacttggctgtgaatgcagtcccaggggaaccacttctcttctggtctctataggcactgcaagcatatagcacactgacatgcaagcaaacactaatacaaataaaacttctagagagtctgacacccggcaacctcatattgctggcacatttaaacacagtacaattctttttaaagatttatttattatatgtaagtacactgtagctgttttcagacacaccaaaagagggcatcagatctcattatggatggttgtgagccaccatgtggttgctgggatttgaactcacgaccttcagaatagcagtcagtgctcttaaccgctgagccatctctccagcaccccacagtacaatttgaaaaagtttccaggcaataatgattacagctccaggtacacaatgaagcttatcgagtgactagacagaaactcctttacaaaacacatttggccatgaagacaggttctatagtttaaggacctagggtctggtgtggtctctgactgagaaagcatagcaggctataaagtatgcggcatctcccctaagatgggttctatgcgctggaagctaaaggtctagagagagagcatctgagataaacactctggtagacttgggtgaggtctgactccacccatagcaaaggtcaccaggtcattagcagcatccactcccagctttctgggtgggaaacggagatttcttccactgaggagacactattaacattaacattccctcttgcttgctacatgttcccatggtgattctaaagtccagacgctgaccatcaagattaggccatcatcgttgataaacccagtgaaagagcaagctggtgtgaattgtattctttagcagagtcaaaaatatttcagaataaaagatgaaaagcaaaaagtgagaaacgaggaatgcagacatctatcaaaggagtggcgggtgaccgtgcaaaggtgaccattgtccctgattccaaactctgttccttgaagaactatttaactttgcaacatgctggttacctgtaagtcaaat

SEQ ID NO: 604 - DNA, 3698 bp, Mus musculus
atgtcctctaagccagagccaaaggacatccaccagccgaatggtactggccctactccttctccctgttcttcggatggccctgggcgagagcccttggctgggacctcagagttcctggggcctgatggggtggaggtggtagtgattgagtcccgagctaacgccaagggaattcgggaggaggacgccctactggagaacgggagccagagtaacgagagtgacgatgtcagcacagaccggggccccgcgccaccctctccgctcaaggagacctccttttccattggactgcaagtgctgttccccttcctactggcaggctttgggactgtggcagctggcatggtgctggacattgtgcagcactgggaggtcttccagaaggtgacagaggtcttcatcctggtgcctgcactgctggggctcaaagggaacttggaaatgaccctggcgtcgaggctgtccactgcagccaacattggacaaatggacacacctaaggagctctggcggatgatcacggggaatatggcccttatccaggtacaagccacggtggtaggcttcctggcatccatcgcagccgtcgtctttggctggatccctgatggccactttagcatcccacacgccttcctgctatgcgccagcagtgtggctacagccttcattgcctccttggtcctgggtatgatcatgatcggagtcatcattgggtctcgaaagattgggatcaacccagacaacgtagccacgcccatcgccgctagcctgggcgacctcatcaccttggcactcctctcaggcatcagctggggactctacctggaactgagtaaggctaaggccactgagaatggcttggagcactggcgatacatctatcccctggtgtgtgccttctttgtggccctgctgcctgtctgggtggtgctggcccgaagaagcccggccacaagggaggtgttgtattcaggctgggagcctgtcatcattgctatggctatcagcagtgtgggaggtctcatcctggacaagaccgtctcggaccccaactttgcaggaatggctgtcttcacacctgtgattaatggtgtcgggggcaatctggtggctgtgcaggccagccgcatctccaccttcctccacatgaacggcatgccaggggagaactctgagccaactcctcgccgctgccccagtccatgcaccaccttcttcagccctgatgtgaattcacgctcggcccgtgtcctcttcctccttgtggtcccaggacacctagtgttcctctacaccatcagctgtatgcagggcgggcacaccaccctcaccctcatcttcatcatcttctacatgactgctgcactgctccaggtgctgattctcctgtacatcgcagactggatggtgcactggatgtggggccggggcctggaccccgacaacttctccatcccatacttgactgctttgggggacctgcttggcaccggactcctggcactcagcttccatgtgctctggctcattggggacagagacacagatgttggggactagcttagccattcagtctttcccccacccctctgcactttctatttggatttttattttccttttgtttccctaccccaccctacactacactcccatgcctttctgggatttcactttgataccaaattctcattattttcaatgggaattttttatacattgagccaagtttggataggaagaattcgggacagacagatgggctgacataagcagtaaaagtagacttttgagacaatcaccaagtgcaattccacggtgggtgcctccagaggaggttagatcgggaccttggcatcctgtccagcatcggggacctttgcattagctttagcgacctcagcctcggccctaatgagaaactctcaagtgggctctgggttgtttagggtttggctgaacagagggaggagggataattaacactcccacacatgcacgcacttttatagatgtggaccaacttcacagcactgggcaggggaacgttgcttcaactcctcgtaatcacaggcctgctccaggccagcctgcccgcagagtcacgtgcactggagattccatctgcgcacatgtgccttgcccaactgcctgattgcttcccagctgaaatgagtggtagtgacccgggctcttcacggatccatgtcatccacaggtttccaaaggtccatgtgccccctgagtctagagaaccgagttcaagcctcctctctttaattctctccacacactccgtctccgcgcagcttgccagatgggcttctaagattggggataggacaagggaatgtgccaaatgacctggagattgaggcaacggggaggggtggggggtgtctcactgccgtctctcatgacataatcacgtggtcagtcttggcctctgtcacttcctaaacacactcattctatcacacgagggctccgttggcctttctctcggcttctgcccacagacatgcatcaaccattcactcattcagcaaatctcagcctccccgagatgagcccttccacagcaccggcctgcaataattcttcactgagcagtcgttacggggcgcatactgtgctaagttcagtgcctggcatcaacccaccagtgctaagggaatcgctgctctaacctcacctcatcccctaggctacagaggccattgtgcctcttcaacctgacagtaaatgttccctcgttcgcccctaactctgcagtgactgccaaccccgttgctcaagcagcagcatgtcctccaataccctcctcccgcagcctctctcctctccacatcttgctacccactcagaagagggcttggaattagcaagctggatatcaataggctgcttcagtatctgcctcgtccatgattcaaagaaaaccaaagtcccttccctacacatgccccaaactgttcaacaaatggggtgcaggctgtacttctggcctgtctgtctggaatccataaattcttccccctgtgtagcctaaagggtcagcctccaagaaaaggattaagcagtgctccgtgtctaccaacactgtgcttagacctagagactcttctcggcctcatttcctctgtcatcacctgaaatcagaactgtcgaattggacagattcatagagattgtctagttggggttgtgtcaggcagatcagtgtggatctgagtttatttctgctcttccctctggcctaactccatctcaaaacacaagactcttgcacaggcatcataccctaagactgtgaccccagggtccccagccacttgctctatcctgacatctggagttggatcaggctgtctggagactgaagcatccttcttcctttgcctagaaaacagaaaggtaggggcgcccaggctcagcgcatgtgagtggaggggcctggagtgacaggagagtgacttcaggagattcatttcttcccaccgggttgcacctattgcatgtacttttggcctgactggaagaaacaaaattggtttactttcatatccttcaaaagttacagaactgtgtcttaagagaattatttatagttactataactgaattgacaaatgtcgacttaactgataaattatatttggtaaaataaaatggaagtttatttcaat

SEQ ID NO: 605 - protein, 516 aa, Mus musculus
MSSKPEPKDIHQPNGTGPTPSPCSSDGPGREPLAGTSEFLGPDGVEVVVIESRANAKGIREEDALLENGSQSNESDDVSTDRGPAPPSPLKETSFSIGLQVLFPFLLAGFGTVAAGMVLDIVQHWEVFQKVTEVFILVPALLGLKGNLEMTLASRLSTAANIGQMDTPKELWRMITGNMALIQVQATVVGFLASIAAVVFGWIPDGHFSIPHAFLLCASSVATAFIASLVLGMIMIGVIIGSRKIGINPDNVATPIAASLGDLITLALLSGISWGLELSKAKATENGLEHWRYIYPLVCAFFVLPVWVVLARRSPATREVKGWEPVIIAMAISSVGGLILDKTVSDPNFAGMAVFTPVINGVGGNLVAVQASRISTFLHMNGMPGENSEPTPRRCPSPCTTFFSPDVNSRSARVLFLLVVPGHLVFLYTISCMQGGHTTLTLIFIIFYMTAALLQVLILLYIADWMVHWMWGRGLDPDNFSIPYLTALGDLLGTGLLALSFHVLWLIGDRDTDVGD

SEQ ID NO: 606 - DNA, 41199 bp, Homo sapiens
  misc_feature (1)...(41199): n = A,T,C or G
aattagccaggcatggtggtgcatgcctgtaatcccagctactcccaggaggctgaggcaggagaattacctgaacccaggaggcagaggttgcagtgagccaagatcatgccattgcaccccagcttgggcaacaagagtgaaactccatctcaaaaaaaaaaaaaagtaaacagaattgccatatcacccaacaatggtatatggtcaaaagaaattaaacaaaagatattcaaatgaagcttatatatgaatgttcacagaggactattcacaatcaaaaaaggtgaaaacaacccaaatgtccatccatggatgaatggataaacaaaatgtgttgtatccatacaatgggatattatttatccataaaaaggaatgaagtattgatctatgctacgatgtggttgaaccttgaaaacatctggatagaagaatatttaagggcaaaaaataaaacaacaacaacaaaattaagttaagtaaaaaaacccattcgcagaaagttacatattgcatggttccatgtatatgacatatccaaaatagggaaatctatagagacaaaaactgactagtggttgactaagcagggagaggaggggagggaaggggagagtgggtactgactgctaatggatacaggatttctttttggggtgatgaaaatgtcttaaaactagacagagtgatggttgttcaacactatcaatataataaacaccaatgaatagtacattttaaaatggttaaattcatgttatgtgaattttacctcaaaaaataaataaatccaaaaaaaaagttatttaggaggtagagtcgatggatggcaaatggtgattgatgggtggtgggcgaggaggcggggaagtagaggaaggagtcaagaatgactcccagatggctgacaaacaaatgggcgagggaatcctcttttctgggatggagaagacagaataagaaatagacatctgggagagaactagcgcattttggatatcacaagttggaagtgctgagacatccaagttcagagctcagaagagaagtctaagacaaagatatttgggcatcatgaacagagcatcataaatggacactatgcaagtgaatgagactccatatgtaacggtctgacagagaaagaaggcccagatgtgtaaattacaaggtgtcagcaaacatcacagaaattttaaaatataaggtatttcaaaattaatataaattttaaaatataaagtctctgtgttcaaggactttgtgatcaagcataaaacaatacgttcatgtcaaagaagccttcagctctgtaacatatcaccaaagcctaccatttcatctttcatttaacacgtccctacgtgcatccaaccacatgttgaagaacctgctgttccttgaaaatgccaaattctcccttgccttcctgccatttcactctgttctctctaactggaataattctttcccatttccaattcttttaggcatatacttaggaatgaaattgctcagtgatatggtaattctgtgtttaaccttctgaagaaacatcaaactgtttcctatagcagctgcaccacattatattctcaccagcaaatggacaaggttccaatttctccacactctcaccaacacttgtcattttctgttattttctctcttttttttttatggccaacctactggatatgaagtggtatcccattgtggttttgatttgcaattctctaacaactaacctaaataacttttaaatctatttaccattctccaacccactgacctcattttccacctgatatattgcaacagcctacctcctagggtaattattaggattaaatgagtttgcatataaacccacacagtcagattcaatcaaagcacctccatgtctttgaagacttcctgagccttgccttcctgtgacaaaatatacctttgtcacagtgtttcctcctgtgacaaaggtatatttttgttaaagctccccaggagattctaatatgcagccaggactgagaaccaccagactggggcagtttcccaacccagtaggatcatgggagtcacctggggcacttatttaaaagggtaggtttcctggcccagcaccagacgtttggaaacagaatttccaggaaagaggcctggaaatctatattttaaaagaagttcccaacaggtgattcctatgaccaggccagtttaggaaaccctggtctagaggataatcctagagcagtaggcagtaaacacagagggcagtttgaaactaggtaatctggtttgcaagatacagtctttttgcatcctggctcttgcaagataaagtttgctcatctttggcttgtgacccactgtggggttgctgcccctattagctcctacctgcatctatgtaagagactgtccatcattaaccctttccaggtaggcatgccctcacactctgggaagtctaaaatttcacgtgaggcccagaaaaagcctgagctgcccgttccaagtgcctaatccctgtttattggctgtttctctttggtgagatcttaacagtcctactgcgtgcagggaatgttccaaatgctatattatcctaatcctctcatcatctgtgaaggctaatgcaactccatcttggatgctaatccaccatgttgacttctgattaactccagttctggaaatgcctctaagatttctattttatctactattccttggtaagaccatatacttatcataaatcctgctcttaggttaaaacaactgaccataaatcctgcccttagggaacttcacatagcattctcgcctttccctacaattgtcctacacattccttccctgtaaggtataggtattccttccttataaggtattcaagccctggtcttactgctgtccgggatatagacagggcttctgttcgcaagtccctattaaatgcttctttcaagaaaccagatttgtcagcctctttggcctctgagctttctcagactttgggggtaggtttgcatagaactgctcaccatggaacatatattgcagaaagggaattatgtctccatttgatagacatggcccaaggtcatgtgcctaatgaattgctgagccattcatggattcaaatccatgtgattacaatgctgtggcatattccactctgcagcactgcctctcaaagattacttttctatccccagttatagttcaccagaccattttgtttgctgtcaaggcttcccagctatactcagtaaattcagagctgcagctccaaatacctggaaccatcctgcctaagggaatcccagggtgggtatccagggggctttggggaaagggagctcagttatagagaagcaaagggaatgatgacagtgctgagcacagatggccacacttccctatcccacccccatcactacatcctcctaaaactgaatgaagccggaaggggatgtcacctcagctctgggcagcaggaaagaagttgacctctgggagggagggagcagcggaggggtcacagcaaggggaaaaatgggagggggcaccctcccccacagaacaaaagatagaaaagtttccagccacgtcaggctagtcttacaactagccatgctggttagggggtccaggatctatggggctctggaattttatgatgtctcaagatgagtattcaggtagtctatggagaagccattggtagacagtacttggcccagaaggaaggccatggggctaagagaacctcaggatagaggctaaattaaccacatattaggacaagtgccaagcaagactgaagaatgctgccccacagaggaccttcccacacaggctcctccacaggcccctgcctgtggagtgatcaacaattccttttgccacaacactctttcccaccccacacccaacatatgctcatattctaaatgaaaacactgtgcttgctatacaaatgatgtttcatgacaagtcacccagcctctctccaactagatggcgtccccaagctcagtttatataaaaatttggggtgctactactagcttctagttaaatgccacattatgttctgaaagacatgaggaggggatgctgtgagtttgttagggtggtgcaaggggaaatttctgtctcccagagtaacaggaatcagtgagactcttgaccagagctggtcaaggatgctggagagaaacacagcaagagaaaaacgctgtagaatgcaacaggcctatgaaaacagtgcatggagaagaggctgattcggtggtcttccatattcaggatggacattacaggccatgaggaagttaaagctgattttaaaaaaagagttgcccaatgcaggttaggaataagaccctccaaccaaagtttcagggaacctcctttggagaaagaaatgtgtttctaggtgtggaagagctctcttggctaacaagctcaaagactgggcatgtcttgaggcaagagagagtccacatgacctttggaggttcttgtcatacaaaggtccacagtgatgctcagagaccctcactatctttttgatacccccaactgcgtctctccttctgaagtatctggctggcctgctacttgctggtagttcctgtcttttcatctgtgacctccgctccctacatctgtgctcatcatttcacagactgtagctatttctgctctttcagtagagaagggccaggatgtcttcctcttcctaaggtcacagctggctaagccagaggaaatctgcttcccccaggtcctcttggtgtttgactctagggatcagcacaatacagagcaaagtacctacatcagctttatccacctcatccatcattcattcaacatatttattaagtacctactatgtgccaggagctgggtttacactagtgatcaaaatagatatagagattatattcttgttccagtggccctgacacttcagaagacaccaaaaccaagggcttttgtatttatttactcatagaaatatttgcaatacctataaccaacaaaggactcgtatctgatattcataaagaactcctacaaagtggtaagacagggctgggctcagtggttcacacctataatcccagcactttgggaggccaaggcgggcggatcacttgaggtcaggagttagagaccagcctggccaacatggtgaaacgctgtctctatcaaaaatacaaaaattagcctgtcatggtggcatgtgcctgtagtcccagctactcaggagactgaggcaggagaatcacttgaacccaagaggttccagcctaggcaacagagcaagataccatctcaaaaaaaaaaaaaaaaagtagtaagacagaaggaatagaataatagaaaatggacatgatacttgaacagatatccaagggtcaaataaatgcatggaaaggtggtcaacttcattggttatcaggataaagcaaatttaaactacaataccactatacacccaccagaatggctaaattttttaatttttctagattgacaatatcaagtgttaatgagaatatagagcaactggaacactaagacgctgctggcaggagtgtannnnnnnnnnnnnnnnnnnnnnnnnnnnnnnnnnnnnnnnnnnnnnnnnnnnnnnnnnnnnnnnnnnnnnnnnnnnnnnnnnnnnnnnnnnnnnnnnnnnnnnnnnnnnnnnnnnnnnnnnnnnnnnnnnnnnnnnnnnnnnnnnnnnnnnnnnnnnnnnnnnnnnnnnnnnnnnnnnnnnnnnnnnnnnnnnnnnnnnnnnnnnnnnnnnnnnnnnnnnnnnnnnnnnnnnnnnnnnnnnnnnnnnnnnnnnnnnnnnnnnnnnnnnnnnnnnnnnnnnnnnnnnnnnnnnnnnnnnnnnnnnnnnnnnnnnnnnnnnnnnnnnnnnnnnnnnnnnnnnnnnnnnnnnnnnnnnnnnnnnnnnnnnnnnnnnnnnnnnnnnnnnnnnnnnnnnnnnnnnnnnnnnnnnnnnnnnnnnnnnnnnnnnnnnnnnnnnnnnnnnnnnnnnnnnnnnnnnnnnnnnnnnnnnnnnnnnnnnnnnnnnnnnnnnnnnnnnnnnnnnnnnnnnnnnnnnnnnnnnnnnnnnnnnnnnnnnnnnnnnnnnnnnnnnnnnnnnnnnnnnnnnnnnnnnnnnnnnnnnnnnnnnnnnnnnnnnnnnnnnnnnnnnnnnnnnnnnnnnnnnnnnnnnnnnnnnnnnnnnnnnnnnnnnnnnnnnnnnnnnnnnnnnnnnnnnnnnnnnnnnnnnnnnnnnnnnnnnnnnnnnnnnnnnnnnnnnnnnnnnnnnnnnnnnnnnnnnnnnnnnnnnnnnnnnnnnnnnnnnnnnnnnnnnnnnnnnnnnnnnnnnnnnnnnnnnnnnnnnnnnnnnnnnnnnnnnncagccttaattccccacccaaccccacaccccgtattcacaaacctcatctttctggacaagtcccagcatttcctagactagcagctacttctcctggcagaaaaacccagtatttgaggccaaaactggggtctgagacactgatattttgctctagtaggtcctgtgagtctgcaggcccttgatgcaaatgctccagagctgatctggaatcatcctgggggtactggtttggggtgggtgaggggaacagggtttggtatgtgtatttgtcatccttatcaaaaggaatgacctgctcaggttgctgtgtgtgctcttgtgagcacgtgcccaaagcttcatacacagcactgcgatctcttctccccaggcacatctccgctccaaaccctattcaggggtctagagccatgttcgaatgcccccgggctactttcagggaggaaaaggacaggaaggaaccgttggtcacaggttccactgacaagaggggaaaacttgggagtgggggttcctttatgagggaggtcacaccccctgcacaaaaacatcccaaagagaactggcattgagcttgtgttggagaggtggagataccccagggaggaagtggcgaaaggtgagcatgggaacacccctctttgatcccacaaggtgcgtcagggaaagttggatttcatttagtccgggatggtgacatctctccgcacgctgccaccaggctcagtgggtcagaggaagtgaggctcccctcctctccgacctcaggtgatgcgtgtgcgaccccagccatgggtctgacctcctttcgctcccgcccgccagtctccacccctttcaaggccgggacttttttaaggccggattcgtcaggggtgagccatttgctcaaggaacgcggaatctggagggagcctaaagtgacgagccggcgggagaagagcaaggtagggactgttctgtccgggtaccaagtgggaggagggagcacgcggctggctgcttgagcccgggggtcagaggtggctggctggctggctccacagggacgtttaccggtcttcccgaaggccagaggctccaaggaaacatccagaggcaggagaggacgcgcactgtcgcacacgcctctcaaagtctgctggggctccgacgcggcgcagcgggcccgggggcggtagcaccacgcagcgagcccgggcagcgggcccctcggaccccgggccgatgggcgctgggacccgcgcgctccaggcgcatggagccggctcccggttcccgtcactcctcctactgcgtttccccggcgccccgcctcctgggcacgaagcgaaggaagggggccgggccgaggttgatcccgccccctccccagtccctgattggctgctgctgttgtccatccgagaatctatttttgatggagcggggggggtgccacccagtctgccccagatcacgtttgccaccggcagccaaccagttgggcccgagtccgcgggcaagaagcgattgggggcgcgtgagctcggctccccggtcccccgtccgggtgcccccccgccgggcccgaagcgatatatcctgccctccccggccacctcccccgcgtggaagcggagcggcggcctcgctgtaacgcagaagcgaaatgtagcgagccgggtgtcgcggctggacgctcgccttggctgggggtgtgggggggcacgccgggggccaaggaggactgtcgaggaggagtgatgagaagagggggtgccctgcaccccccgagaccacgggccacgctgccacttgccaggcgccccccttcctcccaggcgaggggcaggtcagtcctgtggggtcctggggcggggagggggtggtggagggcggcagtcctggcgcgcagcgcatttgctgaatctgagtggtggagagactgaggaggccacccagttactttctctccctcctcggggttggggatactaaaatgggtcttttttgtccccgcctgggaggaggggatagggcgtcctggttcacttttgcttctttcgtcccagggccttaggcctgtctgaagtctctttacagggggagtggtgagggaggactggcttcccctcctgggagccccctctcaggttcagtggcctgccaggaacacaggagggaggcgggggtgtcagcttttagcggactcagaaacttttctggcataggggcactggactcagaggtttcctcctggatctctggtgagggagtttgaaagaaccacagtactgtgtttaaggagattggaaaagggagtcctggtgggtgactgaattgatagaggaaacagttctcctgggccagttcctggggtttgatacctcctttcctaaactgaacttgactaattgtgtgtgtttggaatacttaaggacctgttcctcttacctggtggaactctctttaaatttattttttacgaataagagctcttctggtgaaatggaataggatgggagtccatcaggaattaggaagcctggggattcctttaggcagagaagtggagccattacagctaaagagatgcatttggagcaagtgcatattggcttacggtgctttggtttttgttttgggttttttttattgctacttttgtttttttgtttttgtttctaagaattccactatatccaactctcagtaaccctggggaacaggaggagcctaattaactgaaatgcgtgggtaataagcaatcgttttatgctctgtcccttctaactgagataactcccttgtcctatctgacaagctcacagggccaagagcagggggagacggggagagacagaggcctggatccgagtcagctgtctgagctctttgtaacactgttgactctcaagggcaggagtgggtaggcctctggctcttggccttggtctggcaggcttgccccactgcccagggagtcctcctagctttgttttgttttctcagaagctagaacgatctggggtctgggggacttcactcagcaatcagtttctccctatttctttgccctgtgtggctgtctttctgttgctgtcttgtgatgataagcagtcactttatacaggggtggctgtgtggcagggagtttgtgactgaatttgtaactgaaccccacttaaataatgcagggttcttaatgggcattcaagaaggggtcttgctgaggacacacctacccacccccagttgctgaggaaacagtgcagagggcttctgcacagcatcttcccaatcccaggctggtcacatctcattgctggtgaccacggtggtgatccctcaggagggttgctggtggggaggatggcggggatagctcctgctgagcctccagatggagcagtgcaggactgagtaatttttgcggaaaaagggaggcaaatagcaaactctatagctatatgatgaactcctaacttccttggggggaaattctcccagtacaagctgtcctttgctatagtgtaatgttctttttcttttctttctccttcccacataaggtgttccacactgattctcgtgactttaaggaccagggatttgaagaggtattagctcttcccaggaagggaggaagtttctggaagagaagggaaagacggcagacgctgcgctgggaccagcagagcctgaggagctgtgggaagctgacagagcccagccaaaggagcgggaaggagccgcagccccaggctggcactgtgttctgaaagatttgaactcaagctgctttttacggaagaggggccacttcagagggcaccccagaatttggttgagctcttctactctggatgccccctgctctgaggagcctgccactgagaaccaaagaagataagaggacagatactttttcttcaagcacagagctggtgggttggagtcaggcatctgcacccctagtggctgtctggtgaggaatttcttgtttcttcccagcttgcggcttcagtgcttgatggggctgcctgttggtggatcagtttttgcagtgcctggtaggagtggagagccgtgggaagaggtcctgcggcgcccaagcctgggttcaccccaagactaagttctttcccaagttagagaagaagagagaaagcaaaaagaagagaggaaagttctcccttcccctcctccgtgcctgtcatgtcctctaagccagagccgaaggacgtccaccaactgaacgggactggcccttctgcctctccctgctcttcagatggcccagggagagagcccttggctgggacctcagagttcctggggcctgatggggctggggtagaggtggtgattgagtctcgggccaacgccaagggggttcgggaggaggacgccctgctggagaacgggagccagagcaacgaaagtgacgacgtcagcacagaccgtggccctgcgccaccttccccgctcaaggagacctccttttccatcgggctgcaagtactgtttccattcctcctggcaggctttgggaccgtggctgctggcatggtgttggacatcgtgcaggtaggacctgagtagggcagctcttgactgtgagcccagggccacctttgcctgctgggaaacttggaacttcctctctacctccctgtcagaagtggctgctgcttcctagaatactgttttcctttggatcatgtcctcggtttcttcttggtctagttcctttctacagaagcctcaaggaaaccgagtagccctggggaggtgatcagggcagtattgctaaatagaaacagaattggctcccgagctcaggcttgggagaggagagatggaacagggtcgttgcttgccatctctcccaagcagtcctgccgagcccagctcagtaggagacatttacaagggtctcctctttatgccttttgtcccctgcatttggggtttcaaggatacccatagtagaaagctcagtttcaagcctctcctccatccccctactgggcaggaatttgttcagctgccaagagggtctcaaattaagtaggaaggctcttgaaggcattttgtgttgcttatcttcctgtaaccttggcataatccccttggggggtgggggtgggcacttgctgtctgatgcatgatttggagatttggtgtaacaagacccaaatgtgctaattatctgctgtaaatggggacaaaatgtaactaggcctgggcagaactgtctctcctctttgctcctcacctgtcattctgaacctgccctgggcaaagagggttctttttgaggacattgggtagaatgaaggatgagagtcggtgggacatggaatctaagagccagagatgtgccatgttaatttattgtgagtcaggacttatgaagaacctccaggtccaagagttaaagttttgtttttagataaaagttttttaggcacagtgtggcacaccaaactttttgaaggtgctgggtttacctaagtaattcagcaatgtgtatcaaattcctgctgaatgctggcctctgtcctaggtactcagagaaatattaataccaaggcaggaggagatctggcctttgctttttgggacccccagtgttccctgactgtgatatctcccagaaggacacgaagcttagcatcaccttccctgtgccaagccaaccctacagaccatagtgatatagagttctgctggtaggtctcaccatgcctgtgtcctgggagactgaagggggttggttcttgatagtgtgtgcacatggagaactttgacttgagcccttcaggggaaccctgcacctttggttgctcatgagagtgctgtttaagtcatgccaaagtgccttgcactgcctcccctttccccaaaactgttatcttgaaggttgttcctacatggaggttgggaagccagcctggagctttgggttcctcctgctaggggctgctcctccccctagggccgggactgggacagtaggaggaggagaaagagactagggtaacatttttcttcacctcttctattcctttcctgtggcctcagttctcattcttgaagttgttgcattctggtttgatacctacaaagggttgcagagccagggtccagaggtgaactgaagagagttgtcttattttctggataatagtaatggtagtggggaagcatttggggggctcttcggtaggcccatgaggtaggatccataatcatctccattttgtaggtagggaacttgtagcttagagggattaggtaacttgtccctggtcatctgaccctagagcccacaccactaacccctgtggccttcgccatggccatggttcaccagttggttaaaaactcggagagggggccgagctcagtggctcatgcctgtaatcctagcactttgggaggtcaagacgggcggatcacctgaggtcaggagtttgagaccagtctggccaacacagtgaaaccccgtctctactaaaaatacaaaaaattagctgggcatggtggcaggcacctgtagtcccagctacttggaagctgaggcaagagaatcatttgagcccgagaagtggaggctgcaatgagccaagatcgtgccactgctctccagcctgggtgacagagcgagactccaactcaaaaaaaaaaaaactctggctgggcatggtggcttatgcctgtaatcccagcacttttggaggctgaggcaggaggatcgcttgaagccaggagttcaagaccagcctgggcaacaaagtgagaccttgtctctaccaaaaaaaaaaaaaatagtcaggcatggtggcattctcgtataattccagcactttgagaggctgagataggagtgatcacttgagcccaggagtttgaagtcgcaatgagctatgattgtaccactgcactccagcctcagcaacagagccaaacgctgtctcaaaaaaaaaaaaaaaaaaaaaaaagactctacgaggagcctattttctttgtctttccttgaagaactgggtggattagaatctggattaattagcgttatcttctgaagtgagcaagaataaaagttcttagatggggtagggagggacccccgcatacacaccacacccctacccatcccacacacttagattccaaagtttctgatgtgttgccccatccccactccaggcccatgagctggagacattgagaggcctgggtagggaacctttggagctgctctcagtgtggcacctcagctcacctcagagctagggtccacttggtgtggatgacaatgacaggtttgtccatgtcctcctcccccagccttcctgctacagctgggctggagcaggccctgcagatggcaacagtgagatggcaggagggggtgagtgcagagggaccgagacatgggaccacagggagattgttattccacatccatgggagtaaaagggggactgacaatctcagattcaggaagagcgggatggtttctaaggattcacacctatattaccccttcataagctaagatggacttcagtaagagaatctgaaagtgccccaagaccatggggccatctggagaagctggctatggagtgtccccagcatcttggagcaactgagcaggagtccatattgggcctggttcagatgtctccttggtccagggcccccatctttccttgctgctgtagaaaacttggtttctttttcaccaacgagatgcaaaaaaaataaaaataaaaagttgaattttaattttaatttaaaagaaaaagaaaacccactctcttcctagaagggtcatttctgcctcctcttatctgccctcccgtaaatgtgcacagcagcatctgcagtgaaataaggggctggtgctggcccaaagtaggaaaaggataaatggacctccatctgctctaacttcccaaccgtggctgaaagttcctgcagcatctggaagggaagcaggctggggcctggtgttggcttctgaagggggttgggatatgggagcctcctcactgcaggagccttgtgcccatctgcccagtttggtcctaggctgctccggatgtctcactccctttatctgtcagcctttgtgagggatggggtgacaggaagtagtgtgcccatctgcactttaattcccagctaggttaagacaggtccttattttaactcactactcacctgctaaggatcttgaacaaagtagatcctgctgtgtatacagaagtctacaacgatgaaagtgcatggcaagcgtggccttggggaagtagagtgggaaggaagtattcctcctgtgcctggcctgctcctgtggccgcagcatccctgggcgggacactcttatctgcttcacttgaccaccccttctgcttttcccatctctgtcccctgcctgctgtcagggacccatttgctttgctcctgctttgtcctgcaccgtatatccaggtgttgccctaaagccctttcctggacacctagaggatgccttttggaaaagcctcagacaggtgaagcctggggttactgtaatctcatctgacccagtccttaccctaaaagatcagctccagcccagcttctcccacaggagcccagattctccccagcctggagcctaaagcttgtatctgggaatttaagtcttcttaatgtcttgattcctggctctgactttcttccctgctgctaccctcctgaggtggctcaggccagaacccttgaaggcaggtcagggtcagtgtatgagcttggattggagtaggtgaaggatggaagaggcgcattggaagggcaaggaagaggtactggcaggaccactgaggatcgagacttaaggtgattgctgtgcctcaggattcattttggctatgggggaggcagtctattccctcacctgcagaataccagggatccatgagcccctcacaccaaggttagagaaggaaagagatgaggagctgcatttctgagaagtagttaaaatctagatgctcccctcacctccaagcagggcagcacttcctggaacatgccctttttcatccccatcagagcaggaaggcgtgggtggctgcttggcagacgggtgtgacttcaggggcagatactcctagcctggatgaacaggatggggctgaatttggccaaaggaggaagaagagctactcactgtctgcccctgcccatcctgtctactcctaaccttaaggccaccttgattcctgggctggctccacatctccagcctccagcatctctttccagagtcctatgcatgcccatgtgtcagaggctttctgcctgagctgcagctttgagagggtttgtgggtgaagaaagtatgtgtgtaggaattggcttctctgacccaagtgccaactcggggctttgctggcctggggtcaggtcgtttgaggttccaggctatattctgtaagagtcgggaagacttttgcataggggctgttactgtgactgctccctctccttgcctgtctgtctcttatcccactgctcctaacactccgtactttgtagatcctcctgtagctataaggagagggtgcattgtgctgggaggtagagagatttggggtgcttatggtagcaaccagaggaacttagctgagctttatacatttttcttaaataataataaaagcaagcaatattcattacaaacagctcagaaaacattgcttgcatacatgtggagtcttcttgtgggctttttctttctatgagtacatgtacattacatacacctacctgtagaagtcagattttcatggagctggcagcttggaagcagggtggagctggtgttttggggtgaagatgagctctgaggctgtgctctgagaggagctttgaaagcccgcaagggaggggagaagagggggatttttcccctctctggagctggtttgggaggaagcaggaggcgaagcagagcaaggccagactgcagggagctggagcctcagtggtatgtaccagccgtgtccaagagtaacagtccccaagttgctccagggcagatggggctcactggggctgccttctctctggggggtcttagggtgggaagggattcacttcccttcagtgtttggagagggctggctcatcctttggctgcctggaagcccagtaactgttgttgagatggggggcagtctcttccccattgttagtccctacggtggggcttccctaaggagagtcccaggtcttggccagaccagaagctcaggcaagcgtatgctccagccccagtgaaatgagtccttccccaggatcctgtgaggcctcccaccccattcacacagggagagctccgacaggaaaagagaggttcttgccttatagggccacccagcgcccagcctctcctggtctcaagccctagccccaccccctctgatagccttgcttatctttttggttattgtggtaaaaaatgtgtaacataaaatttaccatcttaacccttttttaagtgtgctgttcaatagtactacgtatattcacctcattgtacaacagatctccagaactcctcatcttccccagctgaagctctgtacctattaaacactcactcttttccctgctcccccagcgccttgcttccaccattcttctttccgcctctatgaatttgactacttaggctgggctcggtgcctcatacctgtagtccccacactttgggaggtcgaggcgagaggatcctttgagcccaggagttcgagaccagcctgggcaatatagtgaaacccctgtctctacaaaaaatacaaaaattagccaggtgtggtggtgcatgcctctagtcccaactacccgagagactgagatgggaggatggctggagcccgaagccatgattgcaccactgcactccagcctgggccacagagtgagaccgtgtctcaagaaaaaaaaaaaaaaaaagaatttgactactttggatacctcagataagtgttttttatctgagtgttttatcatacagtgttttttatgactagagtaatgtcctcaaggttcatccatgttgtggcatatgacaggatttccttcctttttaaggctgagaaatattccatggtatatatgtaccacactttgcatattttgtttatccattcattccttgatggacatttgggttgcttccacctcttggttattacatatagtgctactatgaacatgggcatattaatatatcttcaagaccttgctttctattcttttggataaatatccagaagtgggattgctggatcatgtggtagttttatttttaattttttgaggaaccaccgtactgtttttcatagcagctgcaccattttatagtcccaccaagagtgcacaagggttccaatctccacatgcttttttcttttcttgagacggagtcttgctctgtcacccaggctggagtgcagtggcactgtctcggctcactgcaacctccaactcccaagttcaagcaattcttctgcctcagcctccccagtagctgggattacaggtgtgcgccaccattcccggctaatttttgtatttttagtagaaacagggtttcactatgtttgccaggctggtctccaactcctgacctcaagtgatccactttccttggcctcccaaagtgctgggattacaggcatgagccactatgcccagcccaaactctacatccttgctaacactgattattttctgggtttttaaatagtaaccatcctaatgagtgtgaggtgatctcttactaatctacagtattgctcaactttattttatctattttattttattttattttattttattttattttattttattttatttttgagacagagtttcactcttattgcccaggctggagtgcagtggtgtgatcttggctcactgcaacctccacctcttgggttcaagcgattctcctgcctcagcctcccgagtagcttgggattacaggcatgtgccaccacggccagctaatttttgtattttcagtagagacggggtttctccatgttggtcaggctggtctcaaactcctggcctcaggtgatctgcccgcctcggcctcccaaagtgctgggattataggtgtgagccgctgcgctcggccactgctcatctttaacgacagagtgtgggtgttggaattgccttgaaagaccatctgatctggtccctgaattgaacatttttcaagagcttgaggcccttgtaacttgtctaaggtgtccagccggtctacgtgaggaggtgtactggggagataagcagggggccatccctgctgtctcctgtaggagacccaaggctcttggtccagtgcccttgccaaacatagtgcttggcctcccagccatgatacgcagaccaacccatatatatccgcctggcctcctgcctcctcctccctctccaaacctggaggctttccattcttaaaacaaataaaagaaaccacctaccctgttagggccagggagggagacacaatcctaaacccttttgcaagtcctcagtttcaattgcaagtaaagtagctttcaaatagccagtcctggttcctgcagtcctcttagcactaactagtggaatactgtctgaaccccagtttactcattcacaaaatgagaataaaaatagcccctaccttactgggttgttaagatgattaaaagagaaaatacatggagagcacttagcctagcacacaatcagtccttaatagatgttaaccaaagacattggtaggagagccaggattgattgtcttgggactagaactcaggtctcctgactcccggtccagggctcttcctacaggagtacacttgcttctcctagctgagagattgaggaaggtgtgtgggggtaaggcagtgcacagagaaataaaaagcctcttgcaggccagcattcagaggtttaggggccacagtcttaattcagagcctgttcagaaggagagttgctgtggctgaggcccaaagcccttggagatagaaaccaaacaaactctctaatctccccagcctcggccccagccctgtggagcccaactcttcacagctgagacaacagagaaactggactgaaggcaaaggggccagggattgcaatttgaggggggattgcaaaggatttctggggtgtcaggcagcccagggcagctcagctgtgtgggtccccattacccttccccacccacctccaggaaaacagaaaaggtagggccagactgagagtctcccaaccggcagaaaccctctccatctccctggttctgggtggcaggaaggggggttgtgttgtttgaagaatcatgggcttggtttggttccaaggttcttggaggaaaggtggctggcgtgctcactccctgctgattctatttcctcctcgagcccctgatctcagactacctgttgaacctcaatgcccgccctttggggcactgaaattcctgggttctgttttcacctcgtagcactgggaagtcttccagaaggtgacagaggtcttcatcctagtgcctgcgctgctggggctcaaagggaacctggaaatgaccctggcatcaaggctttccactgcagtgagtatcctggctgggaggagtggggcacagagaggactctgggcagcacagagccagagactgggagagggctacgagcccttctccactgcccaggcctggagtgtggggctggggtgggaagggagggcctggctgggcaggtgtagggagatcccaggctgggtgtcctgctcctgggcaggggctccctgcccaaagtggttcccaggcttggtttctggatgtcccagccacccctggactcctgccccaccccctacctctcaaccacctcgtgactgtttgtgcagctttgacaggcaggcatcatgctggttcctccacccgcacagatgggggcctcctctgatctccagccctgctttgcagctgggcgggagcagagccaggccctcccagcacccccagccccccggggccatcccattccctttacccatggcagcttgctcttctttaaggaaacagacagagaggagctgctcgtcattcctacctcccacagttgtgagccgtgacgattccgggcctgaacagatacagggccctgggctggaggtgggagatgataaaactcaggaggccagggatctccctgcagggtcaagagtctagagaaggtgacagacagaagtggcatccaagttaacccaccctgacttgccatacccgacttctggcccatgccacccactccttcccaaatactcttggagcctcagtcctgcaccagcagctgacctttccttccctgggatcgcaggctggcttcagagtcagggactgggttgttctgacccatgcaggaatgggctgcccagataagcagggcaaaggatagaatttgcctctgctcagctggtgtcctgagaggaagagaggcgactgcctaggggacccccttccaaccccccacccagctgcaggagcccagctttagctccttccctttcacctcagtttccctgatcctgcttcacctttccgggactgtcaggtcctgctctcagagtcttaggccacatgtactgcctcatgatctaggcaggagcctaatggatggagcttcaggccttttccagcctgaagctccagccccttgccctccctttcccaggccaacattggacacatggacacacccaaggagctctggcggatgatcactgggaacatggccctcatccaggtaagaaggcagggaccagagagggtgggctaagcttccccttagtcaggaatctctgaaaggcttaggtcagccccagcaggctcctgagtgaatctccagtatcccactgagctggcttcccccagagtagctctaggaggtaactaggttacccaggaaaacgcccaagatgaggagggcccagcatcacccattctggttctcagttcttggtggtgcacgtgcctttgagtcccagcagatcctggcaatatgagcagactcaggagtgctgagatgtcctgtgccactgctgtcccatctccccatgagaccacacaggttcagactgggagccttcccccttgaggcccaggccttgactctgggtggaagtctccggctctgttgaacctcactcccatccccagaggcacactcattcagccagtaacatgttctgggctcctgcagagtgcactgcccagtactagtggctggtgtgaacctaaataaataaagacatccttccagcctgggaggactggaccatgcagtccagcctgcctcctggggctactgccagccaggaagaggtctgcccagatgcttatgacctcagcttaggaagcccactgctctcagggctttctgagttaccactcctgtccccaggtgcaggccacggtggtgggcttcctggcgtccatcgcagccgtcgtctttggctggatccctgatggccacttcagtattccgcacgccttcctgctctgtgctagcagcgtggccacagccttcattgcctccctggtactgggtaagaaagggagggcatagaggagtaaggagtgccgccccagagaacactgcacctggcacttccactctctctttttgtttgttgagactcctttatctcttctcaccctgcctgcccctcctcccacttgctcaccaggtatgatcatgattggagtcatcattggctctcgcaagattgggatcaacccagacaacgtggccacacccattgctgccagcctgggcgacctcatcaccttggcgctgctctcaggcatcagctggggactctacctggaactgagtgagccaccaagagtgtggcttcttggagtcctgggtggggttgggagagatggtagtagtttgcaaatgtgcaagagtttcttctgtgttcttaaactatttggtttgaacacaggttgtaataattcctgatcttagagatttgaagctaagtactgatctcaaattcaagcaggcatcaggggcaggggaaaagtatcagaagtatattcctgtgtggtcctgcagattcttacttctcttggagggatgaggtggaaagggtaaaggaaaggaaccagaggcttagatctgcttgcaaaatgaagaagcgggtgggagatggtgttttctgggctccaatcaagagacctagagtctctgtcctctggtctctgtccctaattggctcagtgcctggctagctctctcccttggtttcctcatccataaaatggaaaaggcttgtcccacctacctcctgagctgccagtgaagatcaaatgggataatgtgtttactggcatttagtgtagtcttgctattgatctgttgggacattttcaggctgagccagggagaaacttagggtagggaaacacagtgcttatctccttctgacctctgccctctcagatcactggcgatacatctacccactggtgtgtgctttctttgtggccctgctgcctgtctgggtggtgctggcccgacgaagtccagccacaagggaggtgttgtactcgggctgggagcctgttatcattgccatggccatcagcaggtaggctggggccctgagtatccactcctaccccactccaacccttccacagacttctttttaaaccctggagagatggggtgggggtcagaccctagaaatgtgttcattagtgtttcagtcacatgtccttctgttgaaaatgacagaaaccatctgaactgggtttcattccaaggcagaatgtattggcctggagaaccaaaaaggcacagctgaattcagcgacatacctaagatcagggccccagtactctgtgactcttagctctgctcttctctgtcatggcctacagcccaggtttatgcttttcttactcctacaaattccagtgggaagagagattcttcccccaacagttccacaaagtcccagaatagagttccactgcttctcatctggtgacatgattatctccaaaccagtcagcgtggccttggggctgcaatcctctgattggatggacctggagcctagctatcattgaggcattgtcacctgagccacagtcactgagcttgagagaggtggttccctgtggaggagcccagtgctatcaccagaaagggaagtaaatgctgagtgggcagaacaacagaggtcctcagaggcagatagtcctgcaggctgctcctccggccaacttagagggcaggtacaggaggtggttgcctgacccagtaccaccagcttgttctggagtcactgtgcccagtcagaatgttatgagcagcacctaatcctgtcaagggaggcaaggactggatggtgaggaactcctgagagccatggtgcttcccttcatctccaaggataggtgggcctggacctctcatcccagagactaaggcagaacccttcagtggtcttgcgtcattttgtctttatgtctctatagtgtgggaggcctcatcttggacaagactgtctcagaccccaactttgctgggatggctgtcttcacgcctgtgattaatggtgaggtctgggcatcagctatcagagggcagggctgggggaaggaaagggacaggagaagaggacttaaggggttggtttctgtatcagtcagggttccagcagacgagaatctagctcagatggttcaagaccttaatgaagggactgcttacagaggtgggagcagagtaaaaggacagataagggatgttgaggcaccgagagattagcagcaatgggaagcctctactcctaaagggtcaaggggagtatcatagtccattatctgttgctagaacagaatacttgaaactggctaatttataacgaaaagaagtttatttagctcacagttctggaagctgggaagttcaagattgagcagctgcttctagtgagggcctcatgctgcatccaaacatccaaatggagaaacagaaggaaaactgggcatgtgcaaaatgggcaaaacaagagaggcaaacctcgctttatgacaacccactctcatgggaactatacctttcccaagaaagacattaatccatcttaataacctattcactcttaaaggcaccacctcccaccaccacatttggggaccaagccacaacatgagttttgttggggacaaactatattcaaaccatagtaacgagggaatagcattataggagtccagtgaaagctctgtctttgcccccaacatggggaagccaatgctgaaaagcagggagggattgggaaagaaatacctgatctctctctccacctgccctctggttgcctgctgttgcctcccactgaacaaacagtggaagcagccagcaagggagactgggtaatgcagtctgtggagaccagtcccccagagctcagagcaaggctgagaagagcagggagcaggttgggatgtgagggcaacagagaaatcagcacaggtcctggcggagataccagattccagagtttggagctcaaacctgatccttgaaactggttaccagaatcagcatatgaccataggatgcctgggtctgctcagagcattggagaggaggtgaggcaaggcagggcttcatcccctcagctgtgtaggaaggcaggtgcccatgctctactggtggagaagtcaggctctctgagtctgcagatctgcacgtatcctttccggcactgtcacagctttgccaggggaacatggaactgctgcatctccatagaggggaggatgggggaggctggaagatgcactggaagcaggggtctttgtcttccttcttagtgccttactcttcttttggggactggtgaatgggtgatgcccacatagaccctaaattaagacagaggacagtgcctctatagatagaagacaaagagtgagaagatcattttgttcccactcctccctctgacctttgtctgtgtctaagcccgtatgtgtctctgcaggtgttgggggcaatctggtggcagtgcaggccagccgcatctccaccttcctgcacatgaatggaatgcccggagagaactctgagcaagctcctcgccgctgtcccagtccttgtaccaccttcttcagccctggtaacggcagattcccagcctcccagccctggggggagtgggcctactgtcagtgagcttcacttaagagacagctggggccccagatccacaggttctccttctctgctgggctgtgccagctgttctgaagggcagagcccaggcaggagggctgtcttttcctggagcaccctaggggttggagaccacaggatgcagaagtagagacattcatctgtctgttgccctggggtatggtgccgtccctcctgactttgaaaggccttctggggccaggtcttctcctcccctcctctttacaccctcttttccccaattccagatgtgaattctcgctcagcccgggtcctcttcctcctcgtggtcccaggacacctggtgttcctctacaccatcagctgtatgcagggcgggcacaccaccctcacactcatcttcatcatcttctatatgacagctgcactgctccaggtacaaagtggcaggagcaggggcatgggaaggagccaggatgccctgcagggatgggagaggaggccagacttggcctcttagacactcaacctcctctttctctgtgtcagggcagctgataaacaccagacaagggtgcaggagaacagatggtagttccagtagagtcaccaacatggtgtgtgactttgaccctgttcttttactaccctgatcctcagcgatacagttgtaaattgagaggaatggaccaggggtggtagttttcatgcaggtggttgtaggatgctgagcctgtggggtttgcatgccaaccccactggccacagagctccacatggctctgttttgcatgttgagctttctcaagaaattcatttgcataaagcatcccatagcttgaaaaactgtcaaaaccactgcactagataatctgtcggatcctgtgtagccttgccattccataataccatgacactttctcccttcttgtattattacattgtaaaagctttttattttgaaatcattacagatttgtaagaagttctcaaaaaaaaggttcagaaatcccatataccattacccaatttccctccatgggaaaataacattttgcataactttaggacagtatcaaaatcaggaaattagcattgatgcaatctgcagtgcttattcagattgaaccagttttacatgcactcatgtgtgtgtgtgtgcgtgtgtgttcgttctatgcagtttttatcacaagtggagatttgtgtgaccaccactataaccaaaatacagaaaactgtttcatcaccacaaggctcccttatgctatccctttacagctagatccacccttattattacattttaaatttttataggtttgatttttgaatagtcacatagttcaaaaatgttttaaggttcatagagaaacctcagtgaaaagtcttcttttctgtcctcttcttcacagccatctgtttctctccttcacagaccatcagtattatccctttcttgtgtgtccttcaaacctattctatatttataaaagtaaacatatatttttcttatttccttcctcttttttacacacatgtagtatactgtacacactgtctgcaccctgcatttttcatttaagtttatctttgagatcattccatatcaatacataaagagaacaacaccctgattttcttacagctccatcatattctgtgatacacagaccataattttatttcgccagtcctgtattgattaacacctatccctccagccccctcacccccagctttagaaaggttgtgttcggacatcttggcaggggcggggctgagaatcagccatatgctgttgccctgcagcagttagccaagctgccacattccattgctagtgggttccagtgcagcacgtggtgggaagatgggggtggatatgccaggggtctgtggtggaggttttcagctcatcccttggcctgaattggaaaggatgagcctcagtgccatcacccatgatgaataccctggagacattcttgcctctgctgtcctctctagatctgtggagggccagagcgtgacacttgatcccctgtaaaggctcttattgatccctttgccacctcctcccagctgtgtgtcctggggcctgctcaagaagctggaatgtgaggacagctgctaccattcccttcctagggcatgtcccaaaggcctcctggccatgctctttatttgggacccttctgcagctgctggaaagggtgtgaagttatggaaggtaggggagccaaggccgtggtagcacaagacagctgtgtgcagagcaagggagaatgtgaagagtcatctctggcttccttggagagagggcaggattctctcaggcagagcctaaaatttaaaaaaaaaaaaagagagaggacaggagagcaaccaagattgcctaaaaataggtatcagttctggcttctggatcccttaagggctgtggttcccgcatctggatcccttagggcagaattttcataccacagtatttacaaagtatagtcaagggtaaaacctcccagatgactgactgtattagagcttgaccgtcagaatctgtttcattctcacgcagatgcagtcatttagggagcccaaatgtcaggcactgtgcagattctaggagattcaggcctgccccaccgtggtattctagatcaagggcatcgccaacttaaaagcgcatgtaaatcttgttaaatgcggactctgactcaagaggtccagagattttgcatttctaacaagcacccagctgttgttgatgctgctggtcctgggcccactagcgagattctgatctgagtcattcttaattatctgtattaatagaaggtaagcaagaacacagataaaatcaaagccacagatcatgtcaaatgtattttgaattggtatgcattgtctgctttatattaatattgaggtgacttattcacaattcaactttattaggactaatgttaaaataaacttgcattctttgagcccaaacaatggaaaagaatggaatgaaaagccacaacaacagaatgaaaagggtcaggaggaagccagcttgggatgatcatctgttacttaagacaaccgccagcagcagcttcaaacactatccttataccactctgccgagagaagacatccctttaggaaaagctgactccagcagccagccccctgccatgctcctggaaaggccaacatggcaggaattggagtgaccccagaatgaggtgacccagagttagaggcaagagggctgagtttctgcaacaagtaggatttaggtcaggaagctccttgtttggtaaacttgggagcagaatataatgctgatgtgggtgaccctgggtcgtagcagcatcttcctttctaaagagctcttattgtgcctgttgtctgctcaaagtggtaattgtggggtggagaaacacagagaggttgctggggtggaaagaggaagattaaaaagtaaggattatggccagccaagccctgtgatgcactgaatgggtctgatcatgtggcctctggctccccctggagagagaggatggctataggctgggcccttttgtctccccaggtgctgattctcctgtacatcgcagactggatggtgcactggatgtggggccggggcctggacccggacaacttctccatcccatacttgactgctctgggggacctgcttggcactgggctcctagcactcagcttccatgttctctggctcataggggaccgagacacggatgtcggggactagcttggtcactcaacattttccccatccctctgcactttctatttgaaatttttcttttgttcccctgtccctcctccaccccacactcccacctctttctaggacttcactttgataccaaattctcattattttcaatgggaatttttatacattgagccaagtttgtatagcaagaatttgggaaacacagatggcctgagataagcagtacaagtaggtttttgagacaatcaccaagtgcagtttcatggtgggtgcctccaggtgatgtggactggagcaggggagttttgtctggaatctggggacatggggtttggctttagcaacctgtcttggccctaatgagaaaccctttgtaagtgggctctggatttttggttttgttttctttttatctgttttgttttatttttggttttggttgaacagagggacagaagaataagtaacactcccaaacacagacatacttttgtagaagtggaccaacttcaaagctctggacaggagacacctgctccaggcccctgtgatcccagttctgttctcttgccctctggacctaagcgttcccactcgcagaaagagtaaggtggactgacttttcaatttgtgcacatgcctcttgttcaatggcctggtcaacatcaacaacccctccctctgatcatttccagttgattgtcatatccaggaaaaaatggaacagtgcactcttctccctgttgacccatgtccacctattggttccccaaaatccacattctccctgggcccagatgactttgtctccctgggcccagattctttgtctctcttcaaccttcatctcaaattgtctctaagcactaccttccccagagcttgccaggttgggttttgagattagggtcaggtcatgggtatgtggagaatggtttggaggttgaggacaaccacaggtgtctcattgctgccatttctcctgaggacataatcacttggtcaccttggaccctgtcacttcctaaaattactcgttctgtcatgccatagaggtcagttttcctctttcttggcttctacccacaaacattcaccaatcatttattcgttcatttagcaaatatgcagcctccgcaagatgagctctcctgcagacaagcatggtctgaaacattctttgagcaatatttattgagtgcctactatgtgttaggtactgtgccaggcactgataagccagtggtaagggaaacacagctctaacctcacctcattctccaggttacaaaggccatgtgcccctttgaatctggcagagaaagtttcctcgttgtaagtatttgcatctacttcaagccagattcttctgcctctttctcctttccagacccctactctgtgcagtgctgaccacagctagagccaccgccccattgctcaaccagtatttatttccctaaacgacccttcctcatattcccttccctccacctctccttaccaagcacccaaaagaggatttagaactagcagggtggacatcatctggttgtttctacttttctctgcctagcacaaaattgggagaaaactggagcctccatccgcagtcacacgtgtacagatctggggatttggatgtaggctttttctaacttctctctcagaagcttctacagaaacccttccatctgtagcctcaagggcccacctccaagggaaggcttaggcaatgatcctgtttctaccaacactgcaccttatcccaggaacctgccctagacctccagagaccatattttctctccctccatttctacccagacctccaggcctccttctggaatcatagaaccgtagaattggaaggaattttagaggttttctagttggagttgtgtccaacagaattcattaacaccagcctgggcttgtttttcctcctccctctggacttttttcatcttttcctccacctcaaaaaatacttacacacagattcttcttgtacaggcatcaaaaccaactcctctgcccctaaggctgtgtccctgtggtctccagccacccctaccccagtcactcgccccttcctcatctctggaatttggccaggcagtcccagaagactctggagtgacctcctttgcctaaaaagcagacagataggcatgccccaggccctgagtgagcagaggaggactgtagggtgagagggaaagaaaatgaaggtgactttcatggaagtttcatttcttttccccgattgtaccaactgcatgtacttttggcctggctgcaaggagcaatattggtttactctcgtatccttaaaaagttacagaactgtgtcttaagagaattatttatagttactataactgaattgacaaatgtcaacttaactgataaattatatttggtaaaataaagaggacgtttatttagatggttggtgtttcctgtatgtctcatcaaaaagcagcttcaactgttgtcttgggcccctctgtaggccttaccctctcctcaattaggagtagaaaggggccaaagtgtgacaagaaatgaaacatctcggccggctgcggtgactcacgcctgtaatcccagcactttgggaggccgaggcgggcggatcacaagctcaagagatggagacaatcctggtcaacatgatgaaaccccgtctctactaaaaatacaaaaattagtcaggtgtggtggcgggtgcctgtagtcccagctactcaggaggctgaggcaggagaaccacttgagcccaggaggcagaggttgcagtgaaccaagattgcaccactgcactccagcctggcaacagaacgagactccatctcaaaaaaaaaaaaaaagaaacatctctaaaatgcagagattgtgtgatagaaaatacagcatcgccagacacagcggctcatgcctgtaatcccagcactttgggaggctgagaggggtggattacctgaggtcaggagttcgagaccatcttggccaacatggtgaaaccccgtctctacaaaaattagctgggcgtggtggcgggcgcctgtaatcccagctacttgggaggctgaggcaagaggatcacttgaacccaggaggtggaggttgcagtgagctgacatcatgccattgcactccagtctgggtgacaagagcaaaactctgcctcaaaaaaaaaaaaaaaagaaaaaacaacaggcatttattgagaaactggtgcacggggacacactcaagaagctagatgcagggtccttgctctcgaggaggttgtactctggtctccatgtgttaactcagcctctgttgggggattgtgctatgggtccaagcatttatgggttaagattccctccctaccgaggcttacaatctgggtcaaaataatgacggctcttatttgttgagtatttcctgtgtgtcttcaccgttcacctttaagcccttagaaacttataatagactgactgcaaagggtttggagtcagatgggccttggttcaaatcccagctcttctgcctgtatttgtataaccctgggcaaatcattcaccctttctgagcttcagtttcctcatcagtactaatacttatttcataggatcattatgagacctcagtgagataataaacaaagcactaagctccgtgcctggtatatactaaacccaaaaatcctaatcaatactacagtgtgggagggacgaaggccagtgactaggtcatgtcagtacgctggccatgggataaattcagggtggataagggagcgggccaatgaaaagggcacctgatcaaggcttgggagtcagggacatcctggaggaagctgagaagaataggagttagcctagcagaaaataggagaaagagccgtcctgcagagggaaccaggagctgagcaaggaagtaagcctgatgcttttgggaactgcaaatagctctgtatgactggagttgggagcgcagacgttgatagcacaaccttatgagacgcacgtatttgtgacaaagcagtttttctgagatggcagatacagaaaggcagagtcagagcacagccccactgaggtatctctgactacaaagcctgtgtcgggaaccactgcccacccaggacatgcccccatgggatatgtcacaaaagtattgagcagatactgggtgcagaacatttgccagtctcaaaaatctgccttttatcacagcctgtgctccagtactaactcttcaaagcaatgtttataaggctagtaaaggttaatggaaagaggataattgcttgttaattattatttatatagtgtttcactatatagtatactatacatatacttttaagtgatagactcatttgtaacatcaatgttttctctaataacgctatgagatagatattattgccattttgcaagagaaaaactgaggctcagagaaaagttaaatgtcttgccccaggtcatatattcacacccaggtttcttagcccagtgcgtgccttctatgcctggagccagatgaaatggctggccatggtgcccctttataaggaatataaaacattgctaaaacgatcagaaaaatgggtgcctgttatctcagttttgcttatgagacactatacatgactgcaaaacgttaattgtttactgaaatagtatcttccaatggacatttaaagtcatggctccaaggcgccagcctatctctgatggtatttttataacataattacaggcagcactaccaattcagaggtcagtcagctgacagtctcctgaacttagttgtctcctttagctaaacttcagaaaccgaataatgcatagtataatgctgtttactgtactgtatttttattacattatctaaatatgaaatattttaatatggcacccatgaaaatgtctggcttgaatgattagaaacaaaacaaaaaaaaaactctacagccaggcatggtggtatgagcttatagtcccagctacccaggaggctgaggccggaggatcagttgagctcaggagttcaagtctagtctgggcaatttggtgagactctcttttcaaaaacacaaaaatcttaataactcaagaaaaaaaaagaaattgcagaaaagtgaagacagcttggccaaccaaaaaagaatgtttaaaaataatttcaaagactttacagtcatatttatgtttagttaagtatgaatgactaatattatctagtcattggtgatttttttaagttaaatgaaaaacacatccaaataagtttaaatgttctgtcctggccaggcgcggtggctcacgcctgtattcccagcactttgggaggccgaggcgggcggatcacgaggtcaggagatcaagaccatcctggttaacacgctgaaaccccgtctccactaaaaataaaaaataaaaaaattagccgggtgtggtggtgggttcctgtagtcccagctactcgggaggctgaggcaggagaatggcgtgaacccaggaggcggagcttgcagcaaaccgagatcgtgccactgcactccagcctgggtgacagagagagactccatctcaaaaaaaaaaaaaaaaagttatgtcctatttagtcatatttatgtgatatacagtccttgttttgaacataaatattttgtattatattcaaatgttaagtgaaaaaaatgttgaacaattgtatagagaacattgcattagaagagccccaaattgcggccttcttgggacacccacatgtttatctgtcttttactcggccacaggctgtcatgcgcataactttcaatcatattacctaaattgttaactacttcacaaattactcagaaataaagtatgtggtttttaggaattcgaagtccatggaaagggagactaaagctttaagaggttaactttaagacctgccccaggtgtcaaagacggaatattaactacagtctcctgattggcaggccacacaccaaaccacccttcgacacaggctcaagaaggtagcggggaaagatgtcaccatggccggaagtgctcttaggggacccacgtccaagccaagaacaaggccactgatctctcgccctcataactcccatcctgtggagccagaatagtccatcatgtgcccactcatgcttctgctcatgcttctacattctatatctctcgcttagcttaacatctaggttatcttttttctgtatcagggtcacagctggctgccagaatcctctgagatgacccagggcttacctagaatttctcctgcttctccaaccagacacaactgccaggctgccttcgccaatcagggcagattcttttttttttttttttttttacttcagtaagtaggggtcctgttttccacctttggaatgaggaaactcagaaaacatgctaaggatgctgtactcttctgggaaacctccctcatccccacacccagcttaatttttaaaaatagttgtaattagaggtagacagacatagtaatagatttggatcccagctctctcagctcgtggccataattagcctcttttggtccccaaaatggaacaataatgccctctctgtggggttgttaggcacacagaagattcgacaaatagaagcttttatgatgatgatgataaaatgtgggttgaattagtggtggtaataatatgaaggaactggggaatgaagaagtggatagccctggagcgatgctgggtttttttgtgaggttttttttgtttcgtttttggtttttgttttttgtttttttttgagatggagtcttgctctgtcgcccaggctggagtgcaatagtgcgatctcgacttactgcaacctccacctcccaagttcaagcgattctcctgcctcagcctcctgagtagctgggattacaggcattcgccaccacacctggctaatttttttgtatttttagtagagacggggtttctccatgttggtcaggctggtctcgaactcccgacctcaggtgatccgcccgcctcggcctctcaaagtgttgggattacaggcgtgagccaccaagcccagccgatgctgggttttatccatctgtgacatgggtgcagctgaagctggacaacgctgagcagtgaggaggaccagcctgtttcacagctaggcttccactgggcgaaggctatgacatggctaagctaagccaactatgaccctgagtccagctgcatcctcagaggctcagaaacctagtcccattcagatgtcatcccactcaaggaggctgccagacccacacacccccagaggcctgtgcataagaccagatgccagctggtcagtggactggacggacacgtcagcctgaccagcacattcactcctggaagcaagccacaagggaaggcagatgatcagaaagtacctggaaagtcaggaatcctaatagagaagttagttttaaaacgcaaaagtccagcaggcgccaggccttgttatatttggctgcatgagtctgcacaatagggatacctgacagagggccagatattctcgtaagactctggtccctctgccagacagagcccaaagaagtgaagccagaattctttcagagtctcctttctttgcctctgagacctttctttggatcagtgcattccttctttaggtgtgtttataccttgggtcaatgtcacctcctgcctgggcacctctcattacatgtggatttcacagtttatctttgagaggggtaggaggacaatgctacttccaagttcttggcaaggaggggcaggttatcagtggataactaaggatggcctatgggtgcaataatttctgcttttctcacctcctagagagttgaaataacataggaaattagaacagtcatgtctgtgttggaagggaactttattttgtttcacagatgagactttcctgtgccatatggacagttgggaaccacacaaccagttctttgaagcaaaattttctctttagttttcacttttttcctgtcttctttccctggcctttatttggggtggaaggagggtagccacagaaggaggcaaatgtgacaaccaaggcagtgaaaactatagtttgatgttttccctagatactcccaggcccaaatctggcctagacccttggcacgggccagcagaggaatgactggcaggctgccctttgaacttgccagcctctctgtcctgagggtttccttgggcaccttgctgcgaagtcttccagctgaatgcttagctgggtcacaggcatttcaccaagctgcctgcccctccccaaagcaacagccaaaaagttatgatcatcgaagtgagtctgggggttggggctgaggaacagctgtagcctcttgacctcacccttctctgggtctgtccctctcctctgtgctgctgctgggccatttgctatgtcacttcagtcttcccttcatgttacaaagcatttttccactctgctcctaggacaatgttggaggctctggagattatataagctgtctctctcctatttgaagtcaagctcccaagtccttaggagattgcctggcaccagatcatttcttcaacaagtgttcattgaattcatagtgtaggcatcactaatagctacctgacatcagcaacatactaagatgcacaccacatcctctgtgtggggctcttgcccaaaatgtttcttaaatcaaatcttgaggcaataaacagacaatccaggatatgcgacttcctgtaagacaactggcatggactctaaaaagaaagtcaaaaaaaaaagggcaagggattgttatagacagtactgtccaacagacctttctgtgatgatgaaactagtttatgtctgtgctgttcaatatagtaactgctagccaaatatggctgctaagcacttgaagtgtggctaggcaacagatgagctggtctttacatttatttattttaattaattactttaaaaaatttgtttagagatgggatctcgctatgttgcccaggctggtctcgaactcctgacctcaagccatcctcctgcctcagcctccctgagtagctgagattgcaggcaggagccaccaagcccagctgattttatataatttaaatgtaaataaccacacatggctactggctcctgtattggacacagcatgctcctaagattgaaagagactaaagaaatagaataaccaaattccatgcatgaaacttcattgtattctggatgacaggtgaggagaaaatgagaaaaaaatattggggagctatagagagatgtaaatgtaaactgtttgttagatgatattattggattaaggttaattttcatagatgtgacaatggtattttgggctgggcgaggtggctcactcctgtaatcccagcactttgggaggccgaggcaggcaaatcacttgaggccaggaattcgagaccagcctggccaacatggcaaaccccatctctattaaaaatagctcggtgtggtagcgtgcacctgtagtcccagctgcttgggagactgaggcagaagaattacttaaactcagaaggcagaggttgcagtgagccaagatggtgccactgcactccagcctggatgtcagaatgagactctgtcttaaaaaaaaaaaaaaaaaaagataatggtattttggctttgtaggataattttattattaggagctgcatgttgaagtatttaagcttgaagtgtctgctacttactttcaaacagttcaacacacacacaaagagacaaagcagatatggcaaaatgttagtaattggtaaatcccgatgaaggacatattagtatgcattgtactgttaacttttctatgggtttgaaatttttcaaaataaaaagtggaaagtaaaaagtagaaaagagaaaggcagacacatacaggaagtgtggtagttacagagcaaggctgacccctttccccagcttccaaactatatttccaaacatataccagttgacccttgaacaacacgggttggaactgcacagatgcgcttacacagggcttttcttcctcttctgccacccctgagacagcaagaccaaaccctcccctttcttcccctcctccttggtctattcaacatgaaaacaccaagaatgaagacctttatgatgaaccacttccacttaatgaatagtaaatatattttctcttcctcatgattttcttaatacattttattttctctaacttactttattgtaagaatatagtatatgatacatataacacacaaaatatgtgttaattggctgtttatgttattggtaagactcccaatcaacagtaggctattagtagttaattctcggggagtcaaaagtgacacacaaattttcgactggagggtaggtaggcattcctaacccctgagtggttcaagggccactatatgtgcaaatcaattgtttggcaccttgaatgtgtgttctctttctcttatttatatccgtctctcttaaaaactgagatcagaaatgcaatttagtgttgaagaaatacacctttcagccaggcgcagtggctcattcctgtaatcccagcactttgggaggctgaggcagggggatcacttgaggtcaggagttcaagaccagcctggcccacatagtgaaaccccatctctactaaaagtacaaaaaaattagctgggcgtggtggcagctgcctgtaatccaagctactcgggaggctgaggcaggagaatcgcttaaacccaggagatggaggttgcagtgagccgagattgtgccactgcactccagcctgggcagcaaagcgagactgtgtctcaaaaaaagaaagagagaaagagagaaagaaagaaagaaaaagaaagagagagagagaaagaaagagagagagagaaagaaagagaagaaagaaagaaaagaaggaaaagaaaagagaaaagaaacgaaaagaaaaaagaaaaaaaaagagaagagagaaagaaaaacacttctcatccccatcaaagaaatgattactactttgagaactgtgtctttcagggagtaccagaaatttgctaatcttccctcttaaatcttaactcccgacctttccgattttggaagctaagagtagttcctttcacagatgatcaggagcaaagtcaaaattttgaaggaaaaatttacttcttcctgttttcttcgagacacgctggttgcttatataagttaaatagttacaaattggtcacatagttaagtgaccaaagtgcaaatagaatataaatgctacaggccaggtacagtggctcacacttataatcccagcactttgggaggccaaggcaggcagatgacaagatcaggagttcgagaccagcctggccaatacggtgaaaccttgtctctactaaaaatacagaacttagcaaggcatagtggcacgtgcctgtaatctcagctacttgggaggttgaggcaggagaatcacttgaacccgggaggcggaggttgcagtgaaccaagatagcaccattgcactccagcctgggtgaccagagagcgactccctctcaaaaacaaaaaaaaggataggccgggcgtggtggctc

SEQ ID NO: 607 - DNA, 3840 bp, Homo sapiens
tgttccacactgattctcgtgactttaaggaccagggatttgaagaggtattagctcttcccaggaagggaggaagtttctggaagagaagggaaagacggcagacgctgcgctgggaccagcagagcctgaggagctgtgggaagctgacagagcccagccaaaggagcgggaaggagccgcagccccaggctggcactgtgttctgaaagatttgaactcaagctgctttttacggaagaggggccacttcagagggcaccccagaatttggttgagctcttctactctggatgccccctgctctgaggagcctgccactgagaaccaaagaagataagaggacagatactttttcttcaagcacagagctggtgggttggagtcaggcatctgcacccctagtggctgtctggtgaggaatttcttgtttcttcccagcttgcggcttcagtgcttgatggggctgcctgttggtggatcagtttttgcagtgcctggtaggagtggagagccgtgggaagaggtcctgcggcgcccaagcctgggttcaccccaagactaagttctttcccaagttagagaagaagagagaaagcaaaaagaagagaggaaagttctcccttcccctcctccgtgcctgtcatgtcctctaagccagagccgaaggacgtccaccaactgaacgggactggcccttctgcctctccctgctcttcagatggcccagggagagagcccttggctgggacctcagagttcctggggcctgatggggctggggtagaggtggtgattgagtctcgggccaacgccaagggggttcgggaggaggacgccctgctggagaacgggagccagagcaacgaaagtgacgacgtcagcacagaccgtggccctgcgccaccttccccgctcaaggagacctccttttccatcgggctgcaagtactgtttccattcctcctggcaggctttgggaccgtggctgctggcatggtgttggacatcgtgcagcactgggaagtcttccagaaggtgacagaggtcttcatcctagtgcctgcgctgctggggctcaaagggaacctggaaatgaccctggcatcaaggctttccactgcagccaacattggacacatggacacacccaaggagctctggcggatgatcactgggaacatggccctcatccaggtgcaggccacggtggtgggcttcctggcgtccatcgcagccgtcgtctttggctggatccctgatggccacttcagtattccgcacgccttcctgctctgtgctagcagcgtggccacagccttcattgcctccctggtactgggtatgatcatgattggagtcatcattggctctcgcaagattgggatcaacccagacaacgtggccacacccattgctgccagcctgggcgacctcatcaccttggcgctgctctcaggcatcagctggggactctacctggaactgaatcactggcgatacatctacccactggtgtgtgctttctttgtggccctgctgcctgtctgggtggtgctggcccgacgaagtccagccacaagggaggtgttgtactcgggctgggagcctgttatcattgccatggccatcagcagtgtgggaggcctcatcttggacaagactgtctcagaccccaactttgctgggatggctgtcttcacgcctgtgattaatggtgttgggggcaatctggtggcagtgcaggccagccgcatctccaccttcctgcacatgaatggaatgcccggagagaactctgagcaagctcctcgccgctgtcccagtccttgtaccaccttcttcagccctgatgtgaattctcgctcagcccgggtcctcttcctcctcgtggtcccaggacacctggtgttcctctacaccatcagctgtatgcagggcgggcacaccaccctcacactcatcttcatcatcttctatatgacagctgcactgctccaggtgctgattctcctgtacatcgcagactggatggtgcactggatgtggggccggggcctggacccggacaacttctccatcccatacttgactgctctgggggacctgcttggcactgggctcctagcactcagcttccatgttctctggctcataggggaccgagacacggatgtcggggactagcttggtcactcaacattttccccatccctctgcactttctatttgaaatttttcttttgttcccctgtccctcctccaccccacactcccacctctttctaggacttcactttgataccaaattctcattattttcaatgggaatttttatacattgagccaagtttgtatagcaagaatttgggaaacacagatggcctgagataagcagtacaagtaggtttttgagacaatcaccaagtgcagtttcatggtgggtgcctccaggtgatgtggactggagcaggggagttttgtctggaatctggggacatggggtttggctttagcaacctgtcttggccctaatgagaaaccctttgtaagtgggctctggatttttggttttgttttctttttatctgttttgttttatttttggttttggttgaacagagggacagaagaataagtaacactcccaaacacagacatacttttgtagaagtggaccaacttcaaagctctggacaggagacacctgctccaggcccctgtgatcccagttctgttctcttgccctctggacctaagcgttcccactcgcagaaagagtaaggtggactgacttttcaatttgtgcacatgcctcttgttcaatggcctggtcaacatcaacaacccctccctctgatcatttccagttgattgtcatatccaggaaaaaatggaacagtgcactcttctccctgttgacccatgtccacctattggttccccaaaatccacattctccctgggcccagatgactttgtctccctgggcccagattctttgtctctcttcaaccttcatctcaaattgtctctaagcactaccttccccagagcttgccaggttgggttttgagattagggtcaggtcatgggtatgtggagaatggtttggaggttgaggacaaccacaggtgtctcattgctgccatttctcctgaggacataatcacttggtcaccttggaccctgtcacttcctaaaattactcgttctgtcatgccatagaggtcagttttcctctttcttggcttctacccacaaacattcaccaatcatttattcgttcatttagcaaatatgcagcctccgcaagatgagctctcctgcagacaagcatggtctgaaacattctttgagcaatatttattgagtgcctactatgtgttaggtactgtgccaggcactgataagccagtggtaagggaaacacagctctaacctcacctcattctccaggttacaaaggccatgtgcccctttgaatctggcagagaaagtttcctcgttgtaagtatttgcatctacttcaagccagattcttctgcctctttctcctttccagacccctactctgtgcagtgctgaccacagctagagccaccgccccattgctcaaccagtatttatttccctaaacgacccttcctcatattcccttccctccacctctccttaccaagcacccaaaagaggatttagaactagcagggtggacatcatctggttgtttctacttttctctgcctagcacaaaattgggagaaaactggagcctccatccgcagtcacacgtgtacagatctggggatttggatgtaggctttttctaacttctct

SEQ ID NO: 608 - protein, 505 aa, Homo sapiens
MSSKPEPKDVHQLNGTGPSDCSSDGPGREPLAGTSEFLGPDGAGVEVVIESRANAKGVREEDALLENGSQSNESDDVSTDRGPAPPSPLKETSFSIGLQVLFPFLLAGFGTVAAGMVLDIVQHWEVFQKVTEVFILVPALLGLKGNLEMTLASRLSTAANIGHMDTPKELWRMITGNMALIQVQATVVGFLASIAAVVFGWIPDGHFSIPHAFLLCASSVATAFIASLVLGMIMIGVIIGSRKIGINPDNVATPIAASLGDLITLALLSGISWGLELNHWRYIYPLVCAFFVLPVWVVLARRSPATREVKGWEPVIIAMAISSVGGLILDKTVSDPNFAGMAVFTPVINGVGGNLVAVQASRISTFLHMNGMPGENSEQAPRRCPSPCTTFFSPDVNSRSARVLFLLVVPGHLVFLYTISCMQGGHTTLTLIFIIFYMTAALLQVLILLYIADWMVHWMWGRGLDPDNFSIPYLTALGDLLGTGLLALSFHVLWLIGDRDTDVGD

SEQ ID NO: 609 - DNA, 29510 bp, Mus musculus
  misc_feature (1)...(29510): n = A,T,C or G
ctctttgtccccttagtgcaggaaaaacggctgtgcctctgaaatagctcaatcaaagcctcatagggcagaacagaacattgattcaagcataggacaccagaaagcatgacatgggatgatgacccccacaatttccacacaggtcaatcagagacccatcccaccccaagtctaaatctggatcccaatacagcacagtctagagactgaggagcttgctctggagaaccaaagcagcttgcttgtattctgtctgtctgtctgtcccaccccaccctcattatccccaagatctctctctctctctctctctctctctctctctctctctctctctctctctctctctctctctctctctctctctcttccccctctctctcccatcccagccttattatccctaacccaccatgggctgggtaccctagaggactcctttcttccgccctctgcacctcccacccacccacccaggcacttttgtagacacagcagcagacacggactggctaaatgggcaaaaagaaagtacaatgcagattgtcaaagcttgagcagtgatgttgtgcctccatgtgttccatcagtgatggctgcaggtgatttcatcccagtggtagaaacagctcatgtcagggtgtctttagaccactctctaatgagaggaaagcctgaccatcttgatctggaaaacacttgctctaacagtgccattcgcaaaggattctggtctaagggtcttcagtgaacaacactgctaagcgccaggcttctcatgcccagagaggagtgaagtgggggtataagggtctcctcagcgtgacccaggggcatcaagtggcactccaagtggtgattcaacataccttctctttcctttaaacccacactcttgagaacagggactgtgcccaatttacagagcactcacctaccctaccactcagccttagattccacagtccatctgtaaaaacttgcatggccaaccaggaaagcactcaagaatccaggcttcactccttccttaggggcaggtaaaagtcactccttaacagtgacaacccagtgtgtccagctgtgtcttagccatgcccctcttccagaaggaaaccgtacgccatggtctggcctcactgtacgatgagttgaattacagacttgagagaggttggtttagggccatagccaaaaggggctgaggctcagtgctagagttcacagtcttgagagtgaggaagagctcagaaggagagtggcagggtacagctgtacctgaggccacatcaaggaatctggaaaaccagaattgtcctcttaaagaatgaatgttgtgtgactttttctggagagatgtcaacagctgtttacccaataagggacagtgacaacagactaaggaatcattgcacacaagtctagcttagggcaacactgtgtctatttggggttacctactctgtcctgggttactcaaaggcaactacatcactgagaaagttcaccccagcatgggtgacaacttacaaaaccatacccctggtatggtatcaaaacctgcttcttccccagcaattgccactgcttatgtaactgtggccaaggtcaggagtgacaagactggggagaaaagagcggtgctccaggaggcaagagagacaggccaagggatgacgggcagacagaacagagaggcctggtagggagcaggaagacacagaaggggcggtcaccaagacagcccaggaggagtctctttgatgtcaggggcactactaagttccctcatgtacagcttccatctttccagttgtctgagtactgaggtctgagggagacatgtgttctatgtgtgaatgctccattacttctgcaccaggaaccctcagaaccactgagaacagaatgtgttatctatagagattcaaacctagtgaggccagtttagcacacatagagctcaggggagatgaaaacttaaatccagtcctaactgctgtttcaatgacaaggccagagaatggtacacttggagagatggaggagacagaggattgatctggtatgcagcacacgtgctgggacaaggtaggcactctgtgtgctggaagggggtataacagcatcctttgctcttaatcagtacttaggtaagaataactaacatttatatatgagagatttggcagataagtatggcctaccctagtgtttgactcaatcagagttgtctttcacggacttctttgctctgtctgcccttcctcctgggcctgtccctcctgacttctgtctctcttcccccatcttgtcgctcctggcagtggcacttgtggcctggcatccagtcatgtgtcccttatgctatctttttctcagcttcaagttgaagctcagagccccagaaggttttctcacgtattatatgtccaggaccgtgtcagctatgagggggaggagtaggggaaggaaggggaaagactccagggtagggtcagtgtataaaacagggctgctggcaaaatgtactctgggctgaacacatggggtgtggagaaggctgccttgaccatcttcgtgccagaaaaaataatctgctcagtgaaggcttaaatagaaaggcactagatcccctcttttgaatgaccactcattttgaagtgacaaacctaagaatctattaattgtcactaccctagttagctttaactgtcaacttggcataatctagaattttctaggattaatatcaaggaaataactagatcaaattagcctgtaggcatgtccatcagggcttgtcttaattgttcattgatatagcacagtatagcccactgtgggtagcaccatcccttaggcaggtggttctgaactatataagaaaactaacaatataaacctacctactgttcagcaaaaaacatcttccataattccttctgagcttctttggctgtgaaatgagtgtcccggtggaaataatgctgtgtggaatagcaatcaggacgactttcaggtttctgccttgggttcctcaatgatgatctgtgacctggaattgtaagccaaataaaccctttcctccccccccccccccgcccctgtgatgctccaaggtaccataaacaaggcaactttaaaaagaaaagcatttaatctggaggctcagggttccaaagcgttagaatccctgctcatcatggcaggaagtttggcaataggctggcaagcatggtgctagaggagtagctgagagcttacatgttgagttagcaaatacagggaaggagaggcagggggactggtgtgagcttttgaaactatcaagcccacctccaatgagacacttctttcaacaaggtcacacctcctaatccttcccaaacagtttgaccaagcattcaaacatatgagcctgtgggggtcattctcactcaaacaatcacactttgagttgggtattttttaatcacagaaacctaagtgaaaataaaacagttactaattggaagtctacagcatttccataggatgcgtcttcatgggtcctacacagacaggacttaacaaagacctacaattagcaggtgcatacaagtacccatccttggctggtttgcctgctgggagggcagcagcagaggcaggatttccagcaactgtcagagctaccttagagaggagctgactcagatgcagctggcacctgctctccacacactccagcatcaaggaagtttcttcatggtgggactgggagcctagcagatgccaaattcgtttccagctcatcaaagtggatttgggtgtgcgatttttggctctgaagctgaaccacatcacagcagcaacatagtttggcattaagcacaaaagaaatttgcaatctattgaattcaagctccagaaaaccagacagcccctttgtgagtattctactgatgtttcctgccaagagaaggaaagagtctgcagcctacatagagctttaccatgtaggaaggagcaagcttggtcagaaacgcctaattatttgtatgcagactctcccgttcacagctttgtcacctggagagcctcctggttgacagtacctgtgctggaacccacccccatctgtgtgtgtgtgtgtgtgtgtgtgtgtgtgtgtgtgtgtgtgtgtgtgtgtgtgtgtgcatgtatgtatgtatgtgggtgtatgcatctgtcttctccctccttctttggccctctctacagtgacactcagaacttgacattggctcctctgactctagtcacctgtaaatgttaactcggctcttgtgactctggtctctagcaccttcttacccttcatcactgccatgactttaagaaagatgttctcagggtcctttcagcaaaatcttgctggtgtatgcaatggtatcagcgtttgaaggctgattatgcgatggatccctggatacggcagtctctagtccatccttttgtctcagctccaaactttgtctctctaactccttccatgggagttttgttcccaaaattctaagaaggggcaaagagtccacactttggtcttcattcttcttgagtttcatgtgttttgcaaattgtatcttgggtattctaagtttctgggttaatattcacttatcagtgagtacatatcatgtgagttcttttctgattgggttacctcactcaggatgatgccctccatgtccatccatttgcctaggaatttcataaattcattctttttaatagctgagtagtactccattgtgtaaatgtaccacattttctgtatccattcctctgttgagggacatatgggttctttccagcttctggctattataaataaggctgctatgccggggcctggcaaacacagaagtggatgcttacagtcagctattggatggaacacagggcccccagtggaggagctagagaaagtacccaaggagctaaaggggtctgcaaccctatagatggaacaacattatgaacgaaccagtacccccggagcccgtgtctctagctgcatatgtatcagaagatggcctagtcggccattattgggaagagaggccccttggtcttgcaaactttatatgcctcagtacgggggaacaccagggccaagaagtgagagtgggtgggtaggggagtgagggtgaaagggtctgggggacttttggaatagcatttgaaatgtaaatgaagaaaatacctaaaaagaatgaaagaaagaaagaaagaaagaaagaaagagagagagagagagagagagagagagagagagagagaaggaaggaaggaaggaaggaaggaaggaaggaaggaaggaaggaaggaaggaaggaaggaaggaaggaaggaaggaaggaaggaagatgttctctagcccagcccaggccctagaacccctgccaagagaataagactcacgccttctggaatcctttcagatccactcaccctcacggtgctaagaaccttagtggtagaatgttctagagaataagataatccagatgtgaatgtcattgtccaaactgatggacaggaagccagccagcagtcagtttttctaggaatgactctctagaacagatctaatgtgtgttcccctttggatcccattggctataagaaatggtaacacttctcaccccagctcaaactctctttttcttcacacttttcctgccaaattagagactagtgtggagcacagcatgtgtatgcctttttctcattatactttgtcctttacattccaagttctttctgggagactaagggtcttgcttgaacgtatcacccacagcaaagaccccacaaccactaccacagtctgcttacagtctcatcttctatgggctactttcatgcattcaaatatgtccttcgaccctgctactttagggaatctctgtactcacaaggcagacccatccaccacagaagcagcctgcatcatatagaggaagatgggccaacctgggactctcttcagggacactctactcttagatggcaagtcttggtgatgtgtcttatcgccccgtagcagggagcatgcaaccgtcgccatagcaaagagacacagcatattataccccatgggggaaggtagccacaccaggattgcccctgtgaattctgcccctcagagagatctgttcccattgctcaccctgtcatccaatagcagagaccatgcagtcactcctggcggacttatacccagttctgcttaggcaccaattgtggagacatgaacaaacatggttttgccttagacaaggcatcaacgacaaatcaagaacacttctacccaagtctagcttgggaagcagggagttcatggcagcactaagaggagcacaggcaagggtgtattcataggtacatgggtaacttaacagcagccgcatactgaagagtccattttagcatgaggggtgacacaaaagctgtatccatggagatctttgctaagctagcagacaactctccaggagtcttctgttcctcagtgtcatttatataacctcaggggagcagggatggtagccttaggcttcctcagctgaataaattcattagcttccttagtcttttaaatatatatgtatatattcattatttatttaaataagaataaaattcatatttaaatatataaaaataaatatataaaatgtttatataaataaaattatttatatgtatatatatatatacatatatttttttttttttgcctgcatgcagatctgagtaccacatgcatgccacaccccgagaggccagaagagagtaccctaagaacgaatgaagttataggtggttgtgagccaccatgtaggtactgggaattgaaccagggtcttctaagagcaacaagtgcttcaaactgctctctctccagatttagtgtctttagtctttttttaaatataataatctttatttattatgtatatgagtacactgtagctgtacagatggttgtgggccttcatgtggttgttgggaattaaatttaggacctctgctcacttcagcccaaagatttatttattattataaataagtacactgtagttatcttcagatgcaccagaaagggtcatcagatctcattacaagtggttgtgagccaccatgtagttgctgggatttgaatttaggactttcagaagagcagtcagtgttcttacctgctgcgccatctcgccagcccagtgtctttagtcttaaaagcctctctcctcccttgaagagtggattttgccttatgttccagttgggcattgaacttgtgacaatctttgtgtccacttgccaagtgatgggattatagacatgaaccactacacttggtttctttcctctttcttaggagaagcgtggccacatttcccaatctcctttggtagtcagctgtggcctctcaagttccagccccaggacagatgtgagtgtgactgtgaaggataagtagggtagataccaggacaaaccatggaaccttcccaccaagcatcttcagtgaacaccacatgagacagtcccttaaagcctggtccaaaatgtctgtggtgccactcacttttgttatgtcctcgacaaatgggaattcaaaagtgtggatagttaagaagtagaaacggggacagcaacagtgagctttagagaaagggccctgaaagagctaggacagaaataaatgctgtagtttctttggatcctgtccaaagacaaagcattaagtcaggaggccccaggagtcacccctgacagggcaagcctgctggtggctcttgtgttatcctgcaccataggctgttgtggttggtggcggagcagtaatggttcccctgggacctggaagacctggcaaacctcctcgacctggtggatacacaaacgcgaatagtcagcaatcctcacaggacaccttggctgtgagttttcacccctcctcaagtgcacagaaatagctgggggtttccagtgatctgtgtactccgtgcttatttcttaaacagttcagataacatcagcagatggaggtggggtttttttccctgcagaaacaatgtaagcagaccataactatagatggtctgataaactatttattggaaagatcagaagttgcatactagtcaaagtataaatgataaaagacatcttcacccagttggttccccagctctatttaaggacacaccagtaacaataatgatgtgttgtgcaccatgagaaaacacagccgtgtgtgtgtgtgtgtgtgtgtgtgtgtgtgtgtgtgtgtgttggttttgtactctataaagcaggtttccacccactcagagtgattgttttctatctacttgcctcatatatagtctggtatgcccttaggtgtatacacacacacacaggctagaaggcagctcatgtgtaacatctgccctgttgagcaaaggaatcagagcagctctctgaggctctcaggccaatggaaatgaaatggccatgactttaggccttgaaactgttcagctgagctgtggttccttcatttacatgtgggaaaatgaggcccggacagctcagcccacactccctctccttgcctggaccagcatgaagcataccgttctcctttggttggaatcgagtgagctccaaggctgtcagcagggaaggggcctcattgaaaatcaccacctgggagatgaatctaacatggctgtaggtggctctggaggaagatgaccctgggaggaccctgcagctgcatggaagcagaagagtccatgtggtgagtggtatctggggtgatgcataattcacacatctcctcggttacttcctgtactggtgggctacctgcccttagaaggctcaggctgactcctctgtaccaactgtggcccttgagatgggaatatggaatcccaagtgatgaggagagaaatcaggttccccaacccagattctgagtcctgtgaggccccaggagatgccatgtgcctccaatactccatgttcaacacaaatcacagctatcttctgtgttacacacacacacacacacacacacacacacacacatacacacacacacacacacatacacatacacacacacacacacacacatacacacacacacacacacatacacatacacacacacacacacacagcacacctgtgttacacacacacacacacacacacacacacacacacagagtcttcctgccttaagtactattcaatatttcttctaaccctcttccaacatgaaaaaagaatcaagagaagatgtggattataggagtagagagggcgtgccaaggagaagccagacatctgcagcagcttctactagtcaacgagtgaggcctcctgcattaggaaccaaaacttgactccacccaaggtgtgtgtcttagggttttactgctgtgaacagacaccatgaccaaggcaactcttataaaggacaacatttaattggggctggcttacaggttcagaggttcagtccattatcatcccggtgggagtatggcagcatccaggcaggcatggtacaggcagagatgagagttctacatcttcatctgaaggctgctagtggaagactcacttccaggcagctagggtgagggtcttaagcccacacccatagtaacacccctactccaacaagggcacacctcctaatagtgccactccctgggcaaagcatatttaaaccatcacagtgtgtctgtacttccaaatggccagctgagagcctcagcattcctaggcttaaggccttttggctttggaacctggtaagagcctttgatctcaggggcaacagcagacagacccatagctagcaacactctcggctgagcatatgagtcccggcattgtgacctcagctgttccgcacacaaagaggtggtcaacctgcacttgcctaagcctgtaagttacataagtcggtggcccagtcctaagggactgttgtggggaggttgggaagttgaagaacacctagcccttccatcatgtcagccaagaatgcagaactgaagaaaactaacctggtaaaggaagagtgttgcagggcacggtggggcctctgtgggctcctgctgaatggaggcgggacagagaggctactggaagtcatcctgtgagccttccaactttctgtctttgttcagggcacaaagcatcctcttgcctggaataggtgtgaaactggttcctggccttggcgaggagggaaagaggcccacactgctcccatgtaagagccacggctcttcatgactgcccacagtccaggtccccaccaaggcctgtgtctaactggcggatctaagactcaaaataatcttgatagattagggcccactttatagatgaggaaaatggaggccctggcactaggtaagatggccacattggtcttaaaagagaggacagttgagattagaacccaggtcagtctcttaaaacaaccttctggggctttcctaaacgttattcaaaagcgctttctctgtctgctggaaaggtacaaccattttcattagaaacataagaccaaggtcagtggccagaagtagacggcatgctggtactgtgtgagcctgtactcaggtgcagatcacagcattggttactggacatcttcccccccaatcctgatccgtggccaactgtagcctcttctctctgcagaaaaagaactacaaggctgtttgcatggaaccgaagctgacacaagtaagctgttttgaagttacactagcagccaggccttagatccatggggaggtcattggaggcaaagtcagcttctagtcttggtggccaaagcctatcctacgtgctggggtacctaaaagagataaattccttgtcttcataattcttcaccccagcaaccaaccaatcagatacacaaacagcctagaatgtcagctgcattgcctctgaccctgagaatgactataaggagatagaagtgggttgttctagacacagtgattgggaaaggcctcccctgaagcaagtatgtggggactagatgctagcaaagcagggtctgagaaagaaccctctagatggcaggaagcagctcgactgttcaggggagcagcgggggcaggaagagttgaggcccacggagccaagggaggagcagcacacagaaaagggtggagggctcttctgcacaggcggggccaccagcttgtctttgtgtcctgccttcagagaggcacaggactcagagtggtctctccagcctccgtaactccacccacattcagtttccagggcttctgtgtttctgtttcgacccacagatatatgatttcaaaggatttaaacaagaagggctactcatcagaaaagggatgacgcgggagctgaaggtcggtgcttgggcccccgtggcttggggacaaatcagcttggtgaaggggtggccagccagctaacttctgagtgctggcacctgctggcacctgcagcctggagaccttcactcacaccaggccttgtattttaaacttgttagtttgaaactatttcaattacctccagtttgcaaagaatggcataaaggcttctaggacacatttcacccagctcctgccaatgctgccagtttatcggtcactctattctgtctctgttttcctttctacacagaatcacacacacacacacacacacacaaccctccatgcctttaataaattcaaccaatctgagatttaaaatatttggtaaaacattacagatatttttccatcacgctctaaacaagacggtatattaatcctttgcgtgcatttccttgcattgcgtatttaagtgatccagggatgatttaaagtgtatgggagggtgtgctcgggatggagtggatgtcagcagtggcagatttggatatctgcaggattcctgaagccagttcctctcggataccgaggaactgctgtgggcacctcagccttccccttgctggatagtgggtgggtatctgactgtatctggctcccttccttgtgctctttccttggccttcatcacagagagtcctaatgaggatggattaatcctccatagatgcccagaattgacgaccccatgcatcttctgaaccatttgagaattaagtttacctaaatttttaatgtatactttctaaagtcaagcatgttctctaacacattttcatgtttaattattcaaattaagtcattaacaaagcctttattttggtgttactagctgtctcattactttaacaaaatcaactctaatctctctctctccctctctctccccccctctctctctctttcgcatgtgtatgtgtatatgcatgcatgttttgccagtgtaaagttggagttacaaatagttataagttataaggtgttgggaatggaaaccaggtcctctgatggagcagagagcattcttaacctctaagacatctccagccccattgtgtctctttagtgtgaatcaccctttcagtgattatcttcctggaaatcaacagttttgaagatttattttactgagggaccctttctatttgttatttttaaaaaaataatttttatcctcctgatgtaattgtcatctccaaggcttactgcctctatctggtaacctaggcctggttctggaagcttctagcctccatacacttttatctagacctagaatgttttcagcctctgagacttactgctaagtcagctcagcctctcctaattccttctgaactctggctggttcaactcagctgttctggctcaaactcctctccaagccaacagattcaatctggcttctctctctttcagcctctcctgaattactctgcttagcctcaaactaactctagcaatctgttctaatcttttggctcattctcattctctggcctattctgtctagcttgttctgtctctgcaaccatctctctatcactgtccctgaaaacctgcctcctcctcttctctctgcattgttctcctgagtagcttccctttcctctcttctcctgagagctgatcatagcccattctgtcaaatctttctctgattcgtcactttgtctgccactcaattggctatcactgtgcttccttctacaaactacctttaccttcattgtttgggattaaaggtgtgtactaagggtgcatctgtatttcagccagagggattaaaggtatatgctaagggctgagccacaccacaactagaagcctgtattttcagtaaataacactgtctccagtttcacaatgtgatgatcaaacatcctgcaacagcttgtctgctatttctaggtttaggctgggcgttttgggcaagccttccaaagctatgctcttcaatgtctcctctgcagggcttctacagtcctttccttccctctatttcctagtgcccccaaggacctacccttgtcgaccttaccgtgtgtctctcacatttatttccccagaacgaactcagggaggtgagagaacaactcacggaaaaaatggaagagataaaacaggtaacaggataaggcttcggccagagaagagaagcagagccctgaggcaaatggaagtgctagctctaactagaaatgcaagcaggacttctgtggaaaagcagaaaacctaactcgtacacggtccccatcgtgtttcaaccctggtcagagtagaacagtcttacttcttccatatctaagtccacttttcaattgattaaggactcctccctagtgtgccaaggttggtggtgatgtaacttcaacaataagagtgaagagtggctgactaggaatttagagacagtcacaggttaactaccttctttatgcatcttatctctatgatataatcaccaacagcttactgggggaacagggcataagcaaggaggtattgattcaagctgtggtctgagctccacagtgaagccctgtcaaagctagcggtagcaatggcttggtggtacctgtatcctcagcccttcatagacttctcagaaagaaagtgggttatatagcttattatccatcttttcccaatatccagctgctgtcctttacttaaaatgcccaggaggttctctggctggcttcagtaacccacttcgtgccttgttaaatcatgcttttcttcctcattagataaaggatataatggacaaagatttcgataaactttatgagtttgtggaaattatgaaggtaagctttcactgtatgccttctgtgggttgcctgagaaatgataggagagaggccaggcccctgcccttgaggtatctataacccactagaaagaattggatgctaagttacaggctgtttgttaattaggggttcagaagtcagagtaatgagtgagcatgggggttaggagagaagtccttagagaaaatgtgagccttgaggcttgatgattgtgttgggagcttaatataactgtaaggaaggctcagtgtggctcccctttggctcagaagacaagaaggataatttggaccatggagcaaaggtttgcaaaggttagtctgtttcagaatgacttctaagaagagtgtcttgcaacaacagctgtgagcattcggctagggcctgagttccccataacagaagcttgagagtccccgatgtagatgcacaagcaggcaaagggcaatgacttgagtgtcttcaagatgtctaagggacactaggcttaccagataattaagattcatggtaaacccagtcatcaaatcagggtggttaatgataagcagagatatgaatgtgcatctttttctaggatggctttttttgcatcttaggatggatatcctaagaatcccccccaagagcatattaaaaacatctatacacccaaactccatacagaccaaaaactgaagaaacacttcttcaaggtggagttgtttaagtgccacaaatgattttaaaatgtatatgtgagtgtctatgtgcgtatatgtatgtgtggatgtaggtgcatgtatacttatgaagatagtctttgtagcacatgctagcctccagtctttgatttctcctgcctcacccactgagttctgggactgcaggcccatctcccacacttggcttcttcacacaggatcaaaatgtgtcctctcagatgcaaatcaggttcttcatttttaaaaatgaacatgtccatcgacctgcatattgcaataaggtcagagagtcctgtcctcataccaccccgccccccctcacccaggctctcctcacagcaaacagatcagaatctgagggtgagagtcccagcagcaatgactgagatgtcttcaaggctgagaaccatgtttccataaagttttaaatataataaaggtgattttttttggtggtgcatgggactggatcctggcgtccacaagctaggcagtcagtcatttgactgctgagctggatccagctctgtgacaaaaggtggttctcaaatgtccgtgagaagaaaaaggatatgtaatgacgtatgaacattgcttgactctgtgaggaaaaaccaatccactagcactgtaagctgaactggcctataaagtcaatttaaaaactaaaagccggtaaggaagggttacaaatctaatgaatgaaatgacaaaatattgatatatttacctatataaacattttttaaagaatcgggatggaaaaaaataaccatatacagaattcaaaaacagtttgaggaaatcgatttccataaacgtggtaaggggcaaatggtttttaacctataaaatatagaactcacacaaaacaacatgaaataagtgagaaaatgggcttgaacagacaagccagcaagaacagaacaaaggcacacatcacacaaacagctttgttcccacaatatcagatctatgcaactaagtatcagatagctggggctggagggaaggctgaggcgtcagcccactgctcttgccgtgcacctcagtgtggttccctacacccacactgcgtgtctcacaactgcccataactccagctccgggggatctgatgtgtctgcccttggggggcccctggacaaatgtacacacagacacacagacacacacacacacacacagcagctaaaaagactaagtaatgtaactgtcacactcaaataagcaaagtgtggatttataacaataagctattgataagaatactaacctattaaaagatggaatattaaaaataggtgccactgattcaattctgtttctcaatacttaccccgtgagaatattaaaaactgtcagcataagtatgttcatttcagaattattgataatagcaaataggtgcgacaacaatttccaacagttagaggagtagttgaattatggtctatccatacattactattagggtctattaaagacaaagcttataaagaatgcttatcatgaaatatgagttaagattaataggctaatgtcaactaggtaaaaatgtaagtaaatatataggaaaaagattgggaagaaatatatcaaaaaaatcaaaggtcttgagggagaggcaagaatgttaattttttgaaatattctcctgtgttatccagtgttttttgcaaagggcatgtgctatttctatattaacatgcaaacaccataagcattttatcagtggccagtctggatatggaaaggcacaaagaaagctatttcaggcagggggcagcttgggcacagcagggggatggctgtgtttcccagtccgtggggagaccagccacgggtagggtcatctgggggaaaccgaaaaataaaactgcatagccacacagtgaacaatgacgggcttttagaaacagctgacacacgggcccgaatctcaggagattcctaaagaacactcaggcagcagctgctggcaaggtggcctgggaggtgcgagcagatggggaaggtctggaacctcccccagctgtgatacagggggcacggaaaaggcggcccagggaaggggagagaagtcaacggagatgtggtggttcttggtgacagactcgggatagtgaagtcttaaggagtgtctatggtgacacctgggtttccaccaggatggacaaaggctgtggagaaaaaggacaattgcagcgaggaggattcgggctgatttagaagcggaaggagatgttgggggagactaggaataaagggcgcctgagtgtgctcagcctgaggggcgtgtctgaccggaaggagattttgatgctgttcccatttacaaatgctcacacagctgtcctcagcacaccccgccccctcctgtggcatgagtgcttcatcagcttcctgcatcagaccaagccggttcagtctttttacattaggatcactttcacttggagtaaattatttttttattcatattttatgacaaccagtccacacccagttctgttgacaatgaagactgtcagttacagcttctacacccctagggattctcctgtctattgttatttctatctggcttttcccataggttatttttactttcttagttctcagtgaataataaatgagccgtgttgctttaactactgtcttctatttaatttttgtggcttatttttattattttgaattagtgtgcgtgcatgtgaatctctgtgtgtgtgtgtgtgtgtgtgtgtgtgtgtgtgtgtatgaaactctgaagtcaacaagtctttgaggtcacaacatgttttttgagctgcactgtctcagaagcatcaactcaaagcctcatatctggggtcaggcagaacatcccctggcctttggctggcctagaggccatggtcagtctagtctgcctctgcctgtgctctagtctcatcatgagatggaggtggaaggtgactgtcagggacatgctgcattcaccacctcagccaagtctagagaggactcttaaagtctgaggcagaagtggcttggagggaggagggatctccacgcccttcagaagagggagggatggcttctagccttgggttttctcttgaaggaaatgcagcaggatatggacgaaaagatggatgttttaattaataatcagaagaacaacaagctgtaagtatcctcctcctccctaaagactcctcccttcactttgctcagtgcacaggggtcttagagagggcacccctcaaggaactatcttggcttctgccattaacaatggctggaagctaagatcttccgtgcccatgtgtactggtagaaacagtctccccaaatttctgcctcccccctcccaacccaccagtccctttcaaaaccaagccaaggagcagcagaaattctggcagctaggaaagatggacaaaggctcccaagccatgatcacagaagaacccgatggagcaccattggcttgtgacaagaatgtggtgccaccaaaaccaacgaggaatccactggagtccctccatccatgtcagagttgctgcgtaagtgaactcctgcccaccttcagcacgggttctggagccctgggctgctcctgccctgacttcatctcaagagcccttgcctcaccctattgccagcccttgggatgcagcccttagtctagaaaccgtctgtagttgcctcaccctctaggctatggtgagtcttaagccacaattgttcagtcaacccttggaagtgcctgctcccaagttctgctcagttactctgtgctttcctctagcaaagcctgatgaggtaccctgcaggctggctaacttgaaccaggaaaaaaaaatgatctttcttgtgccgtttctgtcctctgcaggagaaatgtttgttgtgtgccctaaagaccaaccgcaatcaggggtaggtagatccataggagaagtgccttctctcagttgggtgtcttgttatcatcccaaagggagtgtgcttcaacttccttttgcagcaaagcccacctgtagttgtacagggaatagggactgagtggattctgccacccagcataaccacccaggcatagaggatgtggcaccaggaaagaggatttgggtggccaagcctaaggctgctgtccacaagcttgcttggtggggagggtatgcccttagcagcagcctcagcctggccccagatccccacatttcttctacccagcaggagaccttcacaccatgcctgggtgcctttttcacccttgtcgtctggagctgctttctaatttatctgtacttcaacttcgccgaggtggagcatgtgctgccgacctagcacagccatggagcctaccaccagctccaactcatcatctcctgactcctgagctacacagcagacttttctgccctcttaaacaccctccaacccccacccctgcccaggcttccacctggaaattaaagaatctcatttaaagcaaaaaagactgtcaccattttaagtaccagcccaacatttgcgtgcctggagcttcatgttgttgttgctgttgttgttgttgttgttgttgttgctgttgttgttgttgttctaaatcagcatatttcaaaccccaaatcctcttccgctccttgttggctagtggaacattctgagtcatctcaggcttgcctctccctccattccacagggtcctaaagagttccaggtcatagccccacaataaccccaaaatatagagcatcagcctgtatagatgcaagacacagacctgatgccctgcctgctgatcccccacaacctcagctcctgcaatgtttctggatgttgtggggaacagaggcaacctctgagcctcaagtctgacaggactgtgtgcttccctctgaggtgttgtcaccgagcagttctctgcccttcttgagttctggtgaagtttgcctactttcctcctttgacagttttttctgcttccctccctccctacctacccctttccttccgtccttctctccctcccttcctccctctctccctccttccctcccttcctccctacactccaaaggagcagtgtcctttcaaagaccgtcacaaactggagatgagcagacatgatggtgctttctgggatcacttgggagacagaagtaggtgggtttttattagttcaaggccagcctggtctacagagtgattttaggctggcctggaggcctggagtttcatgttgttgttgttgttgttgttgttgttgttgttgttgctgctgctgctgctgctgctgctgctgctgctgctgctgctgctgctgttgggccacaccgtgaggcccttcctcaaacaaacaaacaagttgtgcccacctcaagtccctaagtaaggaaagataaaaccagttgctagcttgggatgagaaaatggtaatttagtgtttatctcacggtgggtctccctctttggctttggtttgacaagctctgtgtccactgcacaccagtccttccatccttttactttgttggatgcttcccctggtagacagttaatcagctggcggctttgtaatgacaacagagtaacacaaacgcatttggtgccaaatcacaacaagggccttgccttgttattccaaggagttcgtagtctgaaaggagctatggtaaacacacaccacaatacatatattatagatcacagtaaccaaatatgagacaacaggagacagtagcggtagccctgtccttgctcccactcttccccattaacttcaccccaactggaatagcttacagcaacaagacatggtgtggctctgctaagaataaagtgtcatcggacttaggttactgctggaaggaagctttggagaagcctcccttctctttcccaggcttaatggtggccttcatttcttagccggtgcctgcctcccatcctcaaagccagctatagctggtggggggtgtctcaagttgtatgatgctgtcttagtcagggtttctattcctgcactaacatcatgaccaagaaccaaattggggaggaaagggtttattcagcttacacttccacattgctgttcatcaccaaagaaagtcaggactggaactcaaacaggtcaggaagcaggagctgatgcagaggtcatggagggatgttccttactggcttgcttcccctggcttgctcagcttgcttttttttttttccattttttattaggtatttagctcatttacatttccaatgctataccaaaagtcccccatagccacccacccccactccaaacccacccactccccctttttggccctggcgttcccctgtactggggcatataaagtttgcgtgtccaatgggcctctctttccagtgatggccgactaggccatcttttgatacatatgcagctagagtcaagagctccggggtactggttagttcataatgttgttccacctatagggttgcagatccctttagctccttggctactttctctagctcctccattgggagccctgtgatccatccattagctgactgtgagcatccacttctgtgtttgctaggccccggcatagtctcacaagagacagctacatctgggtcctttcgataaaatcttgctagtgtatgcaatggtgtcagcttttggatgctgattatggggtggatccctgggtatggcagtctctacatggtccatcctttcatctcagctccaaactttgtctctgtaactccttccaagggtgttttgttcccacttctaaggaggggcatagtgtccacacttcagtcttcatttttttttgagtttcatgtgtttagcaaattgtatcttatatcttgggtatcctaggttttgggctaatatccacttatcagtgagtacatattgtgtgagttcctttgtgaatgtgttacctcactcaggatgatgccctccaggtccatccatttggctagggaatttcataaattcattctttttaatagctgagtagtactcnnnnnnnnnnnnnnnnnnnntacctatcctaaatactataggggactaatatccaacatatataaagaactcaagaaggtagacttcagaaaatcaaataaccccattaaaaaatggggctcagaactgaacaaagaattctcacctgaggaataccgaatggcagagaagcacctgaaaaaatgttcaacatccttaatcatcagggaaatgcaaatcaaaacaaccctgagattccacctcacaccagtcagaatggctaagatcaaaaattcaggtgacagcagatgctggcgtggatgtggagaaagaggaacactcctccattgttggtgggattgcaggcttgtacaaccactctggaaatcagtctggcggttcctcagaaaattggacatagtactaccggaggatccagcaatacctctcctgggcatatatccagaagatgccccaactggtaagaaggacacatgctccactatgttcatagcagccttttttataatagccagaagctggaaagaactcagcttgctttcttatagaaaaacccaggactacgcccagagatggcaccacctgcaaggggccctccccgccttgatcaccaactgagaaaatgccccacagctggatctcatggaggcatttccccaactgaagctcctttctctgtgataactccagcctgtgtcaagttgacacacaaaaccagccagtacagatgctaacacacctcacctgccttcaggtttctcttaaagagcctcgtgatcacattgggcctacccagataacccagactgttctcactgtcctcagtgtttagcaatttcagttcctcattgctacctaaaggaacagaaggctagaacgtgtgtgggtttggagggcacactctgcctaccattgtggcatctcaggacctaacccctgctaaacaaccaaacccatgacgctgtggaatggtccgctgttctttagggtggtggttttaaaagaggcccacacgctccatcgctaccctttcactaaagaaatctaactgtccccctggtgggctagatgtcgccactaatcaacaggatgaggcagagatattgcgggttactttggagatctagcagtttccttccttccaactttctgtcatcggaagccaggtgccatgctttgaggacaccaaagctgtcctatgacaagagattgaagccctctgccaagagccccctaacagaccttatgagaagcaggtactcagactgggaacttagctcagttgactgtaacatgcagaannnnnnnnnnnnnnnnnnnntggcgtggatgtggagaaagaggaacactcctccattgttggtgggattgcaggcttgttcaaccactctggaaatcagtcagtctggtggttcctcagaaaattggacatagtactaccggaggatccagcaatacctctcctgggcatatatccagaagatgccccaactggtaagaaggacacatgctccactatgttcatagcagccttatttataatagccagaagctggaaagaactcagcttgctttcttatagaaaaacccaggactacgcccagagatggcaccacctgcaaggggccctccccgccttgatcaccaactgagaaaatgccccacagctggatctcatggaggcatttccccaattgaagctcctttccctgtgataactccagcctgtgtcaagttgacacacaaaaccagccagtacagatgctaacacacctcacctgccttcaggcttctcttttttttttttttttttttaaagatttatttatttatttattatatgtaagtacactgtagttgtcttcagacactccagaagagggagtcagatcttgttacagatggctgtgagccaccatgtggttgctgggatttgaactctggaccttcggaagaacagtcgggtgctcttacccactgagccatctcaccagcccccttcaggcttctcttaaagagcctcgtgatcacattgggcctacccagataacccagactgttttcactgtcctcagtgtttagcaatttcagttcctcattgctacccaaaggaacagaaggctagaacgtgtgtgggtttggagggcacactctgcctaccattgtggcatctcaggacctaacccctgctaaacaaccaaacccatgacgctgtggaatggtccgctgttctttagggtggtggttttaaaagaggcccacacgctccatcgctaccctttcactaaagaaatctaactgtcccccgggtgggctagatgtcgccactaatcaacaggatgaggcagagatattgcgggttactttggagatctagcagtttccttccttccaactttctgtcatcggaagccaggtgccatgctttgaggacaccaaagctgtcctatgacaagagattgaagccctctgccaagagccccctaacagaccttatgagaagcaggtctcagactgggaacttagctcagttgactgtaacatgcagaaagggctcaggtgctccatgcagcataaagctggccccatgcacctgtgagaatctctctggactcttttataagggcactccattcacaagggctccgtcttttaggcagtttattgcctattacacagtcattggagagctagtcagctccgaaggtatcaccggcacatctaaactacagcatctctctacttccgcactgtggacaacctctaggctctaacccatgacccttcactgttctctacgtacctgtttctcttccttcttgggatactgagggctgagacggagtgtctttctcaaccccgaggctccagaacgaacaccctgctccctaagtgaacatgtggtatttgctcagtattagccttccgaaggtcagaagttaaaattcaaagtaactctgaaagaaatcagactggttctaaagtctgtattaactaacggcagaaaagaaaactggcctgcaacaaaagaaaaagcccccatgaccctacaacgcaaccctccccctgttcatcattaaaaaataaaacagtcttttccctctgaatcaattatctgtctataatcacaactggattaattaggaaatgtttccctagcccttggcttactaacgttcgtctgctagcttattcttcctaggatggctgccgtgggaatataaaatcatctaagaggagccagtgttaacttgactagaagaatgaacttgaaccatgatctcaaatcacagtctctggcaggtaacccgccctgacctgtcccgcaggatctatccacctgtctctgtcacacgccacacagtcccacctgtgtccccaaatctcctcttggcccaaagtcccgacaggggtccttgtctcctctcagctttctgacagccggagtacaggtagatccatccctagccagcaccaggcggtccgtggtcctcagcagggttttcttcagtccatctgttcacctgtctacatgtgccctgggtaagacatccaggagacctggagtgctacagagtgagcaggtgggcccagcactcctgtccagagctctttgggttattctgaggtttcctgagaaggtgactaaagtacaaagcccaaagtgagcttgtaagggagcaatctttcctctgtatcattccatttgcccttttgtctcccccataactgcctgagtccttcacacacacctttgctgaggaccaaacccaggctttcacggatgataagaaagcgctttccgttgagctacgtgccaagcctagtgagctatctctgaaagttctgaaggcttttcctaaaagagctgaaagtaagagaagacaggagcaacacagaatccactggtgactctccacttctgctgtgggttcgttggttggttgtgaatgaatgcatgcatttgcaaagcatcctggcaccacttggtcattcagacttggcattttctttctttctcatcgcaaacaagttccacgggaccccaccccccacccatgctttggttttgagacagtgcctcatgcagctcaaactagccagagagttgctatgcaactgaggctggtcttgaacccctgaccctccttcatccacctcccagatgctgggattgcaggcatgtaccatcatccctgactccatggaatctcttaatatttcatatgtctattgccaaagctccccacctccatattcccatatacaccttaatccaaattctagacatctatattctgaattacaactctctctggtccattcctgtcaagtcagtaatttttacctcaaagcttacaatccttgtacctagtatcacactgcccgatacttcacccctaactgatgctttctgccaagtcaccccctcgctcaaatccctcgagagcctaaggcatatagaacagtggcattcctcataacttccacctcactcccttccatttctgaccttggatttctgcatgtccactcttcaaaccatgtcctcccattcctatcagcaaaccctctggacccttcccactgcctccccattcctgtctgcaagccctctagacccttcccacattcttgctttgctcaccttgtcctcacacccctgtaaaatccttcttggctcccctctgtcttcactcagtatggttatctctggaaggactcatgttgttatcctctgttcccagcaaggaagtcccacccatccttagcaagtgccaagggagtgttgtctgaacttttgctgcctggcttgtgaagttcatgtgtcaactcaactcttcctcctgcacctggagtctgttgcctaaacactgtgggcattcctaaaggaggtctgtacaccagcaaggggccttttacctcagggagccctctagaacttgacaggcttagagaggcttccatcccaacatatagagcagtgtcctgcactcagattggccagtgggatgaggctgtttctcctagatgccagttctaagaattagaggagagccatcaagccagtctgacaatgtgagttcagtctccaggatctgagaggtagaagagaactaactcctgcaagctgttcccggctctccacatataagctgtgtcatgtgtacatctgcaagcacgcacagaaataaatgcaatgaaaatgtttaggggaaaaaaacccctagaggtcattatgggaattgctgccaggggcagcccaggcaccatcgcttctgtgtctctgctgtgtagtccttccagttctgaggatagttagagagcagggaggggctctcctgatcccttgtcctttcccaaacgtcccaaacaaagccctacagcatccagctcaagggcagtgagacaggtttctggtgagaggctacatcatcctggctgtccagcagctgctatgtgtgcctttagggaaagacctgcagggagtcacagtggctattcctggtaacactgtccctgggactcctttgctgattggtgtatgcttttctgtaagtctcaatgtcacctcatgtggagtggagtgacttcttgtaactgtgtagacagtgttttgtaacttcttataactgtgtagactgtgtcttgggggacatctctccaacccacttcctgcttctttgtgctaaaaaatcttgctcttctgaacatatctaggacccagatgatagccaggtggtgtcttagttagggttttactgatgtgaagagacaccatgaccgagacaactctcctacaaggacaacatttaattggggctggctgacaggttcagaggttcagtccattatcatcaaggcagaagcatggcagcatccaggcaggcatggcgcaggaggagctgagagttctacatcttcatctgaaggctgctagcagaatactggcttctaggcagctagaatgagagtcttaaagcccatgcccacagtgacacacctactccaacaaggccacacctcccagtagtgccactccctaggccaagcatattcaaaccatgacaggtggatattgaacccagttgtctacttggatttctttccctgggaatttggaataggatgcagttgactccgttggcctgcagaactgagagctgggaactcagttaaatacatacagaacagaacaagcaaaggctgttgtgataacaacaaagagtcaaggccttccttccattcagtctcaccttcctgtctaaccacagctatgccagggatgcaacaaaaggaactctgttctactctgatttcggagaggaaacaaatgatctgtggctgttcaggggaaacagaaaggctatgtgtgctaagcaacacaatcacacccatgctatagaggatggccactggctagctagtacaggagatagggaggggccccaggtgacagcatctcatgcctataagctcagtgacaatgacaacagagtaaggagtgactgactcgacccaccccacccacggcaacaggtgctgcagccccaggccctgacacaggcatcatcagagacacataagtgagtcatttgagagcagctagagaaaggagggctgggccccagtggggagaggccaaatggtgtcaaccattcctagtcactgcttctgacctggcacaatacctccccctagcaacctctcttctgtcacaaggtgagcgaggatgagctcagactcccaccactgcattctcagcttagacccctctctgtcccaacatgcactccatttctagaagaccaggactccagcctgtagtctcccctcccccagcctgaaacctgcttgctcagggatggagcttcctgctcattcgttctgccacgcccactgctggaacctgcggagccacacacgtgcacctttctactggaccagagattattcggcgggaatcgggtcccctcccccttcctttataactagtgtcgcaacaataaaatttgagctttgatcagaatgaattnnnnnnnnnnnnnnnnnnnnnnnnnnnnnnnnnnnnnnnnnnnnnnnnnnnnnnnnnnnnnnnnnnnnnnnnnnnnnnnnnnnnnnnnnnnnnnnnnnnnnnnnnnnnnnnnnnnnnnnnnnnnnnnnnnnnnnnnnnnnnnnnnnnnnnnnnnnnnnnnnnnnnnnnnnnnnnnnnnnnnnnnnnnnnnnnnnnnnnnnnnnnnnnnnnnnnnnnnnnnnnnnnnnnnnnnnnnnnnnnnnnnnnnnnnnnnnnnnnnnnnnnnnnnnnnnnnnnnnnnnnnnnnnnnnnnnnnnnnnnnnnnnnnnnnnnnnnnnnnnnnnnnnnnnnnnnnnnnnnnnnnnnnnnnnnnnnnnnnnnnnnnnnnnnnnnnagagaggcagagagagagagagagagagagagagagagagagagagagagaga

SEQ ID NO: 610 - DNA, 967 bp, Mus musculus
taagttacataagtcggtggcccagtcctaagggactgttgtggggaggttgggaagttgaagaacacctagcccttccatcatgtcagccaagaatgcagaactgaagaaaactaacctgaaaaagaactacaaggctgtttgcatggaaccgaagctgacacaaatatatgatttcaaaggatttaaacaagaagggctactcatcagaaaagggatgacgcgggagctgaagtgcccccaaggacctacccttgtcgaccttaccgtgtgtctctcacatttatttccccagaacgaactcagggaggtgagagaacaactcacggaaaaaatggaagagataaaacagataaaggatataatggacaaagatttcgataaactttatgagtttgtggaaattatgaaggaaatgcagcaggatatggacgaaaagatggatgttttaattaataatcagaagaacaacaagcttccctttcaaaaccaagccaaggagcagcagaaattctggcagctaggaaagatggacaaaggctcccaagccatgatcacagaagaacccgatggagcaccattggcttgtgacaagaatgtggtgccaccaaaaccaacgaggaatccactggagtccctccatccatgtcagagttgctgcgagaaatgtttgttgtgtgccctaaagaccaaccgcaatcaggggagaccttcacaccatgcctgggtgcctttttcacccttgtcgtctggagctgctttctaatttatctgtacttcaacttcgccgaggtggagcatgtgctgccgacctagcacagccatggagcctaccaccagctccaactcatcatctcctgactcctgagctacacagcagacttttctgccctcttaaacaccctccaacccccacccctgcccaggcttccacctggaaattaaagaatctcatttaaagcaaaaa

SEQ ID NO: 611 - protein, 234 aa, Mus musculus
RTPSPSIMSAKNAELKKTNLKKNYKAVCMEPKLTQIYDFKGFKQEGLLIRKGMTRELKCPQGPTLVDLTVCLSHLFPQNELREVREQLTEKMEEIKQIKDIMDKDFDKLYEFVEIMKEMQQDMDEKMDVLINNQKNNKLPFQNQAKEQQKFWQLGKMDKGSQAMITEEPDGAPLACDKNVVPPKPTRNPLESLHPCQSCCEKCLLCALKTNRNQGRPSHHAWVPFSPLSSGAAF

SEQ ID NO: 612 - DNA, 29584 bp, Homo sapiens
  misc_feature (1)...(29584): n = A,T,C or G
tctactccccaagcaaggaaggtggagggtgtatgcccctcggggaagagtctggggtgcaggtcaaatgtgctggctgtgtagccatggctcccccatttagctgtgacttcagaaaagttaacttctgagttaaacagtttcctcacctgcaaaatgggaatagcagcagtgtttatttcttagggtagtcatgtgggctaaataaacacacacaaggccgggtgtggtggctcacgcctgtaatctcagcactttgggaggccgaggtaggcagattgcctgagctcaggagttcgagaccagcctaggcaacacggtgaaaccccgtctctactaaaatacaaaaaactagccaggcatagcggcgtacacctgtagtcccagctagtcgggaggctggggcaggagaattgcttgaacccaggaggcagaggctgcagtgagctgaaatcatgtcaccacactccacctgggcgacagagcgagactccgtctccaagaaacacgcacatacacacacacaggcacgcacacacacaaaaaaaatgcttgctcaagccactacctggtttgtgacagtggttccctgtatcccagcaggcaaaccattgactctaaggacccacaaggaagaagactggcagggccactgaaacacattgaaacagaggatgcaggccccaagctcctcatcagttgccctttagcaatgggacagatcaacatctctttaagcctgagccatccacccttccatgaggaaatggtgccatgtgtccccggcccctaagctgctctcccatttggcatgaaccaagctgtggaaaccggttgaggagcagcaggaggctgcagaggcggggccaggggcttccccaggaggggccatacatggagctggggtttgcactcttgagaggatgtctgagagtgagctcaggaggggctgtggcaggtgcagctgtggctgaggactgctcaagggaatctgaaaaatgggatattccatcctggaaaaaggggctggtgggggcgtggggtttagacaaatacccttatattagccaggtgccaggggaggaaacaccacgaatgagagcaggaggaggtgggggctttagaatgtgcccattcccattcctatcactgagccaagagagagnnnnnnnnnnnnnnnnnnnnnnnnnnnnnnnnnnnnnnnnnnnnnnnnnnnnnnnnnnnnnnnnnnnnnnnnnnnnnnnnnnnnnnnnnnnnnnnnnnnnnnnnnnnnnnnnnnnnnnnnnnnnnnnnnnnnnnnnnnnnnnnnnnnnnnnnnnnnnnnnnnnnnnnnnnnnnnnnnnnnnnnnnnnnnnnnnnnnnnnnnnnnnnnnnnnnnnnnnnnnnnnnnnnnnnnnnnnnnnnnnnnnnnnnnnnnnnnnnnnnnnnnnnnnnnnnccccagagctcttgctggaactgcctgagaaggaaggtcaagagaggaaggtcctgcagtccacccagtggtcagctaccctgaggctgggccgtaagcgccacagctgagggaggagatgtgctgctgctcaggagatgaagtgacgggtcaagagggaggtaagggtgggacgtccagaggaacagcaggatgaaggccaggtaaggttattgcatcagtgagaggagtctcatgggacaccaggccagcacttcacagtgtccttcctgtggacttactgtggctcccattttctttttttgtttgtttttttgtttttgagacagagtctcactctgttgccaaggctggagtgtagtggtgcaatctcagcttactgcaacctccgcctcctggattcaagcaattctcctgcctcagcctcctgagtagctggattacaggtgcatgcctccatgcccagctaatttttgtatttttagtagagatggggttttgccatgttggccaggctggtctcaaactcctgacctcaggtgatccacccgcctcggcctcccaaagtgctgggattacaagtgtgacccactgtgcccggccggctcccatttttcttattctctgagcactgacagctgaaggagacaatactcagaacccaagggctgctgcgtttatgaatagcccatcatttcctgaggcaggaatgataggacctccaaaaacaagaatatgttagctgcccagacccccatgtggtgaaatgtcagtctgacacacacagctcagagaacaccttgttgttcaacagtcttagaggatgtgtagatttccgtccagtccaaactgctgtgtgcagtgacaaggccaggcaaaggtgctcttgggccagtggagcagacagagggctcatttggtatgcagcatgcctgctgggacaggtgagcatggtctctgctagaagaaagagccatttgatatgacaggggcacactgcccccccagggcccagcatggacaggagctccccatgatgagcggagggggtgtgccgtcttcagaggctcaggcaggcaatgggactggcaaagcctggcattcagtggccctgcctggctcctgcagtggattcagagaagctaggattcagaggagctaggattcagaggagctaggattcagaggagctaggatttaggggagctaggattcaggggagctaggattcagaggagctaggattcagaggagctaggatttaggggagctaggattcaggggagctaggattcagaggagctaggattcaggggagctaggattcagaggagctaggattttggggagctaggattcagaggagctaggattcagaggagctaggattcaggggagttaggattcaggggagctaggattccggggagctaggattcagaggagctaggattcaggggagctaggattcaggggagctaggattcagaggagttaggattttggggagctggggtattgggaagctcaccaggccaggaatgaggtccagatgaacatggcagagacccagccccagtagctgggttgtgctcctcctctgggctccctcagttccctgagcctaccgcaagcatcacacttaccatcttgtgctaaaatggtcaaatgatgcctctgtgagcctcatggatggtgagttcccaggagccagcaccatgtcttaattacctgtgtgcctttggtgccttgcagagtgcttgacgcatggtagatgctcaggaagcctgtgctgaatgaacatgggaatgggtgtggtgtcacctgcatgttgaactagagctgcttgctaagagccagcctggcccggagcctgggcctgccagcgagctgtggggctgagagccaggcaggccccgggatccgtgtttctctggctgggtttctctggatgatcatcatggtctttcgagggatgagggcacaagaaggggatcaatggggtttaatcaataattagatacaaataaattcacatgtgtgtttaggggatttggcaaatgagtgcagcttgctctagcgtttgattcaatccaagttgtctttccctagagggcaattttcacacatgttgccacccagaagagtaatgtcacttatgcctcttcctcagctttaagtcagagtccagggccccagagggttcatcttgaagtgttggtttgtcacatggctcaagaacacctcagagtcccatgtagggaggagccggaagcgtcaggaagcaggcttctgttggctgctcactgcacaagcagggctgctggtgaaagtgcatgctgggtgagcagataagataaggatacctcaaccctctgtgaggaaaaggctgtcccaggtgtctgggtgcagtaaaaggtctgatgtttggctgcagaaaaccagccaagtgagagcatttgtggaaaaaaatcatgagaggcttaaacagaaacacatcgggcttccttttgctcatggccacgagtcgaaattacctaccctgagaattcacgacatggcacgaagtagacatccttgatgtttgcataggaagtgtcctcatgggtcaccaaccaggagttacctctgcacacctgggcatccccaaagatctacaatgaccaggaacatgcggccagctctgtcagttaggttctcagttgcaaagagaatccacattcagctggtttaattgttggaaggactagagaataaggctggactctaagcttccagcaacaatgttcggagccacctcggagatgggctgattcagggagctggctccctcgctccactcacagaggcaaacaggatgcctcgcaggggtttcttcagggcgtgactcagagctaaacacaacccaattttatgtccagcatatcaacgtggatctggatgtatattgtttaactttgttaaacctaaactagagaagaaaaatattttggcattaaatgcgagaggaaaatagaatccattgaattcaagttctagaaaaccacacagcctgtttatgagcattctaccaatgctctttgccaacaagagaaaaaatccacagccctgcacagggctcagtgatgtaacaagaagaaaggagcaaaccaccttggaaactgcctaattcttagtctttaaatgcacccagatgctccctactcaccactcagtcacccaggagaacctcccaggctggctatgtctatgctagcatcagttccctcacttctctcatctcccctgggtctctccaccagagctctcaggatctgcctttggcttctctgtttggagacccacttaaccagttttcttgagcacattgacctcagctctctacgtgactcttggctttacaagttccctcacttttatcaccaccccacagccccaggtaagagatgctctaggccaggcgcagtggctcatgcctataatcccagcactttgggaggccaaggtgggcggatcatctgaggtcaggagttcgagaccagcttggccaacagggtaaaaccccgtctctactaaaaatacaaaaaaaaaattaaccaggcatagtgatggggtcctgtaatcctagctacttgggaggctcaggcaggagaatagcttgaacgtggcaggtggaagttgcagtgagttgagatcatgccactgcactccagcctgggtgaaaagagtgaaactctgtcttaaattaaaaaaaggaaaaaaaaagagagagagagagaaatgctctatctccagcctaggcccaaacccctaccaagagaagaggattcaaactttctgggccaatgttcacatggactcagctctgaggtcctaatgacctcgggggcagaacgttcaagggaaggaggtaaaccagatgtaaaagagtcaatggccaggctgaccccactggatgccaaccagcagtcagtatctccgggttctgaaaaacttggctcaatctgagtcattgccatgttcggtgggtggggcctagcatttggcatctccaggcaggaatcaagttcaggtggcttcatggggctggacacaaaggttcagctgaagaaggttatggattctcagccaagaagacagcagcagggcccacccctcaggaaggggctggcaaagctgaggcaacttggttgggccctagtgctactcagagggcttagaacagcaagagaagtgtagaccagacccacattctgtgctgcagaagggcagaagcctgtggtggggagggaggtttgcagggccttccacagaatgagactgggttagactgggactgggacagactggaactattgcacgggaaagccctggacaaaccagatcattattccagtctctgtctcaatgctccagcccactggccattcaggtgacacagaggtgagtccctaaccctaatcctaactcttccagttcacatttgctaggagatttcattctgtttgagtgtccagtgtaggtttcctcttcttttttgttttttgttttttaattagacagggtctcattctgttgcccagactggagtgcagtggtgtgatcctagctcactgcagccttggcctcctgggctcaagcaatccttccacctcagcctctaaagtagctgggaccacaggcgtgcaccaccaaacccagctactgacttcatggattttggaccttgtaagctacctcccttttaccctaagtgtggaagaactcgaaatcaagttttcttatgaggagacttgttagagtagaataaggaagatgaaatgtgtcaggaaagtatagcggagattagctgcctgccccataagcctgtctcctcttattcttgggagaaacctggccatatttcccagcctcttttgcagtgagatatggccttgtgattatattccagccaaaggaatgtgagtgggagagacgagggctattcccaggactaacccaagaaaccctcccatctgagacgttccactctccatggaccctgtgtgaagcatagtcccccagcaaggccagccccaagaggctactgtgccactcagtttgattgtttcagtgatggatgggaatttgaagctgtcagaggtggagaggaggctattaggggagggaatctcaactgcagagcaccttccggcagggaagctgagagagacaggcgtgaaatcatcactgtactctatttgggttccatccaaagagggtaaagggaactggctaagtaaggaggcctcaggagccctgtttggcaggagcagggagagcctctgctggctggcggtgttgtctttatctcacatggtaggtgccctgtgatggttggttgtgggaagagtagcagtttcccctgggtctcagaaggccctggcaagcataggcctgtcatggtgaacttacagagaagatccttccacaatacatttgctcagacttttcacttgtcattggctgtattgaaatagccagagatttacaatgatctgttcagactgttatgttttgttgctgaaatagaggtaccaggaagttcatatgataaaaactggatataaattttccaaagaaacaacataataggattatgattccagccaaggtctgatacactatgataaaaatgatcagaaattgcatagtaatcagtgtgccaatgataaaagctatttctactctgctcggagtaaagctttccaaggtgtctataaatcagtcaagtaggatgacacaggaatcaatcatatgagatctctaaaaatgtcatgtaagaggatctcatgtaagatcgtctctggctgagggcagccacccagatactgcagcctgttgggatgtaaacagccagggcatcctaagtgtgagtcgtctaggtcacatgtattgagccgtgtctgtttgagtttgactggacagcaaagcctgtgggattctgggtctttgtgaaatgttccaccctaatcaaaggactttagaacattgggcccccagtggtcgaataggcccctcagcacgcatgatgttctcttcatgttctctgggccttgacgcagggagtggctgagcctggacctcatcatgggccagacccagaatcacaaaatgccaaactcagaggcttaaaaccattttaaaattccccccgaccccagcctcccctcacaacactgtatccttaaaactgaaaaaaaaaaagcaggacccttgtaaagaaaatgaaacccaaatgatatcaacttggagaacagagacaggtggctgcttctttctgtctgttgtgaatattccttttcccccaaactccgatggagcagcagtgggctctatgctgcttgccctggtacagaggggttttgccctgaagggggattaggaaaagcgtgtctggcgttcttcaagtaagaacgtcctatggcttacctagaacaaagtcacaccacagcaataccaacactgcaacactgcttcaacctcgtttctcttgcaggtgcaaaagcttcttaaaagaatatgagaatcattattcagactgggcatggtggctcatgcttgcaatcctagcactctgggaggccgaggtgggaggatcccttgagctcaggagttggagatcagcctgagcaacatagtgagaccttgtctccacaaaaaaattttaaaaattagctgggagtggggtggcgcatgcctgtggtcccagctacacaggatgctgaggcaggagaattgcttgagtccaggggttcgagactgcaatgatccatgatcataccactgcactccagcctgggagaaagagcaagatcctgtctcttcataaataaataatcagtattcaggttcgccacgtggattcccccagccccgccagaatatatcgataaaacaatggtgtacaatgtttgagaacatgaatagtaaacgctgtgagaaggcacaagcccagagctgtggctctgtagttaaaattctgcccaaatgataataccatgtgtacttgtgtatatatacatagataattttttactttataatgcagctttgcattgagaccctgatttctcttagaccttctttcctaatagataggccagtgggctcatgtgctatgcttggctagaaggcagctcatttaacaactgctcagccaagcaagggaagctctactgcaggtccaggaggcccccaagccaaaattagcagaaggaggtggggcacattttcacggggctggtggatgttgagatggagtcagtcattttcactgtaattcccttagaggaagggcattcctaccacgaggccatcagatctgagagggctgaattaaaaggtccaaggaaactgaaaagttccagcccctcatttataagtggggaaagtgaagcctgggaagctggtgaccacccccaactccctctccttccgctgatgcagtggcagacacattctcctctggctatggtggagtaagacccacagctgtcaccagtgtcagggctgggaaatcaccacctaggaaatgcatcagaagtgctgcaggtggctccagaagttccagtggcctccaggaaggatagtcccaagcaggtgtgtgaaatgggagggtaagtgtggtcagtagtggcctgcatggggatgtcattcacatgcaatttgcattagttcctgtactcctgtgctgtctgtcctcagatgtccatgttggccttttctgtgcaactagcagttgaaatgagagggaagaaggaagtgaatgaccagtgataagaggaaaagagaaatcaatttcaccaacccagatccccagtgattttttatcccatggggtgccatgttcctctgactgtctactttagcacaaactatggctacccgcagaatggccttttctttagtattcttcatttgcccgaaaagcttcttatctttagcttcttgtcccaaccctcttcccggatgatagaagaactaggaaaagagaatttttaggtgggcaggggtctgggggtggttgtgggacaggggcagtgtgaggtcagaggcatcagaaaccatcctgctgagactggctaccccacctcatacagagtaacccaggttaagtgagacggtgcatgcacgttgaaccagagagacttcatggcatcctccagcccaaggtggcttccggtccgaggtggggtcggttcgcgcgaggagcgcacagcagaggacatgggctgtgcgctcagaggaggagctggctgtccctggaggacgtccttctgagtcagtaggtgagtcctgctgcagaaggagccactgcttctgacgcgtgccttgcacttcgaccgtagcaggccatgatcctcctcagtgtggactttccttctgttgcaagagggaggcctggtgggactctgaaacctggcctgaacccctcatctcagtggccgaagccccccaggcctgaagctgtggtgacgctctggaccaccatgtgggtcctggcattgtgacctcagctgttccgtacacaaaggggtggtcaccctgccctcaccttgacctgtaagttgcctaggacagtggcctggtcccaggggctgttgtggggagttgaagaacaccctggcctcctccatcatgtcggccaagagggcagaattgaagaaaacacatctggtaaaagagagacattgctggacagtgtgggtcctctctgagctcctactgaatggagatggtgtcggggcaagggatacagagaatgctcgcatgaatctctggtttttctttctctgtactgagcataaagcagcctctcagtctggaaggggtgtgggattaatccctagccttgggggtgggaaggaaagaggcctctgctgcctccctctggggatgaggagcactgccaagggagcactccctactccaagaccactcatggttccacggcccatgccaggcctgccaggcccacatctaaccagcagggctaaggctcagaataaccttattagataaatataatcatcacgtcgattttatagatgaggaaatgggggctcagagaggctaagcaactcacccaaaataacagagatagtagagaggtcagctgagactatagtgcaaatctgcctatggccaaagcccttgctctggaaacaacacttccggggcttgcttctagttatcttaaagtgctttctccacgctggcgcctccagcagggagagggctgcctgccaaataggcagacacacgcccataggaagaggacagcacgacaagatgtgagttgttaggaatcggatccgggtgctgcggggtctgtgagcctgagctcaagccagttggacaggcagggttgcatggttgtggggggcagggggcagggttcccgtgcaagggccagatgttctcctccccaatcctgatgtctgccagcctgaatctcagtctcctctttttgcagagcaagaactacaaggcagtttgcctggaattgaagccagagccgaccaaagtaagaagcccttttgagaccatgcaggcagccaggcctgagatccatggggaagtgaccaggagtcaggggtcatttgctgatcctagtggccaagatttgtcccaggtgctgggggatgcactgagagttcttgctctcatagaacttcacactgtaaccaatcagatacataaacgaacaaggactcattcagcagtgttacctgctctgctgggaatcaagacagggagacatgtctgagtggctgccgtggagtgggtggtagggaaaggccttcctttgagctgagagctgaaggacaagactctggctttgcaaaggcagagtaagagccttctaggcagaggaggcagcatgcactgaggcccaaggtgggaatgagcctggctgttcaagggacaaaaggagctgaggccccgtgggccagcaggggagtggaacaagatgagctgaaagagggaggaggatagaggaaccttctgcacaggtggggccaccagctttcctcttgccttagccctaagggaggaacagaaacacagggggatctcttctgcctctgcacttccaccgcccatctgcaattcccaaaggtctgtgttcctgtttcaatccacagacatttgattacaaagcagttaaacaagaagggcggtttaccaaagcaggagtgacacaggacctaaaggtgagtgcgtgaacttggaggcatgtctatattccaaaccacgtgagtgtaagttttccccaaatcctcagtgcctgtttcctaaatacaagaatatcctcttacataggcacagtgcaattatcaaaatccagaagttaacacacagacaatactcatctgtagcccttgttctaatttcaccagttgtcccacacatgtgttgcataacaacagaaaggggacgttttctggtctagggtctgatccaggatcacacattgcctcgaattaccaggtgtcttttctataatctggaacagaacagttctttttctttgggtacactgacatttatttatttttattttattttttgagacaaggtctccctctgtcgcccaggctggagtgcagtggcatgatctaggctcactgcaacctccaactcccaagttcaagcaattctcctgcctcagcctcccgagtatctgggactataggcgtgcaccaccatgcccagctaatttttgtatttttagtagacacagggtttcaccatattggttttgaactcctgacctcagctgatctgtctgccttggcctcctgaagtgctgggattacaggtttgagccactgcacctcgtctggggacattgacatttttacagattacagatcacttatgttgtgggataaccctcaatttggctttgtctgttggattcctcatgatgagattcaggctgtgcattttttggcagagacacatgatgcctgtaggtcccactatcttatagtctttttaaaacattaattaattaattaattttgagatgggggtgggggtctcgctatgttgcccaggctggtttcaaactccttgtttcaagtgatcctcccgccttggcctcccaaagtgctgggattacaggtgtgagccagtgcgcctggtctatcctattgtctcaacaacatcttttctttcctccctattgaaagcttttctctgacagtgtcccaggatctttcctttcctcctgttgatggtttcccctccatcctagatatttctttcctccttctcttctccattttatttcctcagaatgaactcagggaagtgagagaagagctcaaggagaaaatggaggagataaaacaggtaagaagatgaggccttccatatcatggagggaaagtgtagcttcaggaaaaatgcaatccttaagtttgaatagtgaaggaaagcaggaattgcatggaaaaatgtaactcagtcctaatacccagagcacttcagtattaggttattcacttcttacttgtttgatgcctaaacccaatttttgagtgactgaggactccctaaagtgtctctttggtaagggtgggtgatgtcaccttagtgatgaagctgagtaagaggggctgatttggaatatgaatttaggggaagtcagggaccaaccccatcttccttattcacttcccctgagcaagttgcaaagcaggaaacctctcatttctatgatacaaccaaccaaccacctgtagcatccttaggaaaaaagcgaataatcgagcaagaaagtgtaatcgaagctgtggttcaagctccacatgcagtcttgcagtagccagatctaagccgtgccaaggctgatggtggtggtgacttgatggtgcttgcaccctagtcccttcacagactccttgagaagaaagtggctctaacaggccattattagtccatgccagagaagcagccactgccctttgcttaaaatgcctgaaagatgccacaactaacctcaataacatgctctgtgctttgtcaagccatgcctttcttccttgttagataaaggatctaatggacaaggattttgataaacttcacgaatttgtggaaattatgaaggtaagcattacttgagtgccttccatgggccagtaccatactggaaactgtggaagagacaccagcagaccctgccctccaggagcttattatctactagtagtcccatattccattgcaagaaagcattgcaagccaaataattaattcgttgtttgctagttaggggcttagagacatgagaaatgaatgcgggttggagtaagcagcgaagtccttacagagaaagtgagtctcaagttgagccttgaagactgcatgggaagcttaatgcaaatctcatcaagagcccagtaagattcttttttaactcaaaaaattactaggatgatctagattctagagcagtgattgacaacatgtggtgtgtttcagaatcacctggaacactaataaaacagagcctgggctcatgttcagatggtgctgggcccttgtagtttagacaagttcccaggggaaagactgagaagcataagctggcaaaagcaaataggtacccatttttcaagagttgtaaggggacattagccttaccagatattaaaattcacgataaaaacaaagttattaaatcagcccaacgataaccaaacacatgaatgaaatgggatagataacgcctcaacagcctctctgcctgggatgtaatgagaatcagttgtgagaattttaaaactccatttacttagaccctttcccagaggaactgaataaaaatctccagggtgggccggagttgcttaaaactccgtttagattcagatgcttgcctgtggatgagaaccaggtcctaaacactttagcagcagttactaaccttggctgcacattagaatcacctggaaagcctttcacctatgccctccccatccaggctacacctcataacgattaagtcagaagctcttagaatgaggtccagacgccagtgggttttagttgcccaggtgattccagtgtatactcaagttgagaatcacagctctatagaatttacaatatgataaaggtgattttttgatgtcagtcagaaggaaaggattaggtagtaatattagaaacattgcttgactatatgaagaaaaaacttaagccagttaacactgtaaagctaaatagtctatgaagtgattttaaataataaaaaccaataagaagaaatgttaagtaaatatgtaaatagaagttctaaatataaatacaatggaagaaattacaaaggacatattgatatatttaactatgtaagatttttttaaaagaattatgacagaaaaatcacttacatttacagaattaaagaaactgtttgggggaacatttttccaaaaatataagcacagaaaaaaggtttttatccataacatataaagttcacataaatcaataagaactaagtaggaaaatagacaagtgtgaacagacaatccacagaagagaatataactaaaaagcaataaacatattaacaaaggcctgacctcataattaaatacatgcaaatgaacaatcaattattgttacactcaagcaaaattttaatttattacaattacagtataagacatataaatgctcttatactgttaattagagtgcaaatttgtacaaaactggaacattgttagacaatagatataaaaaaatcaacctcttgatttgtcaatttcacttcttagaatttaacctatgagaataatcagaaacgccatcatgggtatacataaaaagatgttcatgacaggattatttgtaataataaaaatttggaaacgacctcaattttcaacagtaggggaatggccaaataaattatgaaatacttatataataaaagttaggaactattaaagacaatgtttagaaagaatatttataataagaactaaaaaagcaagatacaagtaatatacataggctgatctcagctaggttaaaaaaaataagcaaatatatagaaaaaagactggaaagaaatataccaaaggggttcatagcagttatttctggatgagaatattcatacttttatatccctctgtactgtccaaattttctacaaagggcatgcattaattatttctctgttaaaatccaaacaaagttaagtgttttgttggtggggaggctgggtatggaaaggcacaaaggaggcgatttcaggcaggggaaccccttaagcagggcaggaggcaggaggagtatgttgtatatggtggtcagcacggggatcagtcatgaagtgggaccactgggggaaactgtgagggaaaaaaaaaatgaatgggcacaaaggctgtaggtaatgatggcttttgaaagacatgcagacaagctaggacttggttctgtgagcagcaagaggcctctggagattcttaatcaaagaacattctgggaggagcacttcaaaaagcttagcccggcaggttttgtttgcaaggcggcctgggtggggcccggggagcaggtggagatgtctgacagcaagaacaccacagctggaccaggtgtagggaaagaaggaagagataaatctgaaagatgcactgagggaaaaataacagttcctggtgactgattcaatatggagactgaagtcttgagaggcaagcgtccgtgatgacaccaaattttaatctggttgattaaaagaaagtggtgacgatgacaatgacagtggggagatagaggtagcttgggaaaatgaaatcagtttggaacatgatgattttgaaggggtacatgttggtgaaacgtgtaagaatatgggacattttggctctgatgttttggacctaggggacattgacttcaaggatattttgactctatgaatacaaatattttattcaaatttgtactaacatttaaaaatgcttttcaagaaggtattttatgaaatcatctctatgcagatggtgtaatttcttgatcaattttctatagtacatcaattaaactgttaccaaatctttcatttttaatgaaaattactttattggaataaattgtttttatttctgttttatgacaacccaaacctgtttttctctgtgacaaatattgtcagttatagcttctaccatcttagaatttttctcatgtccactatttccattcaatttacccaggtcacattttatagatcaaaactttgtcaagattttattattccttctgttctgagcgaataatacgtgtgatgtatccctttagctgctgtcattttactttttgttgaccatctttgccaggaattaggtaaaagatgaagcaaacataaatatgcaggatctgggtgcatgccaagggtcaaaacattgcagtcaaattgtctttggggtcacaagattggtcttcttggttccatcattttataggcatcaaaccaaggcaagcattggttttatccaaagtgtgagatcagataaaacagtagctggcctctggctcacctagagacttcagaaaagtcccctaatgtctctgcctgtgctttcgtctcattggggaagggggatgaggaaggggagaagctgtacatgtcacggacactccaaaagccacctcacccaagtctagcgaggattcttgaggaagtaagatgcagaatggtttgcagagaggcaggaggaaggtatttccaaagtccttcaaaatgaagatgctagttctgaattctctctcgaaggaaatgcagaaagatatggatgagaagatggacattttaataaatacacagaagaactataagctgtaagtgtaacctgcactcgtctctcctcatccctaaagggtctcctcccttccctttgttggatccctttggggttcagaggacacccagactcttggaggagttgtctttgctcctactgcccctgtgacttggagtcaaggccttccatggccacccgtgtactggttatctccttgtcatgctgcaaaatgtctccccaactctctgcccctccctggccctcctcccccagtccccttagaagagcaccaaaggagcagcaggaactcaggctgatgggaaagactcacagagaaccacagctcaggcccaagaaaatggatggagccagtggagtcaatggagcaccctgtgctcttcacaagaagacgatggcaccacaaaaaacaaaacagggctcactggatccccttcatcactgtgggacctgctgcgtaagtgaaaccctgcccgagcccagcactggtgccagacccctggctccggctccctggtgacttccccgagcttgtgctgtatcatagtgaagggacaggtccgcccgctgctgacttctgggtgccgcccgagcctgcgccctccctgacctgccttgccttctaggcctgtggagcctccttagctgtgaccatgcaggacttgaccctggatgggcctacccgccagctccaccctcttattctgtccttccctttagcaagggcagataaggtgcctagcaggctgcccttcttggaccaggggaaattgatctttcttgtgccgtttctgtcctctgcaggagaaatgtttgttgtgtgctctaaagaacaactacaatcggggtaggtagattcatacaagatgtgccttttctcgatcaggtgccttgttgtccccaaggccatgtgctcccagccgcattcacatcacacccctcctgaggttgtgccaggagtagggactgttagcagatgctgccacccagcatgctcagtcatacaggatgtggcaccaggaaggaggacttgggtcacccagcctagaggctgctgcctggggctcccatggtggggagggtgcaccactagtggcggaactgaccttgcctcaggtcctgccctttctccccatccagtgggaaatattcacaccaggtctgggcacccttttcacccttggcttctggagctgccttctgatttatctgtacctcaaccccggtgacatcgaatatgtgtttccaacctagcgcagctgcagaacctaccagcagttccgattcatcacctccaagctccttaagatgcacagtcagggcttcttgtcctgttaaataccaccccaaccccaggcctccactggagattaaaaaccttcattcaaagccaaaggggatgtcatggttttgagtaccagtccaaaacttgagtgtgtggaggttgattatttttggttctatatcagtgtatttcagactccaacccttccccctgcttcctgatggattggtgggaaattacatcttagtcatcttagggtcctcccaaccaccacctccctccattccacctgggtctgcaaacgtcccaggtcatagcatggggagggcccctgatgatagcggacgccagtctgtgtggtctcaggagagaccctgctgcctggcccatccgctccctccacataatcagcctccacctgtgcatggggccagggtgtcttgggtgatgcagggaacccctcagcctcgagttctgcctgcaccacacccctctgaggtcttgtcaccaagcaggactcaggtccctgctgctcataggaactgggtagctttcttgggttctggggatccacccttctcacccccttgaaggtttcctctccctccctccacccccaaagggaacattccttcagaggcctcaggcctttacaaaggtggagaggagccagtgaccacccaaccttctgtgggccacgctgtgcctgccccaaagtcccagactgagggaaggtgaagcttaactgccagcttgaaatgagagtaaagaagatacagagcaaacagtgtttcagaaactgtcctgccctgggtgtgattctttggcttcaatttgaaggaggaggaatgatgggatttcatattttatttcacaccagttcctccttgtttcatctctttgctaagctggctgcttctaccatctaataaataattggccaagttctttttttttggaattttattattatggttaattttgtgggttcatagtaggtgtatatatttatggggtacatgagatgttttgacaaagttacgcaaggtgaaataagcatgccatggagaatggggtatccatcccttcaagcatttatctttgagttgcaaacaatccagttacgctttaagttatttgaaaatgtacagttattgactgtagtcaccctgttgtgctatcaaatggtaggtctaatttattctattttttgtaccccttaaccatccctaccggcccccaagcccctgactacccttcccagcctctggtaaccatccttctactctatatccatgagtttcattgttttcatttttagatcccacaaataagtgagaacatgcgatgtttgtctttctgtgcccggcttatttcactaaacataatgatttccagttccatccacattgttgcaaacgacaggagttcattctttttatggctgaatagaactcaattgtgtgtgtgtacgatattttcctcattcatctgttgatgacacttaggttgcttccgaatcctggctattgtgaacagtgatgcaacaaatgtgagagtgcagatatctcttcaatatgctgattttctttcttgtaggtatatacgcagcagtgggactgctggatctatggtagctcaatttttagttttttgaggaacaacctccaaactgttctccatagtggctgtactaatttacattcccaccaacagtgtacaaagattcccttttctccgggtcaagttcttaatggctgcaaattaatgagcaatgtatttggtgcttcagataaacatttaaaaaacaaaactcaaaacacatgtaggccttgtttgcaaggagcttatagctttaaaggtgagatggcaaacatgcagaataacaatatggaccgtgtagaaataagtacaataatcataagcatgtgatgaaagcagaaatggatcagaaatagggaaaagaagaagggtgggcagaactctgtattagttccctattgctgctgtcacagatcaccacaaatttaatgacttaagacaacaagaaatgggcctaagatggatcttgttgggctcaaatcaaggtgccagcacaactgcattccttctggaagctctaggggaaaatctgcttcctggcctttccccacttctggaggccacctgccttccttggctgatggtccctccccatcttcaaggccagcaatggccatgggatctttcttgtgcctcatcactctgacattgactcttctgcctcttgctaccacatttaaggacccttgtgattacattgagcccacctgggtaatccagaataatctttttattttaaggttagccagttagcaactctaattccccttttccaggtaacataacatattcacaggctcagggagttagaacatggacatctttgcaggacattattctacccaccacaggggacttcccagaccctgtcccttgactaccaagcctccaaacacttgggaacactgcactattcagttctgtgctgtggtggttttaaactaggcccacaaattctttgatactccttttatactctttccttcaagaggaacccagttcctctcctcttaagtgtgggctacacagagtgacttgcttctaatgaatggaacatagcagaagtgatgtgtattacttctgaggttaagtcgtagaagacatggtggcttccatcttgctctctcttggacactcattctgagtgaagccggctgccatgttgtaaggacacccaagcaatcctgtggagagggccacatggcaagaaactgaggcctcctgccaatagccatttgagtgagccatttgaccaggaagtgaatcctccagccccagtagagccttcagatgatggcaaccctggctgacctcttgcctgcaactgcctgagaagatcctgagccagaaccactcggttaagcttctcctagacacctggcctgcagcaaccatgaaataataaatgcttgttgtttttaagttgctaagtcttgaggtaatttgttgttacttagcaacagataagaatgtgtctatctcctcttcattgttttaaagacttgaaacattgagatttatatggttatgcacacaaatgtacaacttgatgaacttttacatacagatacatgactggaattgttctagaacacttccatcccctcttcccagctcacatttgccccatatccaggttaccactattttaatctctaccattttgtgttattttgcctgttcttaaagttgacataaatgggataatatgttatgtattattttgctcaaaattgtacaactcatgcatattgtttgtatatagcagtaattcattattttttaactgccatgaagtttctatcttgtgtctacctcataatctatttttctattctcctgttggtagtccagattgttctttaaaataatctaagtaaaagccattttcccagttgccctctgtccattcttccctatatttgaacactttccttagtccacagtgcctggtgggttacactgcttcctcttcactgaggagtgtacgaaagggcctgcctgcctccccatgcctactctgcttagccctgaatgcctgtcctctgcctgnnnnnnnnnnnnnnnnnnnnnnnnnnnnnnnnnnnnnnnnnnnnnnnnnnnnnnnnnnnnnnnnnnnnnnnnnnnnnnnnnnnnnnnnnnnnnnnnnnnnnnnnnnnnnnnnnnnnnnnnnnnnnnnnnnnnnnnnnnnnnnnnnnnnnnnnnnnnnnnnnnnnnnnnnnnnnnnnnnnnnnnnnnnnnnnnnnnnnnnnnnnnnnnnnnnnnnnnnnnnnnnnnnnnnnnnnnnnnnnnnnnnnnnnnnnnnnnnnnnnnnnnnnnnnnnnnnnnnnnnnnnnnnnnnnnnnnnnnnnnnnnnnnnnnnnnnnnnnnnnnnnnnnnnnnnnnnnnnnnnnnnnnnnnnnnnnnnnnnnnnnnnnnnnnnnnnnnnnnnnnnnnnnnnnnnnnnnnnnnnnnnnnnnnnnnnnnnnnnnnnnnnnnnnnnnnnnnnnnnnnnnnnnnnnnnnnnnnnnnnnnnnnnnnnnnnnnnnnnnnnnnnnnnnnnnnnnnnnnnnnnnnnnnnnnnnnnnnnnnnnnnnnnnnnnnnnnnnnnnnnnnnnnnnnnnnnnnnnnnnnnnnnnnnnnnnnnnnnnnnnnnnnnnnnnnnnnnnnnnnnnnnnnnnnnnnnnnnnnnnnnnnnnnnnnnnnnnnnnnnnnnnnnnnnnnnnnnnnnnnnnnnnnnnnnnnnnnnnnnnnnnnnnnnnnnnnnnnnnnnnnnnnnnnnnnnnnnnnnnnnnnnnnnnnnnnnnnnnnnnnnnnnnnnnnnnnnnnnnnnnnnnnnnnnnnnnnnnnnnnnnnnnnnnnnnnnnnnnnnnnnnnnnnnnnnnnnnnnnnnnnnnnnnnnnnnnnnnnnnnnnnnnnnnnnnnnnnnnnnnnnnnnnnnnnnnnnnnnnnnnnnnnnnnnnnnnnnnnnnnnnnnnnnnnnnnnnnnnnnnnnnnnnnnnnnnnnnnnnnnnnnnnnnnnnnnnnnnnnnnnnnnnnnnnnnnnnnnnnnnnnnnnnnnnnnnnnnnnnnnnnnnnnnnnnnnnnnnnnnnnnnnnnnnnnnnnnnnnnnnnnnnnnnnnnnnnnnnnnnnnnnnnnnnnnnnnnnnnnnnnnnnnnnnnnnnnnnnnnnnnnnnnnnnnnnnnnnnnnnnnnnnnnnnnnnnnnnnnnnnnnnnnnnnnnnnnnnnnnnnnnnnnnnnnnnnnnnnnnnnnnnnnnnnnnnnnnnnnnnnnnnnnnnnnnnnnnnnnnnnnnnnnnnnnnnnnnnnnnnnnnnnnnnnnnnnnnnnnnnnnnnnnnnnnnnnnnnnnnnnnnnnnnnnnnnnnnnnnnnnnnnnnnnnnnnnnnnnnnnnnnnnnnnnnnnnnnnnnnnnnnnnnnnnnnnnnnnnnnnnnnnnnnnnnnnnnnnnnnnnnnnnnnnnnnnnnnnnnnnnnnnnnnnnnnnnnnnnnnnnnnnnnnnnnnnnnnnnnnnnnnnnnnnnnnnnnnnnnnnnnnnnnnnnnnnnnnnnnnnnnnnnnnnnnnnnnnnnnncttggactcaagccctgacctgtcacccaagcttggtatctacctgttgtttcagggcctcatcatcctgtcaacttcaacacagccaaaaccaaacttccccgtgtccccaaacccttctctgtctgacttgctgatgggagtccttgtctttgctcagttctctgacagctagagcacaggctgatctccagccaaaggttggacctcatccccccacagggctttcaccagcctgtctgtttgcctgtccacttggtgccctggactaaacatccctggaggaaacctggagtgctgtggagctcagagccccctgccctgagcagctggtcccagagctcctttggttattttgaggatttctgagaatacaggtaaagtacctgttacaaagcttcctctttcctcttcgatggcttcctccatgacatatctttgatggcttcttagggccttttccgaagagctgaggatgaaaaaagaggatgtgagtcccttaagggcagagactgtgtagaattcattgattatgccctgcccctgccacttgatggctgcgtggctgtggagagcatgccctttttctgcccttggtaccacgttagtcattaaagcttcacatcttctccatctcccatagcaaatgagcacctgggtcccatggcctttaaccatttcaaatgtttattcctgaattctcccctctcccatacacactctaatccaagctcttagtgtctggatcctgagctatgtccagtagcttctgacccagtcctcttgactccaggagtttcttctcacagcctggaatccattgtccacgccacttccagagatttcctcccgaactactactttactctgcaactcaccgtcttgctcaaaaaccatccccagggctgattactggtgggataacagacacactctttaacctgccgttcaaggccttgcatttcccatattatttttcaccttttctcccccgttcctatctgtaaaccctacactctagggtcccaaatgtgcccttcacattcccatatccttgccttcactccccttcttctctgagctccaggaatctcccatcatccccgctgcactgccctctgctctaacagctcctcattgacccaaggaataggtcactcggccgtgtagaggtgtttcccatcttactgttccaacctgcatatgtctttcctctccatgcagattgtcagtttctagaggcagagcttatgctgtcttcatcttcatcctcagcatggtggtcagaaccctgcacttggcaggggctgaggaaaaattttttggttgaacttttgctgcctagcctgacagattcacatgttggcccttctgacccactcctgccctcttggctctgtggccttgggactgtggacatccccgagggtcctggggtgccaacaggggtctcctgtcacatggagccctccgggactgtgcaggtttgggggcgatcccaagaaaattctccatactatccagtgtccatcccagatcatatctggaaatatacatacatcaccatggtgccaggctggcagacgggatgagcaaggctgcctcccagcctacgtaggtgccagttttaagaacagaagcaaagtcatcagggaaactgagctgccacaatctgctgaggcactaacttctttatggaaatgatgctgcagctctaattcagtgccgaggactggtggcagtggtctctgccttccccatcccttgatctttcccaagccccctcatgccccagtcccatgtcacccaactcacaggcaacaggacatctgtgtgtgtttcagggacaggcttgcctggctgtcaaaaagctgtttcctgtgcccctggggagagacctgcagggagccaccgccagacgttcctgctgacactgcgcacaggccagctttactggcaagcttgtgctttattcgtaggtctcaatgtcacctcctctgggacagaatgatacttaattttgtctcttttcctaaaaatactattcctgtcctgtgtacagagccatggtgggcatctccctgacccaggcccctacttctgtgccatgggaccctgccctcctggacataatcaggagccggttgactggaccggggtggatgccaaacccagctcacccagttggattcctttccctggggatttggaactggaatttggtgagagctcagttggccccagaattgaagatatgtaactgggagctgggttgccatctgccaccgttagctgaagatgcagaaaaagctgatctgttggaaaagaaaaccagttcacagaaagagaagaatgaagtggaggagtggagggaaaggccctgcaatccaaagaggggtctgcaagagccactctccgggtcccaggccctcttggtccagttgtagttcccaccttagctctgagggaccccctggcctcttggactatatcacccattcctgtttaggcagagtgggcttctgttatcaccaaacaagccttagctaaggccacacagaagagatcttggagatggtctggtcaatctcttccatttacaggtgaggggtttgaggtccagaggtgtgtggcgaggcgccctccgctgtggccaggccaggactacagcccaggttttctggctcccggcccagcactttgctccctttgccctgtggccctctggggccagcaactcttttagagatagcaggtgagataggaggagctcagaggtcacagccagccggatccagatacaaattggtggatgctgcagacacgttacttagcctctctgagactcagcatattcctccagaatgtaggggtgataacatctagttaataggagtgttgtgagaattaaatgagtatatatggaggaattagattttttaaaaactgttgtgttgacagtaaccatgaggtcagagttgcctttcctggatcaaaggccttccattcacagacccagttttctgacacattgactaacacttatcatgtcgaggcctgcaatgaaatgaattttgatctaccttaaaaaataaacaaatgacttacagttattttgagaggaggtaggaaataaaataataggaaaacgtgagtgggtggggatcaggactggctattctagaggacaggggtgggtcccttgtaacacagcatctcactcctgtcaacctggtggccaatgacaacagagtgaggggcagttggctcaccccagccctcccataggtaacaggtgcggcagccccaggccttgacgcatgtggtcatcagagaaacatgagggtgagtcatctgggagcaattaagaggggaggcccaggaggaggccagactgtgtcatccatcccatcactgccacagcactggcccagtgcccactcacaacattccttctcctgggtcacaggccacaggccagcccagaaggtggctgaggatgggctcaggcatccaacacttctgactggggcccagatccatctctcttaaactcagcagctctgaggatcccccaattccatggcaacgggctgcctacccaccttcccaaggggtgctactctgacttgccacagtctagtctcagcaaactgaagctgtcctttaaaaacataaattagaacatgtcactcttcagctcagaactttccagtgttttcccacttctctcagagcaaaatgcaaagtcaatggttcacaaagccctacaggatccgccctgctgccttccccatccctaaccctgtacagtatttcacttgcactttctagccatgctggtttctttgtttttcttcaaacacaacacataccctcttgcctcagggcctctgcacttgcaaaccctaccccctctcaccaccctgccaccaccatcactagaattctcagccttccagtcggccagctccctcgcctcaaagttaccttctcagtggcccccagtcccagcattccttatctctcttactgtctgctttatttttctctccagcactcttgtcaccaactcacataccatacagtttacttatttgtttattgtctgtctttttctacgagaatctaagctttttgagtgtggagattttgtttctgtcactgccatatcccagggcccagaacagtgccaggcactagcaggggatcgataagcacctgtcgaaaggccacatggacatcaagagacttaccatctactgggcactgagggttctgggctaagagcttttctaatattatttatttcatttttttttcttttgagacagagtcttgctctgtcccccaggctggagtacagtggcgtgatctccgctcactgcaacctccgcctcccgggttcaagcaattctcctgcctcagcctcccgagtagctgggattacaggtgcctaccaccacacctggctgatttttgtatttttagtagacacagggtttcaccatgttggccaggttggtcttgaactcctgaccttgtgatctgcctgcctcagcctcccaaagtgttgggattacaggcgtgagccaccacgcctggttatttatttcattttatacttatgacaaccctgtgaagtccctctgtcattctatgcagccgttgaaattgtcattcttgccattttatacaggatgaaataaactcagagagaaggtaatgagcataatctgtctgaggtcacaggatacgtggcagagctgaaattcgaatcctagcattctgacttcagaacctgtttcctggacactctggcttctctcgatgtggtccccggcccggcagcatcagcactgtctgggagcttgtgggaggtgcagcatctcaggctctaccccagacctactgaatcagaatctgcattttcacaatacttcctgggtgagcccttccagggcacactaaagtcaccactataagcaatgggatctgctgtatggaaaacagggggcctcgctctgaacaaggggctgcccacggcctgggggtcattcccctgccattaccgccccccgccctacccaggagcgctcccctgtctgctgttgcaatcctgaaagaaggctgagaagggcttggtgcaggtagtgaggctttaggcttcctcttcagctgcccacgggcctctgtcggagggccagatttcgtgttgatcagggaaggctcagcccctgcctgtgtgtgagagccaggcctgtcatggacagggctgttggagaaaacgctccccgttcacttagggagcagcaggctgcacctctcaaaagcaggcagagagccaatttgacatcagaggtacagcgctgagcccgggcaagaagccatttccccttgacacttctcaggcacttggaccaggaaggctgttaaaacaaaaacaaaacctactctcatttaggttattaatgcctgggagccctgacactcattttattaccaggagccacctttggtcttgacattcactaaggagtgggcctggaataaaaccagaaatccccattctcagtctgccccaagccctccaattccgagggcgctgtatgtataagctcgggcaggcaaaagtcgactgtgagaacacgccagcagagggcgctgtggccccatcagtccctgcccactgaactctccagaaggaaaagcggcaaggatgcaaacaagaaaatcagaccagactgggagtctagaccctgcgtcccacgcggtcccaccatggcttcctctttggaattt

SEQ ID NO: 613 - DNA, 833 bp, Homo sapiens
ccgtacacaaaggggtggtcaccctgccctcaccttgacctgtaagttgcctaggacagtggcctggtcccaggggctgttgtggggagttgaagaacaccctggcctcctccatcatgtcggccaagagggcagaattgaagaaaacacatctgagcaagaactacaaggcagtttgcctggaattgaagccagagccgaccaaaacatttgattacaaagcagttaaacaagaagggcggtttaccaaagcaggagtgacacaggacctaaagaatgaactcagggaagtgagagaagagctcaaggagaaaatggaggagataaaacagataaaggatctaatggacaaggattttgataaacttcacgaatttgtggaaattatgaaggaaatgcagaaagatatggatgagaagatggacattttaataaatacacagaagaactataagcttccccttagaagagcaccaaaggagcagcaggaactcaggctgatgggaaagactcacagagaaccacagctcaggcccaagaaaatggatggagccagtggagtcaatggagcaccctgtgctcttcacaagaagacgatggcaccacaaaaaacaaaacagggctcactggatccccttcatcactgtgggacctgctgcgagaaatgtttgttgtgtgctctaaagaacaactacaatcgggcgcagctgcagaacctaccagcagttccgattcatcacctccaagctccttaagatgcacagtcagggcttcttgtcctgttaaataccaccccaaccccaggcctccactggagattaaaaaccttcatt

SEQ ID NO: 614 - protein, 210 aa, Homo sapiens
MSAKRAELKKTHLSKNYKAVCLELKPEPTKTFDYKAVKQEGRFTKAGVTQDLKNELREVREELKEKMEEIKQIKDLMDKDFDKLHEFVEIMKEMQKDMDEKMDILINTQKNYKLPLRRAPKEQQELRLMGKTEPQLRPKKMDGASGVNGAPCALHKKTMAPQKTKQGSLDPLHHCGTCCEKCLLCALKNNYNRAQLQNLPAVPIHHLQAP

SEQ ID NO: 615 - DNA, 1034 bp, Homo sapiens
ccgtacacaaaggggtggtcaccctgccctcaccttgacctgtaagttgcctaggacagtggcctggtcccaggggctgttgtggggagttgaagaacaccctggcctcctccatcatgtcggccaagagggcagaattgaagaaaacacatctgagcaagaactacaaggcagtttgcctggaattgaagccagagccgaccaaaacatttgattacaaagcagttaaacaagaagggcggtttaccaaagcaggagtgacacaggacctaaagaatgaactcagggaagtgagagaagagctcaaggagaaaatggaggagataaaacagataaaggatctaatggacaaggattttgataaacttcacgaatttgtggaaattatgaaggaaatgcagaaagatatggatgagaagatggacattttaataaatacacagaagaactataagcttccccttagaagagcaccaaaggagcagcaggaactcaggctgatgggaaagactcacagagaaccacagctcaggcccaagaaaatggatggagccagtggagtcaatggagcaccctgtgctcttcacaagaagacgatggcaccacaaaaaacaaaacagggctcactggatccccttcatcactgtgggacctgctgcgagaaatgtttgttgtgtgctctaaagaacaactacaatcgggggaacattccttcagaggcctcaggcctttacaaaggtggagaggagccagtgaccacccaaccttctgtgggccacgctgtgcctgccccaaagtcccagactgagggaaggtgaagcttaactgccagcttgaaatgagagtaaagaagatacagagcaaacagtgtttcagaaactgtcctgccctgggtgtgattctttggcttcaatttgaaggaggaggaatgatgggatttcatattttatttcacaccagttcctccttgtttcatctctttgctaagctggctgcttctaccatctaataaataattggccaagttctttttt

SEQ ID NO: 616 - protein, 229 aa, Homo sapiens
MSAKRAELKKTHLSKNYKAVCLELKPEPTKTFDYKAVKQEGRFTKAGVTQDLKNELREVREELKEKMEEIKQIKDLMDKDFDKLHEFVEIMKEMQKDMDEKMDILINTQKNYKLPLRRAPKEQQELRLMGKTEPQLRPKKMDGASGVNGAPCALHKKTMAPQKTKQGSLDPLHHCGTCCEKCLLCALKNNYNRGNIPSEASGKGGEEPVTTQPSVGHAVPAPKSQTEGR

SEQ ID NO: 617 - DNA, 79731 bp, Mus musculus
  misc_feature (1)...(79731): n = A,T,C or G
gctcctccaagagtgttcattggtacttactgtcttgtatttgtttgggaagagagagcnnnnnnnnnnnnnnnnnnnnnnnnnnnnnnnnnnnnnnnnnnnnnnnnnnnnnnnnnnnnnnnnnnnnnnnnnnnnnnnnnnnnnnnnnnnnnnnnnnnnnnnnnnnnnnnnnnnnnnnnnnnnnnnnnnnnnnnnnnnnnnnnnnnnnnnnnnnngactctttcaatttccaacatagaccatgagtctgactactgatgaaagatagtgattgtctctatgaacacaatgaacacgtagaagtcagaggacaacttttctccttatggctttatgtgggctttaaattcaggtcctcaggcttgcatagcaggcactttatctgctcagccatctcccagccctgacacagtcactaagatgagaagatctatgaattacacacacacacacacacacacacacacacacacacacacccctttaatctcccatgtgctgattttaatcctgctatttcctgaactggctttgtgaagatttcatgccacatagtggaccaagttttgttatctgctgttgataacttggagttctgcttttgggggtctgatgtgttgaagatgactatattattgtgcaagtcagagcatatctgaaagtaaaagttggcactgttattaattatgtcagaattattaacggagtgaagcaggcttgccagagcagcagatggcattttagggaatctccattccctggttgtcttcctgcttcaaggttttattcttatggtcccttcacctgatcttccagccttggaacctcatgaattaaaaagcaaaacctatcttctgtagttttgtgtggcttgtgagtagagataattacacaggttcaattaaggcattctttcttccaagcttaatcattgttaacttactttgattccttctaaactgctgcattttaaaaaaatttaaatattcttgtctagtccactagaagatgacatctttaaaatcttcccttgaactaaaatgctttatacaaggtgccccataaatagttgattacagttcaccatcactaagttttcccaaacataaagtaccaaatagggaaactagaattaaaagccatgtgatctagattattgatgttactttttcgtaggttctaaggcttaactgtccccagtgtctaagacactgtgtccttatttctttgaaaatcctctctctcctcccaaccagnnnnnnnnnnnnnnnnnnnnnnnnnnnnnnnnnnnnnnnnnnnnnnnnnnnnnnnnnnnnnnnnnnnnnnnnnnnnnnnnnnnnnnnnnnnnnnnnnnnnnnnnnnnnnnnnnnnnnnnnnnnnnnnnnnnnnnnnnnnnnnnnnnnnnnnnnnnnnnnnnaggccaaagaacaactttggatgtacttaattagattccatagtcattaaaaaaacaacaacaacaaaaaacttctcactggtctgaagatgagtaggccaggctggctagccagtggcctctagtagcacactgcctctgcttttccagtgctggctgacaagccatgccttacaaccagctactttaaaaaacttgtgttctggggggcatagtcatccccatgattgaaggcaagtgagttactgacttcctgtatcttcagctttacctcatttagtaaggactatcttaaatacattatctccttttcccctcaaataaaaaaatgactttacttttcccttaatcttgtggtacctgctattaatatcatttggcctttattcaacatgtcttacacatctcatttctccttctgaagatgctttcacattattttgagtgcaacccataattagacacattcttacactgcaacacaatttcattcatatatatatatatattcatatatatatatatatgaatatatcacacgcacacacacaactgaaataggagtgccaagaaaaaccatccccagtactgagacatactctgatatattttttaaagtgattattttttctttttaaaaatggttttgtatttttgagagtcacttactgtaattccagctggtccagaattcagtatgaagctcaggtgacctcaaactcttgggtgatccttgggcctgaactgtgacagtgcatgttgtggcatgagctaccacgcctgacatcttttactttctaaaagatgctgctgttctccctcaaaactgactcttgaccctctaatgaactgtgacctgacctgttgctctgttgaaaagcttctaaacttgagacacataaacaccacttactggtctaaaaatgtgggtaaaaacacaattacacttttaccttctttaaattcttactaaaatttacaatttcatattctcattatatgaatgtgggtgataattagtctagaagcataactctaatattaaggactcatgttttgatgcttatattccataactgacttctctgttaagctatacattttaatgtctttataaactttctgagacttaacactcttcagaaatatgttaagactccctctctatgagtagctatctgtctcagtacattttacataaggaaagatcagtaaatattttttaaacaatttacttcttccatgttacacaagagtaactagaactcagaacaatcaagtcagacacaagtaatattatacaaataaaacttcctgtggtcaccagtagtgaaagagatagtttgctagcttggggcctctaggaaatagtaacatttgtaacatcttacgacttctaagaattcagcaacagagaagattatactaatttagtgtgattagagtaatgaaatagttaaacaaaaatgacttcttgtgccattgtataaaagttattgtattataaaacccatgatctcataaattaatgtactgtttgtaaagtcagaacacaaacaaatgaacttgaagtaaaggccaagtatttcagggcatggcaagcagtttgctttggtgagaaattgagtcatgaacggaaaaaaaaaaagtagataagtcttgaaccattggatatgctcaatcaaagaaggctttgagtgccaggccaaggaagcaaccctttattagcaaagtatttaaggccgacatgagattgtatttatttttttaattaaagcaagggcgggatggaggcagtgttttaggaagctattacatgacagcattgtacaggagagacacaacacttccacttactcctaatcttatccttcaaagttgatgctagatatttccaccagagccttaaacccaatactgtgcttccaaaacgaaactaatctaaacaaacaaacaaacaaacaaacaaacacaatgattgtcaggaagactctgcactcacgagtggtttcatgtcattactgcaaaatcaagttcctaatagtgggcttgttctctctctctctctctctctctctctctctctctctctctctctctctctctcctcttgctctctctctctctctctctctctctcctcttgctctctctctcctcttgctctctctctctctctctctctctctctctctctctctctctctctctctctcttcatgtcctctctatcccattacctctccaactcctctttctgcctctaccaggctacctcacagcaagaaagacctccttggatcctccctagagtcatggattgagccttggttcctccccgtccccccagagtcccccttcaattgatattggatcctccctagagtcatcaatttatattacatcctcctatcatttgatattacatcctctttagagtcatcaattaatattgcatgctccctagaatcaatagttgatccttgatcctctctagagttatggattgatccttggtctgcctcccctaaactccttaattgatcttggatcctccctagagccatcaattgattttggatcctccttagagttagttatcagttgttcttggatccttcctagagtcatcaattgatcctggatcctccctagagccatcaattgattttggatcctccttagagttagttatcagttgttcttggatccttcctagagtcatcaattgatcctggatcctccctagagccatttattgattttggaccttttctagaaccatcacttgattttggatcctccttagagtcatcagttgttcttagatcctccctagagtcatggattgatccttggtcctccctagagtcatcagttgatcttgggtcctccctagaggattaattttagaattctcagcctagaaatctgtaaaaacaaaaaccaaaaaccaaatgtagacagtaacttaaggatgatagtcttatgcattcccattctagcttctaagtaactgacatagagatttagtaaactttttaataagttttaagcactatgagtgggcaggtgagcatctttctaaccctctaagctatctatttcccagccatatggtcctttatcttcaatctgagtcttaccctgttgctctggcccatatgtgtcctcatgtctgctctctcattgtgacctactcatcacaactcctcctggaccctctgcctcatgctctctccacattgcctctttaccttctttcctcatgatccttctcttacttctctttgtacctgggacccctggttggtgtcagaagttcagccttcctatctcttctgcctagtcataggctgagtcatctctttattgaccaatcagagatgatggaaaataatttttacctaacattgaggctagcgatgcttgagcctgcaatcttccagactgcataccaaatcaggatctgagtacacagtacacaagaccaacccccaacaaacatcttcaatttaagtaaaaagtattaagtataaattatcctgttagagacacaaaattaatgcagataaattggttctggctgatttcatactcataattccccctgcctcagtttcctgggttttaaaatttatagacaggcaccacaattgcaagattttttttccaaggaaggagtgttttgttatttgaaatataaacaggactctacaggatagcatgcccccacccattgagaagataaaatgagttcccagctagctagaaatagaattccttgtcttatccccttctcagttttaccttttcctccccaaatagccagattatacatgatactaagacttgaaaagtaattttctttctttctttctttctttctttctttctttctttctttctttctttctttctttctctctctctctttctttctttctctctctctatttctttctttctttcatttcttcttcttcttcttcttcttcttctttagaaaaagagtagctaaataaaggtacataaggaaaaacattaggtggagaaaaacagcaaattcaggtgcacttactcatactttcaacattttgttaacaataaaagaagcagatacaatttcaagtaaatcaaaatacgtcaatgtctactaatcaaaaaaacacctccttaaattagacaaatagttctcttcttgagtttcttaggtaccatttatatgggagataaaggacaaaagagatggccagaaggtgttggctgctgttctgagatcggtctgttctttcttaccagcagtaaagactttctgatctttatcagggctgggacctaacccctacatagtttctgtgttgttaacctttcaggaatggctgagcttttgttcactgtgcatgatgtccctttgtaacttccagaataacccaaatacctgtagggaacattagttactgtgtgtaggtgtgtggttagaggttcgagattttactgaattgagagagtttttgttatagcagattctttttcaaaaacaaacaaacaaaacaatagataatgcaattaagagccaagtgaaaacctaatagccatatctcaaaagattaccatcacaatttcttagggaaatgcagattaagaaaataacatgtgccgggtgtgatgacgtatgcctttaatcccagcactcgggaggcagaggcaggcgaattcctgagttggaggccagcctggtctacagagtgagttccaggacagccagggatacacagagaaaccctgtcttgaaaaaacaaaaaacaaaaacaaaacaaaacacccccccgcaaaaaaaacaaaaataaaaaaaagaaaagaacatgtaatcttactccagttagaatgactactataaaaaagatccccctgaccccccaaatctgactaaggtaaagaaaaataggaactattctatgctcttcatggggatctaagctaatacagttacacatgtctgagtacgtgaactgagactgtggaaccatataaacttgaaaggctttatattgttataatggtcttcaaatgagatcttgaagataaacaaggaaaagttacggttgacaagtgatgtgtttgtgtgtcaagttgtcaaggaatcagttgtccctgtttttttttgtcagcttgttataagctagagttatctgtgtcaggaaagctcaatgaagaaaacacctccatcagattgcacagagggaagtctgtagggcattttcttaatcattgaggagggggttctcagctcactgtatggggtgcttatcctggcctcgtaatcctaaattgtataagaaacctggctgatggactactgatggattggctcagtagttaagagcatttgctattcttgcaaagaacttgggttcagtttctaacacccagatagcagcttgccacctccacgggcaccaggaacatatatgttgctacacagacatacatgcaggggaaacagtcatatatacaaaataacaaaatacatacatctaggagagaaattaggctgggaaagctacagggagaaaggcagggagcagtgttcttgttcctgcctgcagattcttgtgttgatgcttctgccctgacttctttctatgatggatcgactgtaagccagatacccccttttcttcaccaaattactgttggtcatgattttttattacagcagtaaaaagtaacttagggcccatggaaaacagtatgatttctttgaaaaccaaaccaaaccaaaccaaaactatgggaaagccctgctaattaaggtccaaatctaccattgcccagaaggccttctgggctcagcacaaaatggaggccttcctttactggcagggcttcccccttctctaaccttaaccctccacatacctctacctgcagagtatcacatagccttggttaagattacaggttcaactttcttcctcccaatatgaacctgttcagctagcacctgagatttctggatgcctctacatgttaatgaggcatcctggtaccttaagcctttatccagtgacctttgcccatcctagatgttcctaccctactcccattccccaaagtatataagccttgcatcattccaagtaagttaatctgttttccagaagctggtcctggtgggccattattacctgatgttctcacagggcttctgacactcttccccacccaatccagtctctgctccatcttccctcacaaaccaaaaaaacaaaactaccaaacaattcaacaatcctgctgcttggtgttagcatttctaggctccaccccacagttatgcctgactcactataaaaggggctgcttgcccccttctttctatttttgcttgcctttctactctctcccactctgtcccttctcccttcattttcctctccctctccaagtgttcatggctagcctctactcctctcctctctctctccctttctctgtctctactatcttgtcaactcccctccccatgccctaaataaactctattctatactatacttgtatggctgttcctcaggggtaagggatgcctcagtgtgggcccgcagaagcacagccttctccctgcccccctcccccaactccatactgtgcctccacctaacatatccccggctttttcttttatataaaacataacacctgggtaaatgtcaaggaggaattgcacagtcgccaaaatatggaagcaacctagggatccattgataaagaaaatacagtatatttatttacacattaaactataaaaagaacgaaatcttgtcattagttgtaacacagatgaaattggagaatgttgtgtaaaatcagaggtagaaatacaaatgccgtgtagtctctcttatacatgaaaattaagataatttcaaagatgagaacagaatagtgttcacagatctcaggagttaagggtgggagaagtggaggaggttaatgggtatggcggtgcagatagatgagaggaactgaaaataaaataaaataaaataggaagggaatgactgctcctgggcatggtagaggaggtttatacaagggagacatagccagagacaggggcatctggacgagtccagagtgaatacgaacctgagcaggggccatgtgaggaaagtggaggaggcaaggagagccaggagaccaggagatcaagaggccaggagggtaaagggcagaccaaaagggccaggtaaccaaaatggctggattatatagggaagggtgcatgagggaatggctgcccagcccctgggctggagaagtttggagtaggggctgatgagaagaatcctgcaactaactggtagagactgaagaatgctgggagaacgtggcagccagttctgctttgatatgttaaataggcacacaggagacttagaggaaggaactgctatactaagaggccaaaagtctagtctcttccaactgctgtctttcaggatcagtaagctacttgaagagatgtctggcagtagccacaaagcattctgagattgcacaccaacgctccctaagtaggattctgggcctcagctttttacagattttggggtctccatctgtgaacaccacttctttttttttttcttgttcacagcaagtatgtgtaggagttcgctttctctgcttccagacgccgagagtccgtagtgtcttttctgccttgcagcagcaaacccacagcccgaaattaaaagaacaaaaaagaacactaaagctctatcttaggaatctggcgggcaggtaggaattctcacttaggtgaaagaaaagctcagtccttcccagccaatcatgtgagaggaaacgttgacacgcctctttctaccttccaatcatcatctacctcagtaagcccgacccactgccggtaaaccgacttttaaattgcattagcatgctttctcctgaccctctccagtcattccaggccgttccatgactgtgctccaaggaagaattatagacttaacaatgacaaatgacaaagctagtcagtctgaaggtgagaagtgaaagtgtaaaactcgagaaccaaacccgcgagttctacggaggaaaaaaaaaaaaggcgggttcgggcaggaggactacaagccccagatacccgtgcgcggaggcggcgcgtgccagcgagagtgggcaggccattgaaaggcggaagaccgagggttacaggacttcctgttcgagcgccagcgagtgggtgggacctgcgcaggttgggcggcggttgtggcgttttggagctttgtcagcggagggggcgtggcccgcgctgtgacttgtggagcgcgagccgagagggacgtgggtgacgcgtctccttccacccagctcagtggagtgcgaggtgcgctggcccggccggggattggctgctgagaggcgagtacgcggcggccgttggtcgccggcagcacggagcgagggcccgggcgggcggggcggggatggggaggcagtggcggcgaaggccggaggaggcgggcgcgggcgagcgggcagacagagcggcggcggcggcagtctcccgagcgctcctgtgaagcgtccctattcccgttgccgtgggcctctcggggaggccatccgggacgcgagccgctgcggaaccgctccccaagccccactgctcttcggactctcggtcccatcctcgcgtttctgctccggctcctccatcttggcctcgacagtggctgctgtggggaggatgtgccgcctcctggcagggggaagaaggaggagaagatgaagaagtaccggcgggccttggccctggtctcctgcctctctctctgctctctagtctggtgagtaaggggccggcctctggggacttcccgtggggatgaaagagggagtaggtcgggtcacacccccaaatcatctcggctttttgggttgcttggtgctcctgctcctaagccagggacacagcggccacccagctcttcctcttgtggtttacgagttgtgttttggaatttgcagagttccagcagggagagaaggggatattggggatcactttttgcctttgtactcgggtaccccatcaccgcagttagggcagtttgggtagtgttcagaaagctagtgagtgagttactcagttttgctgtcagttcatttgctttcgttatgaggtaagggcaggggcgagtcaggtgtgatgtgttccggacctgtgattttgaaaacgtgagtcgtcatgagggtaagagtaatgtctaaactgttgttcttctggtcaggtcttgcacaatcttgaccaatagtacttttggggctgctccttgaaaccctgcggcgtggggcgggcgggatccctgatgaagccctttttcggttagcctggtgggagaggattatcacagatgtggagtcagccatagttttggggcatgttctttggcactagaaaggaaacggtttttgcgacccgctctgtccctttctctgaagttctatggagttcaagttaatttcaagcacatctctggatgtccaggagcagacatagcttatgaaccaaaggattgctaaaggtgtacttggaaaagccattctttctgaaggaattcccaaagagccttgagacttggtgactgaaagtgatggcctttgtgttaaagagattttgcttcttatactaaaatctaaacacactttcttatttaccttatgtcttcaaagcgccagtaataattcccttttttttatgggtgtaatggaatccagaggtgctcaagttgtagagttgttgctcacatagaataatatattaatatgggctcaagaaaacacttgtctgagaaaatctgactggaaagactgtatttcttgtcattctgaatcctttaaatactccttaagagaaactggtacctgaaaccagtgtaggattaggtagcaatttcttagagttggtgagcttctcttactagccttttctcccctcattcagaaattatctccagattttgttacccacttctcttttgtagattgagtattctatgttcatataataatcagttctagggtctacccaggacttactctattactattactgcagtttagtttgatcttatactgtcatagttgatagattgtgtgtgatacagccttctgccttttctcttttcctgcctagagtgctatagatttaccttaacagaaaaccaaaatgcatcctatctattcattctggttgctatttttttcttttgcacactgctaatcacaattcttggttaagtagtacagtgtattctaggtgtaattgtagtgtagctacagaagaacagtgatagctaatatttattgttatctgtaccaagcatgtggcatgtgtacgttttagcatctttgtcagcaaggtcctcttaggtagatattattagttgaattctgtattttacagatgaataaatagagaggctaaagttatgcttgcaacagagtaacatggctaagcagctactgcattctaaaatttagatttgaacctaagcagcttgtaatacaggctcctcactacagtggtcctctgactgactataggttaaataaggcctgtgtttttagacagatacagtaccatcacttactagatatgtgtacttggacatgctatataattcctttgaactttagtttttagagcctcagtatgataaaattgatccattcataccaaagttattagaagcaaatgagataacacatgcactttgtaaaacagtaagagcatgctgtctttcattataaaagcattcaaaggtgtttttcttatgtttactgtgtattgaatattgtgaatcttgaaagcttgagtgagtggcctctctcgtttttagtactgaaactatctcaactaagaagcctccttgtaagctcctactgctgctataacaaattaccagaaatccactggcgtacacatagttgttttatagttgtagggtgtgtgtacaggagtccaaaatcagtctcactggggcaagtattaaggtggcatggctgcttcattctggagaccctgagggggagactccagttctttgactttttcagcttctaggtgttgcatagattctctctcctgtctctcatcacttcaacctctcattttggccttcaacatctgcttatgacggcccttgtcttcctccttcaaggacttattatattgtgtttacccttagtcaatatccatgtctcttagtttgctgaagtcttcaaagttttatgatataatatacactattcagaagctgaaggtgcagaactctctcagtcattgacagaggggagttgatcatcacactgaagtggacgatgtgatccaaacctttgaacagttattctgagtatgttccctagtagtaaaacttggtgcatgtgcctttaaaatgtgtctaattatttgtaatttatctacatgtatcaatatggcatcagtattgtacatataattaccaaagttagttgtttaagaaagataaaaaatactttgttaatattaccatttgttttcattaaagtaattttcagtgagaactgtttaatttaagagattattttatatcaaatgtagataaatggtttataatggttactcttcttagccttactattttgttactggtttatgcttgtactattatctttgttagcttttctgtttgtttgtttgttttaaaatacatgtagtaagttgtttagttaaagcagagcaatccctccatcttagatggacatgtatagaaacccagtgagtcatggtatgccggaggtaaaccagagctttactcttcctttacatatctgcctttagttcttaatatgtctgcagctaacccctaagaaccagaactctttacattaatctaaaaaaggctaatttttaaaaatagtaacagatttttttctgtgactcaaaggatgagcttagaggagctaatatttagactaaaaccttgacgttaaaaaactttgatatatttaacatacaataaaggtacttaaaaggacatgaggtgaatctaatgaagggtttgtattttagagtctttcctgtcctccattcatcaatcatatgcctttgggttgttatttctgtgaacattagttctcatctattaatggtttctagggtgaatagaatagtcaaggtgggagacttgtgttacaagcagagggaacattcttgtggggttttctggagtgtttagtaagggtggagaagacttgaaaaggatagagttttgaagaaaattattgcccaggcgaactctgagtttagcaggatagaagatgagcgagtgaaataggttaaataagaaggaaagaggcagccatattgatattttaattagattactatcaaagatagaatggactgcctgacagattctggaggtggtaggtcatggtcataagtggagggaggtgcagtaggggagcactgggagctgtgtaaatcaagatggtgatgttttttgaccttagtctagtttttatagatggaagagatttttccctccttgagttgtgatttctgtattctttgttttttcctctgataatttttccagcttctttttaaaaattttatctacctacctatctatctatctatctatctatctacctacctacctacctacctacctatctaatataagtacatcgtagctgtcatcagaaataacggaagaaggcatcagatcccattacagatggttgtgagccaccacatggttgctgggaattgaacgcaggacctctggaagaaaaaagtcagtgcttttaactgctgagccatctctctagcccctagcttcttttgttaattaatatatgagcagaaaaacaagaagcaaactatataagaaactgctttctttttatatggaattgtcgaaaattcctattctgtcttttacctggaaaatgtttgtgtgtgtgtgtgtttactgcttctgtagagactttttaaaaagtctctgagtctattttctgaataaaatgatattcaaaataaataatgaaataatcatgctctccacatcatttgatgacttttgttgttgttggaacttaatatgaagagactggaaagaattcagatttgctgagatatttattcaaaggatagcatctggtgcctggaaggagtatagatagggtcattatgaatagtgccagatcccttcacataagttgggtgaactaggctgctttagtgtgaagagatccttgaaagaaggtgccttctctttatgaaaatctgtgatgtctgtctatacaccaagaggcagatgattctttataatagtctttgaattattttaggaactggagatgtggctcatgttgccttttaatgtttaatacatttgaagatgttttagaatgcaagtaaaaatagacttagcagacaataaaaaaaagaatcagatattaacagttagctctctttgagcactattatctcataattttgttgtttgtgactagtacatttccacttctctcaatctgagcagagaaataaatatgtatagttaactttacacttctaatgaaaagaaactttaaaaagtatttaattgctttttttgtctctcaggtcattttcagctatgaacattttatacacacacacacacacacacacacacacacatacatacacatacatccatatatacacacacaaacacatatacatacatacacacacatatgctatatacacccctgtttaatagtttgtgtatatatgtgaataaataaaacaccctacttgagccaggcatggtggcgaatgcctttaatcccagcactcaggaggcagaggcaggcggatttctgagttcgaggccagcctggtctacaaagtgagttccaggacagccagggctacacagagaaaccctgtcttgaaaaaccaaaccaaaccaaaccaaacaaacagacaaaaacaccctaattgaaataatgatttatggatttcagatttttctttagtgccagctataaaacacattttttacttgcattccctgttttgtttttcaagaccatataaagtattttcacaaggtataatttcatatgtcacaagggaatgggaaattgcttttgagtatttggatatcccttgggatatacttattttataaattgagtgcttttgaattttttttaagatttgtttgcttttgaaggacttgttttccttccttttttgaatattggatatagaacctagggcttcccaaatgctagacaagtattctactatgagctacactctaaattcagaacatttcttgttttgagactgggtttctctgtgtagccctggatgtcctagcactctgtagaccaggctgctctagagctcacagaggtgcacctgcttctgcttcctgagtgctgggattaaaggcttgtgtcaccaccacccagcttcaaaactttatttttataatgaagtattagttaagtgatttttgtactttatataaatgtatttaatgtatataaatatattcagtcttttatagtgttgatatagttcttaggtactaagctcataatgtatttaagtactattttatatatatgttttgattcattcactctgggtactttaacagcttatagagtaaaataggaaaggttataagggtttataataatatatcatttatttttataaatttatttctaatattatttggttgcccccaatgtatttggtacagagaaggaaacagtaagtgtggaacttgagccttgtgtacaagttccttgtccataatacagatggatatctttattagaaaggacccaatagtcactttatgatcattgtaactcttctgaaaaatacgccccttttaatatatagactcctgtgggactccttcatgtaaagacaaagaaggaagacacatagacactaagcatctttgccaagtttttcacaggaaggatccagaacttaggtagttttttgagcttgtgttctcttaatcactgtgtgttctgcctgtacgccagttgatgtacttgggtagatttcttatttgaaaatggtggggcctgaatgagccaaggaaggatttgacagcaggagttaacaacatgaagctctttttaaaaggacacttttcgaagattcctatctcaaagaaactatatttatggatatttttggtttttgtattcaatttagtgttactggattagatgaagtcaactatttttatacagccaacattctagaaatatgattagaatgctaatgaatcattcagaaaactgagtatcatactacttattaatgaaaaaattggcctggagttgctaggaaggtttgaagtgtaatgtgccagctataaactctccagtgggaacaggtgttgcatgagctgaaataagatgcactgttgctgctaatatgaatgatggctatatccgtatatatgtgtctcactgcctgcagtgagcagattgcacttaattatcaagaggaaagagtatgagaaattaataatgaatggatagaagtgataataagtagttaaacttaagaaaaagttgcagataggagattatggtgaattttataagtgaagtcagagagctagatgataaatatccagcaagggaaattgttttgagaaggttatgttgacatcattgtactagatgtatttctgagaagagagagagatttacagagacaaatacttggaaacagtcagagtaattgagtttgccacaataagaatgtggttttagaaatggagaaagtaagagcattaagcacaaatcttacggaagtaaatgctctggttttataataggttgtgaagttggcctgtagtgcagctgtagtgcaaaggtacagcattgagctagaactcaaaagagctgtttagtttgtctccgacctgctcttgtcagcattgctttctcttactcttcttatgtcaacacatctagcaaggctcttgtgctgtgtggtgcattttttgtagaattctgccaaacaaggaaaggtagatactttcttagaacatatgcagatgagaccatacatccttgtatattaaattaagaatttgggaaattggttcaaagagagagaaaactgtgttcttatcttgtattaatagtgtacaaaaaatgcaagagttataaaaaattgaaaaatgaatgatcttctagttggagggggatggaatatgtaagcccagaattgtatagattgtatacaacttaaaaatgtgggcttgggagataaaaagactggaattttctccacagagggaataatttttgaaggggaatgtttgacttttgaaacagagcactgagtttctgaagataataggaatcaagatgacaaagaaaggaagctttgaaggcctggtatgctactgcattcctgtaatcccagcctttggcaggaggagggagaagcaggaattcaaggccagcctttgctacatagagtgcagcttagctacatgagacccagtaaaaggatagaaaggaggaaactggaaataaagatggaaagctgtttaagattactttgtcaacagtgtagagtctgatagggttgaagcatttgaaaacagaaatactgttttttagagggaagtgttgataagtcattgtaattgaaatagaagtttaggaggtggcaggcatgcattcttgcatggttggttggcatcctggaagaaaaagaatacttataataagaaagttaatggctacagtagccttatactttttaatttttaaaaagatttattctcttaaaatctatatgtctgcatgcccccgtgtggatatgtgtatccaaatgcaggtgcttatgcaggccagaagagaactttggagcccctggatttagaggctgtctgttgtaagctacctcactcaaatgctgggaactgaactctaggacccttgaaaagtagtgtatactcttaaccagtgagccatctctccagccctctacttttgatttttgtcagtcccttaatgaaattcttctaaataaccctgcttgcctaaggataaacatttgaaggctcagtccctaacctacttttgagggatagcttttcattgttcaatatgtggatttctgtttacccagattatatggttagcctacactaatttatttgggaactttatttgtattttgaactgaaaattgctatagaaaaagcaccatgattttattttttttttaggataaatacatcttacacaatttttaaaaatatgccattttaagtatgattagtatataattatttccatcagctttaaaaacagattttattggcaaaattagtaatggtagattaagatacaaaatattacctatgttgctcagtgcttcttcatgatggatcattgaaattattgaccagtttttagtgatcagtcattgaatataatttgatatatggagtatggtggctgagaatatctaagacccagcctatataagtgactagtaatgatctgaactactaaatttaaaggtttggttatcagcaatcaatagggctttctcagtgagaatgaaagaaaggacacattgtgctcttacctagtaagagaccaagcagagcaaagcagcttttaagagctccaattgtaaggttaaaggttgtctttgtttctagctgtggtgtttgaccctcctatctcagtattgctgtaattgtagcttcatataggtttaattggtcccatatacattagaaccatctttactatctctagcctacttttcctccctcccttccttccttccttcttccctccctaacttcctaaattccttcctccctgcatttatctatttatttatttattttcatttttctggatgggtttttctatgtagccttggctgtcctggaacttactatgtagaccaggctggccttaaactcacagagatctgcctgtctctgagttctaggatcaaaggcctgtaccaccactgttcagctctgcttttattttttaaaaaaccaaaaggtggttttcaggtcttccttacacatcagtattttgaaatgtgttaaaatgactttttttttcaagcaaagcaattggctaatattggaagtctcaaatagtttgatttgatagttttcatgttaagtttggatcttttattcattgtaaataaggagttatataacattttataaccagaaatgtaattgttggttttgttttgttttttgagacatggtttctctgtgcagcaaagtcctggctatcctggactcgctttatagatcaggctggcctctaacttacaaagatctgcctgtctcctaagttctgggattaaaaaggcatgtgccatcatgcctggtttaggaatgcaatttttatatctaatttataatagttaatatctttgtattttacacttacgtaagtcatctttactatagataaactcattatttgtaacataattttactgttttacttttccactttgatttttttaattgaaaatagtttttttcacataaaatttctaattatggtttccccttcctcttctccttcccaattccccactcaccttaatccacccctttttctcatttctcattagaatacaatcattcttctaaaaaacaataaagataaaataaaaaacaagcaaaccagaatatgatgaagcaaacaaattaacagaagagtcaaagagaaagcacaagatgcacatacagagacacacatgttcacagacacacacacacacaaagagtgtgagagagaaatcccagaaaagcgtaacaccagaaactgtaatatatatgcagcagacctgtaaggaaataatagtgcccaggcaaagcattatgagacaaagaacctccaaaaatgccattgagttaattttgtgttgattatctactgctgggcatagagtctgtctttaaaagtagtttgtacaactattgagactccattggggaaaacaaagtttccctttacgagcagttatcaaacagaggtactctctagatttggaatggggacttgtgttcacttttctcagtgctgggacccctatcttggcttagatccgtgtaggcccagtatatgctaccactgtctgttgtgttcacatgtgcttcagttgcactggtgtttagaaggccttgtttccttagtattcttcatccctcctctgtttctcagaatcttccaactcctcttccaatagtgttccctgagctctgaagggatggatttgacggagatatctcatttaagactgagtagtccatgatctccttctctgcacattttcctgttgtgggaatccttttttgtctttaatcatcatagcatgtgatactacttaacactagactagtgatgcatgggttatttttttttaattaggtatttatttcatttccatttccaatgctatcccaaaagtcccccacacgctcccccacccactcctccacccacccactcccacttcttggccctggtgttcccctgtactgaggcatatatacatgggttatttttaaagtgacatattgacttttaaactgagtggcacatgtctataatcccagcactgagaaagcagaggcagatggatcactgtgagtttgaggccagcctggtatacaaagtgagtttcagctaaggctacactgagagaaatcctgtctcaaaacaacaacaacaaaaacaacaacaacgagttttaggattatatagcatatgttccacatattgtgtgtatgtgtgtgtgtgtgtgttttattcattagaaggatctttatagctatgtaatttatccagatatcttttagtaggtgtgataatgattttctaggttaccataaaatagatttatcgatagcctgcttttttttattggatattttcttcatttatatttcaaatgctatcccaaaagtcccctataccctcccctgccctgctcccttatccacccactcccacttcttggccctggcattcccctgtactggggcatataaattttacaagaccaaggggcctttcttcccaatgatggctgactaggccatcttctggtacatatgcagctagagacacgagctttgggggtactgattagttcatattgttgttccacctatagggttgcagaccccttcagctccttgggtaatttctctagcttctccattgggggccctgtgttccatcctatagatgactgtgagcatccatttctgtatttgccaggcactggatagcctgctttctaagactgttaatttagaataaaagacacttgagaaatactaggctacaaacttgtggagatttctgttttgttatattatgaggaactactgaggtaattttgacattaaaatagctcacagatatttgtatatttatttttgttgcttgttgttttgagccaaacaatcataaggaattctattcctccctttgttaaacttgcagagaggttttggcctagaagagttacatactggttcagagtactgtcagcctggagtgtttgtgcttgtagagtttgttacttctagctgtcagtgtccttaataaggctagcttacaggttttacttccatgatttgaagtagtctaggcgggttttagaattatctttaaatatttgtaaatggctctggcatctggacactttctcaggaggctaactctgacaactttctgtaccttctgtgataattaccacatactgcttctgttgtttttgttgtaccctccagaagtgtatgtattacttggtgttgatagtaatagaatgattatcaacttcccctcctacgataccaatactctaaagttgtgttcttgagtgttttaggataagaacgggtattttattgcctgaggttgtagcccataaaaggatatttacttaactttccttctcttgttcattgttgctggtggtgggtgtctgcaggcttccgagttggcatgtttgctgtaaagagagttcttcagcttcaacatcatactattctcaagatgataattgtgcaataggaagtgaagacacacagttccagaaaaaggtaccttaaatggaattgacagcttgctttctaagactgtttccatttagaatgaaagtaacctgagaaatgctaggctacagtttctggagatttctgttttaatgttgagggctgcagaggtaattctgatattaagatagctcagaaatactggtatatttttgttgcttatacttcaaatactatgtgttaagtatgatctatattcaataaaaattactcatttattgctgcaaagaaatctgcttttacaaattaaaagttatcagtaatgagtattgcatttttgctgttgggggctttgtagatataattaggtacagcaaatagacataaaacctgatagttttgaaatcatttatagttttgctacttcaaatttgtcttttgtctccaactttctgtattttaatttaaactacagaaataaactttggctgactataaaacaattttctttgcatatacttatcctaagctgagtatggtggcacacgcctttgatcccagcacttgggaggcagaggcaggcggattttcgagttcgaggccagcctggtctacagagtgagttccaggacagccagggctacacagagaaaccctgtctcaaaaaacaaaaacaaaaacaaaacaaaaacaaaacaaaaaagcttcttgtgaatgttcaaatgtttcttgtaggtaaaggtacacttttaactaggaacacaaattaatattttgatttctattacaataaaataaaaatgttctacaagtgattttcttccttctctaagggcatatgcacatggcctttatcatacagatacagcagaatgtatttttccctcatgagatttttttgtgttgttcctcagctctgtgtgcatgtgcatcatgaccaacttttagttacatgtttggaggtttgagatataatatttggactggattatttaatatttgagttgtatagaatttatatctgggatggaagatacaaactttggaaaattaatttctttagaaagaaaacttaaaatgtaatgcttttattcacaatcagaagaatttgtctctaacttcatcttcgaggagatatttacataccaaatgttacaaaaacattttaagtaaacattaagtggggggaattctcagcaaacatttcaatattttgtatgtgctagataagcacaggtttaaaaaaggcgatgtgaactttgtttctatgaaatgtgtattttaggaaacacatttaaagacacaggtatagaaaatattaatgagtgtgtgtcaaaagatagatgaaacaaaaacatatattccaagcaattatggaagtctcccttggtgtctggtatataatacttcatataggatgtgtttattaagttatcagatgagggttttaaagtcatatatttctattttaagtatggtgaaaaggagagggatggaaggagatagaaaataaacatgtaaatgaagttgagaatcaaatgtatataagactggtttatggcaaagaaggagatagttttgctaactgcatttatttatttatttacttacttatttatacaaaataattttaccagtcatttctttgtcaccatgtagaatgaaagagaggaacctagtaatgctgagctatcaggaaaatcaaattcctatttaactatatctccagaaggaaacaaaataaaggatgactacactgtggatgtacaagtaagctatagtctgcctttgcttttaataatataccttatggttttgggttttttgtttttgtttttttctttttgcacagtaatggatacctttgtttagtcaacatgttatatatggttaattttcttcactgtaaagaaccatataatagaatgtaaaattattcacatgttaatagtagtatagattttgtgaagatgtaaaattaaagatttaataataaatacagctattttcttagaggtaaaatttgagtgcaaatatttcttcctaagttctatttttcttggctcattataatatatattttctgacttttagaaactaaatccttttttgatctttattttgcagcagaagtagttgtatgtagcacatagaacattcttgaaaccagtatttaaatttacatagtatatgaagttaaaagaatgcattaaaatggtttctgccattttttcattctaagtattgttttcaaatttatgtacctgaaatatggcagttattaaaatcatgaataaatactataaacctagtagaatgctgatatatttagaaaatgtttaatctatgaggttgaaagaactagggatgtttggtatggagacagaaagattaagaaaaaccaaaacattttacagattaaaaatgttcatcttgggactggagagatggctcagtggttcagatcactgactgctcttccagaggtcctgagttcaattcccagcaaccacatggtggctcacaaccatttgtaatagaacccagtgccctcttctggtgtgtctgaagacagctgcaatgtacttatacacataaaataattctttaaaaaatgttcacctcagaatgaaagagtttcattttattaaattttggaaaatatttgccaaagatttaggtatagactaaaaagctactatctgttgcctttccaattgcacaactatcttaaagctcatgtaattgaagtctagaacagtggttctcagacttgggtgtgattcccccataggggtcacatatcagatatttattatgattcataacagtagtagtaaaataattttatatgaagtagtagtaaaataattttatggttagggggataccaaaacatgaggaactgtattaaagggttgcagcattaggaaggttgagaaccactgctctagtagcttttatctcaaatgttttgaaattttgtggaatctcttattcctgtgttgtttagcatagtagtcattaggtcctttggttattgagcatttgaagtgtggctgattggtaaaatttactgttaagtacaaaatacatgttgaacttgaaggacttaggttttaaaaagaatgcaaaataccactgttttaaaattttaaagcctggcagtttactgttaagtacaaaatacatgttgaacttgaaggacttaggttttaaaaagaatgcaaaataccactgttttaaaattttaaagcctggcagtggtggcgcacacctttagtcccagcacttgggaggcagaggcaggtggatttctgagtttgaggccagcctggtctacaaagtgagttccaggacagccagggctacacagagaaaccctgtctcgggaaaagaaaaagaaaaagaaaaaaaatgaatatatgctgaaataatacagtatttgatgatgtcttttcctgaagattttctatctttaaaaacaagccattgttatttgtaaaacttttactgctactagttctccaaatgaccataatttgatcatactgttgacattgtcttgtgtcttcttctaacccaaactggcttacctacttttcaaggcccatctcatatagtctgtaatagttcatagtttttttctttccttgaccttggtgtgaatttttcttacttgttatcctttgttacacttttaagtgcgttgtgtgctaaatactgggacttaaaatcgagagaacattctccttacttaatacatttatattataattgaaagcaagaggaagatttataataccagttgactgttacggatgctgtgatgagactgaatagagaatagtggaagcagaatgggaaggagcaggcgaattcttttatcactggagctgataaaggttttcagatctaaggggtgaatgacctagaacatttaggattggaagaaaagcaaagtcttatattgtgctgtaatacttgtacatatcttatattgttacttgttgatgcacactttttcataaactctttagggataaaagaactgtatcatatcattttatatatttacatagtcttacttagttactaatagtacagtattaaatagaaatggagttaacttgtaggacctgatacagctgtgtctgctaatgtatgaaaatgtgcaggttctgtattagaatatgaaacaaaattctaagggtagtaatgatggaagaaaggatttgtgtgtgtgtgtaaaagtatttcgtttaagtaatattctttctttagtgctagagaattaaacctatgatagcagtctgtgtatattaagcactttaccattggactaaatactcttagattattaacatcatatagtcatttttcagctttctatgaactttttcccatcagaagtaacttattaatcttaacatttaatataaccttttaaaaaacaggatttggaaacaacgaagttaagcctccctgtggttgaagcactccctacagttgatttgcatgaagagtcttccagtgtagttgtaggcagtgaaaccattgaaaatagttccagttcatctacctcagaaaggactccagtctcagagcttgagtaagtcattatgaaggaggatggagtagggggaggagcaaacacagcaaattaaaaacatttcttaataaaacaccttcgtatactcatatttgatatttgggcagttataatttattgtatcaatgtcttatttgtgtatgttgaatataatcttaatagtgaacttatttattcagctcagtagatgaatagaatagattatagcctagccatgaatttctacgttgcataggttctacttaggagaaattatacatttaaaacaaatgatttgtatagttattcaaaaatcaaatgtcaatttatttccatcaagtgttactagcattccagtaatagtcatgcttttgtgtgactagctacctttttgtaacttaataacatttgaaatatttaagcttatgttatccttagttctctcagttctgtgcttctgagttacttaagttgtaacacagagagcaaagtcaaacaccctctcttaatacccattaagtatttactttattgtgagaattaataatagtaagaaggtaacagagtatttgactcagtaagaataaatgctactttattgccacttttaaaaatctttttactgcaacacagtcaggttttgaatatctgtattcctgcagaatgtaagggactgggctgatggagttttgcacaaagatggtatcatttgagaatgttgctcagttaaggaaaagggaacagaaagcatgttggaaaaagtctagatagtatttcagaaactaattaagatcagaatactatttatcttaacagtatgttcttattctcccattttattaaaaattattgattggaaaaaaattaaattaaattgaaaaaaaatcctgaaaaactgggattaggggctgtcctaaaagctgttacctatacatggaatatgttctactagctgggctgtctggtctggcctcagcaggagaggagaagtatctagctatgcagagacttgaagtgccaagttggaggggttacccaaggggtacccctgctgctcagaggagaagggaattgggaaggaggaagggggaaagattgtgggagggagtggctgagagggggccagtgagtgggatataaagtgaataagtagaattaaaaaaattgattggaaaattataagtaagggaaggaaaatattgaaatattgacacatttttaatagtaaaattgtaaaagtgcagtaaagcgtcactgaagtagctcgaaataattggtagatttttgctaatttcaacagtattgattcaatagctgcagaaatcaaatattaggaagatactcttagaaaaaaagtttttatttttatcaggccaaatattcatttaatattttgttttataaaattctgtagtgttttaggtgaaggaacacccatagatcagtcaacagttgattgttcatggtttaaagtaaatagctcagtctggccttgacctctcagtcctcctgtttggcctcttagatactgggattaaaagcatgtgccattgtgcccaatttaataataattcttgagccgggcagtggtggcgcacgcttttaatcctagcacttgggtggcagaggcaggcagattctgagttccaggccagcctggtctacagagtgagtttcaggacagccagggctacacagagaaaccctgtctcgaaaaacaaaaaacaacaacaacaacaacaacaacaacaacaaaatccttgaaaacattctgtaggtcttcaaacattcttttttcttgggcttaggttatgtttcaccattgttattagaatttaaatgtatattaagtattaaatcactggattatcatcttttctttcctcatttagtgaagtagaaaagtctggtactttatctatagccaagccaggtgaagtggagcagcctgaagctgactgtgatgctggggaggctcctgatgcagatgctccagtggaacaacctgcttttgtcagtccaccagagaggtgggtatcgatagttcttttaactgtggttctttttgcttttttatcatgacagtgtctttttgtgtagaccacccaggctaacgtggaactttatgggtaacccaggctgcctcaatcataggctcctcagccttccaaatgctggaattagaggcctgcactaccacatcggattagtgataagattctgtaataaccacaatgtgattttttttaaagttgtttggtgcaagcttcattccaattttattactggaattttatctctttgtgcttttgtttaggtgttccttgtgtgtggtaatcatattgtatgaaaatttgctatccagctaaaatatgtttaatatatcttttgcttttatatagccttgttggccagcatatagagaatgtgtcatcttcacacggcaaagaaaaagtaacaaaatcagaatttgaatcaaaagtttcagtgagtgagcaagacggtggtgatccgaagtctgcattaaacacttcagatactttaaaaaatgaggttagtgtgtgactttggctgactagtgtatgttatgtaacttactttaatagtgcaatcttgaaaataaaacgctaaacatatttcttataaaattagggactttagtcataaaactgatgtactctgcgtctatgtatagcaggtagtcacttcatgctattctgacttgtgtttatgtataaaggcgttctgggatggattctcctgggttttatatataattacatgactttctgcccaccatcagctctttgggacaatataagtaaaatcctacttaagcagtgttattgatctgtatagatgctacaaccattaaattgaagaatagtatttaattcagtgagaacaaatatatgctgctcagctagaatattttaagggcacatttttggtttctttacttacatgcaaggtacaactgaatgctaaactactatcttgaaactattcttccaataaagatggactttattatagtgaagcagttgtctttattctttgtgaagagcttggtaaaaaaaaagttcccaaggaaccttttatccagcaatttaggatccccctctggtaagaaataactaagtgaaagatgtttttcatcaagttgaaagcaaaataaatagaatgaaagagtaatgtaaaacgccaagcacacctttttattcattccttttagtttgagatgttccgttctttttaatgaattttcacttgaccttcctaacttaaattgcagagctttatatattcataggactagctttgtgtgtttgtggcttcctagaaacacaggaactcagtgttttctagtctggtattataaaagaactcattttaattttcccagtagaaccagatcaagagctgttaaggttcaattgtcagatatcacacccataagtaaaagtaggcaaacattaaagcatgtctcctttggcagccagctgtcttaaatttacttgttctcaactgttaaccaactacagtacccaaggccttcgactgtgagcctgtgataataggtagaagaatgaaattttaattaaaatgtaattacttcctgaacaaattaatatcctaaaaaggttgtcagaaataacacatgagtatccagttcagaataattctgcctagttacgttcatgtaaaccagtttgctttctaatacaattagatctttgcagcatccattatttaaaagatttagttttgttttgtttttgtaatgtacagatagttgaaccatgaaatgactaggcaagtaaattacaactcctcttcagataatgctatcatgcatttggtgattttaataatgttcatttcaggacagtctgtgatgacattccatgccttcatttagttttttttttttatgataatagatattttctttatttacatttcaaatgttatcccctttcctggcttctcttccaaaaaccccctatccccaccccctccccctgttcctcaacccacccacccactcctacttcctggccctggcattcccctaaactggggcatagagccttcacaggaccaagggcctctcctcccattgatgaccaattaggccatcttctgctgcatagctagagccatgagccctactttgtgtactctggttggtggttcattcagctttttatttgtcttgttagtgcttgatatagttattttctttcaatttttcatttgaaggatattcatttttctgattaccctattagaagtagtggtgcactatgcaattatacacatttttgctgacattgcacatggtgaggaattagtaggtatgtacatcttgctaatactttttggttttttgagacagggtttctctgtatagccctggctggcctggaactcactctgtagaccaggctggcctcgaactcctcgaactcctgcctctgcctctcaagtgctgggattaaagatgtgtgccaccactgcccggctttgtatttattgttttatgtaagtacactgtagctgtcttcagacacaccagaagagggcatcagatctcattacggatggttgtgagcaagcatgtggtcgctgggatttgaactcaggaccttcagaagagcagtcagtgctcttaaccgctcagccatctctcctgtcccgctaatactgtattttaagactccttcagcaatctgatagaatccccatgatgcattagatatgtaacactttgcccagactatcacactataaccgccatcaaattggtattatttatgtctctgattttcatagcttcttgtgagcattttatgactgcatcttctttttgttaatttattgcttctactccttttgctgcttattgattttcagttaatttttatacccactcgtttgttcgttgaatgcactcaaggattgtttcccccagctcactgtcttcattttatttttacattttgtataacaagtgcaccccagtttgaaaagtgcagtccagacgtccattttttttcttttgtaaattcttttgcccgcatgtaacacaatttctgtatgcttttaaagcgtaaggtcttggggcttttaaaataacattttaaatatcaactttaaagcttgtatgcataggatacttgttacttattttgtaaaagcaatatgctacacctgaaattactattttaataagtaagtatatttaaggtggttgtactgcaagtgtacacacactttctctctggttgagtagtcagtttaagatacagcattctgtttgttttgtttttaaaataagttatgtttatattactaacataattttatagtgcttaaagttagtttttatgttaccttgaattttaaataaatcactatttcattttaaatagtattcattataaaattaaatttttatttagtgttaaagaagcatgtgtgctcaccttcgttattattattatttttgtgcgggggcatttctttcagagctctgattatacaaaaccaggagaaactgaccctacatctgtcacaagtcccaaagatccagaagatataccaacatttgatgagtggaagaagaaagttatggaagtagaaaaagaaaaaagtaagaaagcagtgggattcttttaattaaaaaaaaattatttggggcagggggtggtttaaatatgtgttttctctttctaattataaaacaacctttctaaaaacttgttcaaagatataccacattgctgctgattacactaccatttactggtggtatacagttttaatattaattaaaatctattgttagaagttatctactgatagtaaaataagaaagagtaaaatatcactcccaatatatggagaaaaaacttggacatggaaaggtcagttagaaagctttaaaccgtctgcataataattctgaaataagaattcttgatgttgggattcaaagaaaaaaagaataaaacataaaaccaacaaggctatattctcatggtaaatctttatgttctgttattagacgtacctcaggaaatgtgaatttttattccagatgttttaaaacattttgaatttctagtttgttagttttgagatagaatctctgtatgtaactttggttggccttaatgtaactgtgactacaaggctggcttcaaactcatgccaatcctctttgtgcggcatctcaaacgctgggattatgagcatgtgccaccatgtctgccttggatttctcatgtattttaaagctgtgtttttaggaattaaaacctgttcctttctggaaagtgcctgttacttttgagatgattgtgttgctggggccaaggatgtattttcgatcataatcatctatgtgtttataataaggtttgtctacaggtcagtcgttgcatccgtcttctaatggaggtccacatgccacaaaaaaggtccagaaaaatagaaataattatgcctctgtggagtgtggtgccaaaattttggcagctaatccggaagccaaggtactttttttttttttttttttttaaagaaaatataagaaactagtgactttattaaaagcagacagtggttgacagtaactgttacaatgtgaattattttttaactttattaattaatatgagattatgcttttaaatattttatagtgtcaaatttttgttacattagttgatcacattacagctttaaaaatcatttaataatctatgcagctttaaaaatagctcctgaaaagttattttcctttataataaagttttaaaaggacaaattgataataaggctaatttaatgctgcagccttaactggtaaattttaactatttagtttattccccccctcccccccccccacacacacacataggctcattttaaaagtcaaagtacaggaattccacaaaattttagaattgaaatatttttaaactgcttctctttattttctttgcctcttgaaatagagcacatctgctattcttatagaaaatatggacctttatatgctgaatccttgcagcactaaaatttggtaagtaaataaaactttacaaagtatattttatatatgaacatctttattggggtaacattaatatatctgtgtaatttaataagcatttatgtttgatcaatattgatattgcccctaaattaagaacaagatgccttttcttttaaggagatagaaatgttaatagtgacaggtctggtcaaaagtactgttggatgggttgtctacaaaaagaatataaaggagaattcttagaagaggttgtttctgggctggatcttaaagggcccatgggaagtagcagatgatggagtcaccgcgttttaataggagcatatctcttctggatgactatgtagcagcagtttagttgtgacaagaaggtgcagttagagtagtgaggtgatgaggctggagcattaatctagctgtctagctacaattagaccatttagtactgcatgtactcagcttgacagtgtgcatgcatctctctctctctctctctctctctctacttccctccctccctccctctctccctctacacacacacacacacacacacacacacacacacacacaaacacacacatttgcatgatgtgcttgtatgtgggagtacatgttttcttgtgcagatgaaggcctgctgtgtcttctttgatcactcttctcctcactttccatgttgaggcaggtctctcacctgagcccagagtttgctgatcccactagtctagttagctggcttgctccaggagttttctgggatcactggcagctgttgccctcactcagcttttacctttgtgctggggatctaaaccattgtcctcaaacttgcctagcaagcactttcttgctgagcattctccagttttacagtttgcaagttttgttttaaagacaggtaggctaacatttataaagacatgacattatctcattagcatttcaagaaagcttatcttcaaagaatggcctctccaagagcattcagttaaagcagagaaatgaggtgggagactattgtcatagcttcagtttgaagtcatagccttgagctaaataatttcagtttgagtatggaggagaggaatctatctgaaagaggtttaaacgggaaaatgacagtgctcagtaattacaaatatagaagagaaagacatctaagaaatactctcttacttcggtttcactgctttataaatcttttatgaatactatagacaggaacaatttatgggggagttaatacacttttattacactgttttgtgttcaaaagttcatgtttaaaagccagttgagggagctggcaagctagctcagaggttaggagtgcttactgtattttcagaaaacccaggtttggtttccacaattcagtcttacagatcttcatatctaatagggcaaatttttgtacattaggacttgtgttttttttttttttttggtacctctgattgattactattatttttagacttttcttatttcattcctgatttcaatatggagattttatttgagattgttttgaatctttaaatgacagatactgagtttcattaccagtaaaacaaggttcatccttattgtttaatgtacttaacctttttccgtggatcctttctgaaatgtgttcctcagcaggttttttattactattgtaagcacctccttcaaactgttatataaagaggtgcatttgacttatacatttatatgtatttatatatatgtaatgcagagagagagacacatctacctccttgtattttttattgataatttagaaaccaaggggcttctctatgtgggaattctatatagtgttcctataaaataatacttcaaaaatttctaattctccttatcacatttcacctttttatcaacatggtgattcatccttgaaaattgtcaaataaaagaatgacatttccaactcgtgtattttaaaggcggtgcttctaactttgcacctttattattattattattacgtttttgacgtcttagtagtgttctgcctgcatttgtgtctttgtaccacatatgtactaggtgtcctaagtgaggccagaagaggcattagatctcctggaactggagttaacctgaaagttatagttgacagttgtggttacaacccattatctaaaaccataaaacataaagtctgtgatagaaagccatattgtagctacagcttaggaggttctattattaaaagaagaaaaaatgtgaaatgctcaattagtacctgttaagtgattgtgtagagacaatgtcttttgcagtttggtgtgaggacagatggaactgtctaatctgagccagagtaagcatttcataaatgttacttggctttcttcttcacctttctctgaagcctgattgtttgtttgtttgtttgttttaccttttcctggaacttagttctgtttttctccaaaattagacagttacttttatgtctttaatttcattcggctctggcagtatcactcaacatgtcaagaaagcacgtatcaagcatgataacctgagttcagactcaagggccaacatagcgagcgaaaggggagacctacctctccttcctgcaagttgcctttgaactgccacacacatatgcacactgaatgaatgaatgagtgaaaattaaattacatttgatgaaaaagttatttaaaacagattggaatgttatccatgagtttcttttttcataaatgtgatgctatatgcagtttttgtaacatactattattatgatacttttttcctgagtggtcatactgtgatgacaccttaccatcagtagggctcgcacataattttcttttccttccttccttccttccttccttccttccttccttccttccttccttccccccctcctcccctcctccctccctccctccctccctccccccccagatcatctatctctctctctctttctttctttctttctttctttctttctttctttctttctttctttctttctttctttctttctttctttctttctttcttgtctttaagtgataggaattgaaccatgagccttaatcttaaacggcattagttgcttcattgtctggaaagacaatttttaatccttttggataaatatttaaattgacctttttgctttttcttagtaacctttgcaaaatgttaatacagggtggtcatttgggacagttgttgccatcagataattttaaagagatattttatagtagctatgtataaagattcttatacacaggatacaggatacttttagtaaaactatttcattaaagaaaagaacatcataggagcaaacatcaatgttctttcttctcactgggaaatgcctgtcccaatcaaggcgttttatcagtggatacattagattgcaaacactattcctgttacattttggtaatttttaaatgcctaatttatacagatgttttaatatgaactgctttggttagcttatgtaaataattgtcttattttctttttgaaggtttgttattgaactctgtgagccaattcaagtgaaacaatttgatattgcaaattatgaattattttcttctactcccaaagactttctggtttctatcagtgacaggtaaattcttaaaactattttctataaagcccatgatagaatttcagagtaaaaattaagctcacatgccaatctgttgtcttctgttgttttagtttttaatagcagtttgtgatgacatttggattatgggcttttgttaatcacttagctcttgtaatacttaaacatcacaagtatgctatgttattcccttataaactgaagacacaggggattagcttgtataagtcacatggtttagtatttgggaggaacaagattccaatctagaattatgtggcttcacagttattttaatcattatgcttgttgctttctgagagttctttgaaatgcattaaaaatatgcacatattatgtaagtgcttcattttatatcacaacgtatgtttttggtgaagtgttttaaaaactttttacttgcatgattatggaagaagtaaatatctaaggaagtcagaaagagaaccaaccatattctgttcttggcaaccctaaatttatcattcttagcattttaataatattcttttcagcttttcctgtttatttttttattctactaaaaatgagtatccttttatttcttatatcctgagaatattttgcctaaagcatagcagttttaattataatttaattttatcccacaatggaggtgtttacttgtatattagtgtgtcctagaggatgctgtgactcccctgtgctgctgtcaattgatggcaattccagtggtctttcagtggtcttcctctccctcagagtcatcttcatatctgtatggcttttgaaaccagttctcaaaatgtattgagaattccatctagtattttgatactaacctttttttccagaatatccccctaatattgtacatgttagatggtaatatctggcactgaaaattaaagtacgcatgttttttaaagagaagggataactcattaatttgggctctttaactattacaaacaataacaggcttagagttgaatcctagattttcttttaaaggacttagctatagaagatgtctatttaaatatggtaatgtgttttctaacctgctttctgctagtgctgtattcatgcctttcctcatcaccttcccctcactgcttgcatgcaacagtctcccggtgtctcatgggtcacttttccccctaaacccttgacactgctttgctcctgcttctctctttccctgtcttctgtttgttaatgtgatttttcaagtaattctttcccagtgaagtggaactcaaggcctgtcttatttaaatgagaagaaaaactacatgataaatttatttttacatttttagatatcccacaaataaatggattaagctgggtactttccatggtagagatgagcggaatgtccaaagttttcccctggatgaacagatgtatgcaaaatacgtgaaggtaatctttatacatataggactatgttctgtaatgaaactattctagttatctaccctgctcacttaggaattagagaaactaagagtcctagcataacactaattaaatattttttactgggctattttattttatagacaacttttattctgacatttttctattcttggtaatctagaccaaactattttaacaagctccaagttacaagtcttgtttttgagttttgctttttttttcttttgaggcagagtctcatgtagcccaccctggcctaactcaccaggtgctggtgcctctgtgtgaagtacagtcatgcagtaccatgctcagcatgccttagacctgtaaattgtcatccacctggtattgtgttctattttgaaactttaaacattgttgctgttgaaatcttttaagtaggtgtgatttttttttttaattttttaaaaatcttattcctagattattgattcatttttattatagctttctgtttttataattaaatgaaacaggcccatttagcagtttcagataaaactttagacactttaaatatttccattgcttactttaccaactgttactcgagttgaatttaaataatctatggaagtttctgtgcctctttcctgaaccttttttctttaatagaaaataatggacacatcttaaagtaccatgctgtcaattataagaccttttgaaattgcagaacttctaatttctgtgctttctttaagttgtaagaacttatacctacttgattttgtcttctgggattttactctctctttttaaagcatgaattaaattgatttctacaaatgggtaaacttgtagtattcctaatttcagtatgaaagtgctggattctatattgaaaatgcagttggcattctcagtgtaaaactgccacgtaaagctcctgctcgcttgctttgtggacagaaaccataaaatgtttattaactgcttttttttttttttgaaaaaccctctttcgtatagacatgtctaaaagccacttacttatagtaatgaatgctatatatgcatacaatttcttacctgggtatctgttcacctaaagtaactaaataccaataatacaaatgactttttaaagcttgcattttataagtaaagcatcttgtatcagttgtatttgaaatactagaataccagaacttatgccttccctgaaacacattggatacaatattttaaaaccaccagaaaaacttaattattttgtttattaatatatacatttatctgtatacacggcagtaatacttaacaaaagacctggtttctaaaaaccatcaattaggaatccttttttatttaacagatggaaaacaactgcatttaaagattattctactttattagcttaaagctaatctattacatgtatttaggttgtgcttttcagttgttatggtaaaaatggaaattagggcttttggacctacaaagaattaggagtgctacaatcttcccacccgcgctgcttccacactgcggactgtgggtgcagatacttgttacctatgcatgtgatccggactttgcaactgattcctttttcttttcctttctcctgcttcagatgttcatcaagtacataaaggttagcaaccttctcttttgcaatattgaataacagaccatggcatattaatgcattacaaagataaaaagcagttccaatgctttataagtattgattttgggggcagtgattgtgtttttagaaacgctgtactgagaagcctgagggtgctcaccttagggtccccgcggcctccggctcacggcttctgtttttcaggtggagctgctatcacattttggatcagagcacttttgtcctttaagcctaataaggtaatacaaaacgaatattttctgctgcttatcttacaagggatatagaaaaccttaatgtttttaaggtgaagagagaattttctcgtatgtgaagttattgttgtggaatgtgttttgaaaaaaatgtcaagatagtctgaaacataaaccttttattttttatgttcttgttagcttactttgttttattgtgttaataatacatagaagcacagattgataggaaatcagacattatatttctaaattctttaagttaattatatttatggaagtagtgaatgaataaatgtaagaaatattattttgaagggcaaaagctagtggcccataaaacattaccctgattgtgacaattttgctcatgcattgtgaagagatgagccttagtaacttgtactgtaatgaactgttgttagggtttttggtactagcatggtggaagaatatgaagaaattgctgactcccagtatcagtcagaacgtcaggaactatttgatgaggactatggtaagtgatgtaaacaggtgactatcaggaatttatttatttaggtactctagtagtaatgggtgaattacagatggtttaacctgttttaaaaatgtattttctagagtgagtgctttgtaacttaaattgtttcccaaacctacctgtgagttctttgtaactggaactcttgtaataccaatgctataaattatgagtatatctcaattctgggcccaaaatctgttcaactcagaagatactgtaacaacagaagaaaatatttgttcaattgatttgccttgagccttggagcaagtacatgaagacctgagtcttttaaaagctcctttaagtcagaagggaggggcaaagttttatgctggtttctttatttgatcaaaatggtataaaccataactttaagaattaaaggtggttttgtgtgtgtgtgtgtgtgtgtgtgtgtgtgtgtgattttcctaccaaaaatacaaagatatttgctaaagtttgggaaaatgtttagtttaataattttggttagcattactatattgtccttgattcacacctgtaaggcttctgaccctctttatgtaaatgtcttctaggcttatagttaatatttactatacagtgttttatatgtcaattacctgacaaaacacaggaacttttaaatactgttattggaaattgtttttattaaaaattgttttcttctcttaaaacagattatcccctggattataatactgtggaggataaatcttcaaaaaatcttcttggttctgctacaagtgagtatttgggggtttcctatttatgccgctaaagtcccagtctcgcttgctctctttctgacaggctatttgttatagtatagtttaggatgcttgtgctcccaatcttgacctgtgttagctttgaaaggtgcttatgtggaagtggactacagttggtaaaaaggagggaaatctaagcatgggatggaatcagatttgtacggtataatctctttcagtaaagataggcctatgaatttcttcaggaaaaatgaaggcagcatcacaagtaaattcgttgtgaatgaaggcttggtaatctgtgtctatgcctagttttctgtttaacggtaaaatatcacatctgtttccagaatgcaccaataacagtatcaatatattacgctgttgaaaatgacaaggtgactaagatacctacttggtggtttagttgttctcccaaactagtgtgaatataggggtagactggctaaagataattctggaaaagtactacccaactggaacattatttttctgttaatacaaaattaactaagagcactttctttgtatttagagattaataactagataactagaggtcatataagtgtgtgaatacaaactgtctctcaccgtggatatgcatgtttagttgagtcactttctttttattgtttcttttctccatctcttttcttctccatggagaagaaggtttcccagggatgagaataagtgtgttaagaatacctgctagaggagaacccgatatataatgctcacttcttattagtttattatacttcatttatagtcactgacttagttttctttcatatgtcaggaaagcactgtagcactcagctacaacccaatcccctgtgctaatttttggctttttaaatatgagcaatgctttcagttaggatctgttgttatttttattgctgatataaaatagtgctgtgggacaagatgagattgtatgttatgtatctgggttttgctattattaagtatgtatttttgtatgttgtataataatcattattcttaatgatattgagctagttctaaggaaacagctttttcttttctttttttatacatggaattagattcagactaaaatatctttaacttctgatggctaccagaaaggaaaggacacaaaagggaggtagtttcttactatagatttagataagaaaaagtcctattaatattctgcattttactttttctttctatgggattacttgttagatgccattaaaacataattacatgccagtgtaggacatttccctacttgcagtctcttttctgaccatatatttttatataatatatacaaaggattactctggtcccaatatttttttgtctctcaccttgagaaatatgtttcttgctaacacttttttcttctatttttcttttatggggtttgatgggcatattgaaagaatttgcatagttaaatgatagggacagggagatgttacttgctctatagtatggaaaatagattttgaaatgacatatacctcgtttttatgatacatttttccatttatttatttacttatttattgatatacctcataaggcttcaaaacaataggtggtgagaaggaagcattactttgctgtcatgacgtttactgatctgatctatatagtcttctgaaaaattaatggttgcttttgaacctgacttagccacattttctaagataggatagctaatagtgtaaggagtgcatacatgtgtagaattagtctaaataaccaatgtttggacatagaatgtccaagtttggcagttcaaaatggtcttgagattgggctcctttggaacccagcattttagttctggaaagcagatctagggcttttcatatgctaggcaagcactctgctactgcactgttctgttcccactgtttagatgtttgaaacatctgtgcaggtcaggtagcttcagacttatcctcttgcctctacttcccaagtgttgtgattagaagtgtgtaccaaaacaaacttttccctttttaaaattgtgtgcatagtctctacaaaacagaattttgtagttttaatcttaataaaaacttcttttccctttttctattgggaatgtatttagtatctcctaattcatattcttggagccagaagtatttgacagtatgtatttcagaatagtgcagatgcataatgaggcaccgtgagaatgagatacaagtttaaacatgaaattctcttgtttcataatgtatatatatagcttgaaggtgtgtttaaattttattttattttttacttattgactttgcatgcttgaagataattatatactgtatttttagtgtgcctgaattttgacttgtgatttatcctatgaagtcatatttacaattttctacttgtggaactgttagtgctcaaaaagtatattttggagcattttggctttcatgtcaggcgttagagttatgtagatttttaaagtagtttttttagagttttatagcttaacctatagttagtattcacaggaagtttatatcaccagatatatatacaccagatatatatacagtacatacatactctgtacctagacatgcttattcctgtgtaatttaactatcactgaaggagatatggctgtcttacaacagcagcatatgtgcagcctgttcagtcttctgactcctgcttagattcttgaactaaaacatgtaaatctcttttgtcaataggaattctctgtcccatttctatttcacttgaattttgtcttgtggatttttcagatggctatctactttgatattcttataagtttgtcttttctcttagttacatgtttaagacaaaatgcagtttttaaatcaacatatttttagaaaaataatatatatgtagtatgtggtcctacaaatagaaagcagaaaagattatccagggggagccaagagcacatagaagaggtggtattttggttggtttatcttggtatattgaaacatggccaaaatctccatctcagcatcctagacaacttgtgttttctgtagccaaagtgccattggtgtactgaaagactcaactataatgtaaagatgtttggtccctaggagtctttcattccagaggaataatgtgagatgagtaactttctccactcagagtaatgagggaatatttaatccagtgtggagctgtgtctgacattactgctttactcattaggactttagttactgtgctgacaagctgacccacgtttagctgtgcatgtacaacagtcagaacagactgccacaaagttgccttgtctcaaaacatcaaaagaaatgttctatgaacataaggaaattgtttcttttcattaaatgaactgagaaaatagaaatctttcaaattttgcctttgttaccaaaccatcacctaaaatgacaacaaacaggtttttaagagaacattgtgtcttcttactgtggagctagtaataaaattaagtttcaaataacacaaaagacaaattctttatacagattaacataggtttcggttaattaaataacaatgacttaaattggaaatccgaagaacaggtttactttgaatacaagagaatataaactatagattaaaatttttgatatttttaaagcaggcatctttgcctgaactttatttgatggtagtgtaagcagaagatcatgtccaatagggcggtattgtttggcattcagagcagacttataaagaagcagtttccattcctgacttggggtttgtgaattgatggccattactgtcattacctcagagaaacacctcagcctgagtaaaaatccagggctgtacttctctgttcatcagattgtcacatctaagggcaagacgtttcaaagtggcagcttttctgttattctgatgtctctaaacgaagtactaaaattatattcagataaaaccacagttacgtgcattccataattactgtacttggagtcctctttaaaccagtgaaatttttccctaccctacacacacatttacagaactgggcctgtgtgaccatgctgagtggcgcagccttctttatgtgccttcccttagagctttgtgtttcacatcttggattttcattgaaagtgtcatgcaaagtctgtgagacacttttatctggagactaagacaggggtaacttgggagccttgcagcacagcctctgcacattcttactgctttgatgcaaatgtgtgataatgaaaattgatatcaaatgacagttcaaggtagactgaggaaattcctctgaaattatgtattagaagaccccctcaactcccatcaccagtttctcatagatttctaccattctgtgattcttatgtattcatagatgtctttatatagaaatggaggcttgtacctttattagctaaatgtctccactaggtgcaaaaaacaaataaaaacaaacaactcacaacaaccaaattgcaagttgttctacctattaaccttagttttgacctttaaaaaatcttacccacaaaaagatattgggggttatataacccacaatatactgcttgcctagttagttttaaacatcatcagggaaatttaattatgcatattaccagtttatttgactgatatagtactataaaattaataatagaatttttctacttttctttggatactaatcttcccattttattttttatctataaccattcatttagaaaattgctttgttgatataagttgattttttttttaaactgtagaacctttttagacgtttgaaataggaattttgatcatctcatgtcctccatattccagtccaggctatagttgaattttgtaatgtgttaacaacagtacttagttataggtaggatgaagttttatttaaaaaaaaaaaaaaaaagaagaagaactattcaaaattccctctgaaccttaaaatttcagcttactttggctaaaatctatatcctgtattagactttgataggaaataaaagatatatagtcaaaagaaaatggctaaaagacctttataggccttttaaaaattatcttaagattgtaatgacactctttaggtatattggtattattttctgattgaattttgttttagatgccattctaaatatggtgaatattgctgctaatattctgggagcaaaaactgaagacttgacagaaggtacctaatcattttgtgggtctttaaaatagttggtacttcatggatcctttaagttagaaaaaggaagtaataaactaacaaagtagaattttcatttagaaatgaagagaccattggaaagaacttagccatcttgtattagcttttgtttattgaattttacacttttgttttaaatgaaagaacttcatttcatacatttcattaattgatccctgcccctctagaagcctcttctgccctggtagaattgtttaacccaggatatcctatgtgctatacaagtgctcttttttattttcaatcaaggtctcatgaagttgctggactggccttgaacttaacagtgctcctatcttagtcttgttagtatctgggtgggagcaggtgctccctccctgcccaactgaattgatatttgattcttcctagccatgacagtaatgattctataccctcatctctttattgagaattcctagtggtactttatattagctttccttttgtgtagcaaatatattaatatattagaccattttattttcttttaagaatggcaaatatcaattagtaaagagtaacaaatgatgccttttagtttttgaagaacactaagctaactgttaacttcaaagttagccattttacttcctcattttccaataactttttggtctagaagcatattaatcatgtaatattatgcaaaatttataatatcaaataaggaataatgttcattctttatagttgtgatcatgtgcagtcatgtctttcaaagaaaacttagatttaaaagaaaaaactcctcattagcaaatgtatttgaccttttccttctgccctgagagactacaactctttatttgttacagtaaaatattttatggtatagtttttaaacattgaactcaatgtgggcatctttcttaaaataggaaataaaagtatatctgagaatgccactgccacaactgaacctaaaatgactgaatcaactcgtgtttcaactcctgttccatcacctgagtaagttatgctacgacagtagatttctgttaaaacagtggagtgtattagaaagagaaagaaaagagcttgtcatctgtatacagtcatcatctgtaagagagcccaagtcacaggacagacattcctacagctactgtggacactttgcagttgcttcttctcttttgtgtatatgcatattaaaaacacactattccagaccacacatttgttgctttagaattatctattactttcactcattgaatcttttctaaagaaaagtacttacttccttactgagggtgattactctaggcttgaggacagatttcaaaggattcttactgagtttaggtttgaaagtattgcatatgtatatatgaagtccctaataagccacagagggtacccaaaatacctaatgcagtagttcttgagttgtatttgtcacacagcaaactaacttgttccctgtctcaaaatgatttgtatagaggttttgtttttgtttttttttttgtttttgtcttggcacatattgagcagtgttttgcatataggtaaaataacataaaatatcttcattttgtgggtattttcttaacaaaggcatttacatcatagatatatgttatctataatagaccataaactcagtgatttggctcatgggttatggttattgtgtaaaatttttaaatcttttttgtctctgaggaactctaataggatatatgaatgtgaactatttcacaatagtaggaaatcagaattgcagtaagtatgctttaaactgtaattcccaactagcatactaattaaaaagtaattttgtgctttcaaaagtagagtgagatatttatattctgaaagagactataaagatacttactgagtgattggatgagaaatatggcatatatgttactgattcttaagaggacttaaaatatgtattagtgatgaagacattcttagtggttctaattatctggatgtgtaatagctatttttgatttcataactaggctgcttcttcagttaacataggtttggttttttttttttttaaagcaagctaagcaagctaattttatttatgcacacagacaaatgtgagtattttgaaagatgacttcattgagacagaatctccctatagagtctagcctggccctaaacttgtgatcctcctgtctttttctcccaagtactggacttacaggcacatgccaccacattggcaaaatcattgaacaatttttactctaagtgtctttgtttactttaagtttttaaaataattatatagcagtcatttggtaaaataacaaaaatgtactccgtattcaaaattaatactcaatttatagaaagctgttactttcttttcctaagtctgttttaactagaatagactagagtatgtacaacagcatataacttcatatttaccagatttttattttctccttcttcagacattgctcctatttactgtcacagtttattcagtaactaatagttgacatgccacgtgaatatgtaagaaagataattaggttctaaatggatctatgtggttatagataagctttttgttaagagaagcatgacttaattgtttttgttttgttttgttttgttgtcagcaaaaatgaaaatctgcttagatactctttgactttgcttttgtcattgtggcagacgtctctacttagaaatattttctggtggtaacttttaagtaggaaattttgcatataaagataattcaattttgatgttcatattacctgagtttttcattcaggtttttctttgtcctttaaggttgtatttagaaattgtctttatctcagacagaaccataggcatcgtaatttgtaacccagtttttactactacaccctatctaggccctatcacacagaccttctgtagatccactgatgagacagacaggtttatgatgcatcagtactttttttaaagtggtcaggcatttgtcttttagtaagagaactagctcagatgatgttaagattgtatttccttaaaagtagatagtctgctgtgtaggaattcctcacaacatatacagaaatagtctttagaactttagctgccttctgcagatgatactaggaatcctgggttctagttctagctcttggttatctttaatttctaatctgaaagacttgtaatgagttagtaaatgttatagaaacaaaggtacaatgtacatataaggaagagaagtgttcggaaatttgatgtaaaatacagtggtttgagctatttggttggttgcttggtaagtggactttgtgctgccatttctggcttaagtactctatataaaatggaaaaatgtctatagggaaaactgatcaaatatatttgtatacagctttgtactcagcatttcttcataatcccaatctttatgttgttcctaatacattttccttaagcttattttaacattagatttctaccttaagtgatatgtaatcgtgtatatgtatttctagatatgtaatcaaggaagtccatacacatgatagagaaccatcaacctcagatcctccaaaagagagtccgattgtacaactggttcaggaggaagaagaggaagcgagtccatctacagtgacccttttgggcagtggtgaacaagaggatgagtcgtcatcctggtttgagtctgagacacacatactttgtagtgagctgacttcaatttgttgtatttctagtttttcggagtacatatataaatggtgctcagttagaattgctctttatcgacaacgcagcaggactgtgagtaaaggaaaagattttgtgccacctcagccatcactactacttcctgtagaatcagtagaggtttcagtaccgcagcctcccagtggcgatgtggatagcgagaacatggaaagagaagctgaaactgttgatctggatgatttaagtagtgtgcaccaggggcatttgataaatcacacagtggacacaattgaacttgaaccaagctaccctcaaactctttctcagtctcttctcttagatgttactccagaaatgaattcactgtctaaagtagaaggatctgagtctgttaaatctgaaggaggatatattccatcacaattgatgacccaagagagttctgttgagtttgatgataaaacagaaaaaaagaccgagagctttagttctgctgagaagctctctgttatttatgaaacaagtaaagttaatgaggtgatggacaatactgtgaaagaagacatactctccacagaagttgtcaccaagttccctgaaacagtagtaccaccacctatgaacacagccactgtgccagagggtgaaagtgtggaaaccaaacctagtatagctgatacactaaagcatacagtgactccagttatggatccttcattgcctgaagtgaaagaggatgaacagtctccagaggatgcccttttaagagggttacagaggacagctacagatttctatgctgaattacaaaattctactgatctgggatatggtaatggaaatcttgtgcatggatcaaatcagaaggagtcagtatttatgaggcttaataatcgtattaaagccttagaagttaacatgtctctcagtggtcgctatctggaggagcttagtcaaaggtaagtacaacgcattttacaccataagtttagtagctgaatatgatctacaaagacattgtgatgatgtaagaagcacaattttcactggaaaaagggaaagccatttaaatgatgttcaaagcttcccagaattgttatctttgttatcttttccgtttttataaatatttatagtgacatgcaattattattgggctaataaattttctgtgtcttattttctcctttataattgttgtgttcttaccatgttgctgagattagtcatgagctcttgtgcttaatgtgacctccttgtcagcagcttaactggtagtgtagttctgtgctagcgtgcccaacttcatttccaggatccttgatgtccaggatctctctatttggttataccttttatgtgtgttactggattgcacagtcctgaatcggtcatttaagaaaaagcaggattgttcagtctcaaaatcagaatgattttccagtacataatgaacgagaaagtggattgaaagcaactcttactttgtaggtaccgcaaacaaatggaagaaatgcagaaggctttcaataagacaatagttaagcttcagaatacttcacggatagcagaagagcaggttggtttcttccttattgtatatgtacttttcaccctgcaacatgatactcatttctgtggagtattgtaattaatgtgcatctatagtgtgtaataggtagtaagtcatttcagccattgttagtattctctgatttcaagtagatcataatttttttagatgataataaaaatcaattttatcttacttttcttatttctgatttttgttaatcaatgaagactacaacaaaattcttttttaatgacacttagtacttagataatgtagttttaaggatattttacattttttagacagtactgtagctgaaatgtagcttctccaatgtcatgtatgctcatttcatacatttaatatagactggtggtttgcttcatgtgaatatttaatatttactttatggtaactatataaatatttttatgtgtgagtacacatgtattttgtggaatacaattatttcttctctctttagttactcacaaaagtatgtctgcagttgctcttttctatgtaattattggtaattttctctagttttctcatcggatttctagagagctagcccatacatttcctagtgtcttgacaacataactaacttctcatttccctggtgtcacttctgtggccagcctgtatcttcctactccaacataattaatgcctctgtcagcctgatcatccttctgtttggacacttttttgtataaaatttgatgttactggaattttttaaaacatactttatttattacatttcaacctttgctctcctcttccagttcccccctcccacagttcctcatccaactcctcctccttgcctccaagagggtaccctctaccatgcctcctctccctctcctctctcccttcttccctctttccctccctctccctctcctacttttccctcctcctttccctccctctccctcccccaatcctccctccttccccccctcctagattaggtgcatcttcttccactgaagccagaccaggcagtcctctgctatgtatgtgcctgggaccttggaccatcctgtataagctgcctggttggtggctcagtctctggtagctccctggggtctgggttagttgagattgctggtcttcctgtgagactggcctcttcttcagcttcttaaatccgttcccttattcaaccatagtggtccccaacttcagttcaatggttggatgtaagtatgtgcatctgtctcagtcagctgtttgctggtagagtctctcagaggtcagccatgctaggctctaagtctcttctccatttttgtccctgcagttcttttagacagaaacagttctaggtcagaaattttgacttagttaacccatccctccactttaggccctgtctatctgctggaggtggactcttcgatttccattgttggccatttttgctaaggtcacccccattgagttctgagagtctctcacctcccggtctctggtactttctagatggttcccccatctcccaccccctaggctgcatattttcattcattctcctgtccctctgagcttcccttctgtcctgccccccatacctattctgcttttcccttccctctccccctcttccatccaggtagaatggatccctccctttgcctcctgtgattattttcttgctcctcctagtggggttgaaacttcctctcttgggcctttctgcttgttacacttcttctggtctgtgggttttatcctaggtattctgtactttttggctaatatccacttatcagtgagtatataccatacatgtcctctgggatctgggttaattcactcaggatgatattttctagttccatctatttgtctgcaaaatgcatgatgtccttgttctgtatccatgcttcagttgagggacatctgggttatttccagcttctggttattatgaataaggctgctgtgagcatagtggaacatgtgtccttgtagtgtggtggatcatcttttgggtatatgcccaagagtggtatagctgggtcttcaagtagaacaatattttttgagcaactgccagattgatttccagagtgattgtaccagtttgcagtcctaccagcaatggaggagttttaaccgtactagagaagaaatagaaaatgttcttgcactctattgtggtgccctttattgaacttcttttcatcttttcaccttgccgtccttcttcatagattgacataatagttttctgcaaatgggtgagaatatatggtccatgtctttctgtgtgtggttcatttcacttgaagtaatagccttgatattaatccacattgctacaaaagcaataatattttattcatttttttatggcaaaatagtatccattgtgtaaatgtaccactgtttttggttcttgtccattccttcactgaaaggtataggaattgatgacataatttatctattgtgaataattccgccataaatattggacattgttttatctcctttgattatttacccagcagtgaaattgctgggtgataagcaaagttggttgtaacgtttagagtaatttaatactgttctgcgtgatggctcatctgctttacatgttactctggagttaaatagttactgattttgtaaaatgtaagttgcaaaagtaatgcttattcacacttttctgcaatagctaatgatggagcttggatatgatctcatgctttggaagttagctattggtgtcatatctagaaaaatatttaacattgcattgtgtgtagacaacctttctacaactcagtaaaactgcaggatgttttgtggtttttctctgaagtactcttgttgattatagaaaagaatggctttatttctttttgatcctcccacccttttctgtttatttattgcttgtccagatgtaggtaatgataatggtatgactagtaataaaagttcactcctctgtcttaataaaaaaaattccagtattacactttaaatatgatttgtgtgctcttacaatcaagaaatattttgagatttaatctgatatcttttattttctctatgctttatatatagtttctgtatcttatgtctcaaagacctatataagtacttttcatgttcttataatcttaacaaaaataaatgtattgattaaaagtatcaaccagtttaagcttgtctttagttgtttataactatcacaggcaaatcagtattgtgtcttggcttttaaaaggagtgatttaataaatcattaacttagtatttttaaatggtaaactgtattagaaagagccaaaggttttcagtaatgaaccccactgttagttttatatgcccttctttcctcacagacagttgaggcttgaagccttttttgagcttagatctagactaataaagggttatgtagtttctgtcaagtcttaagttagagttttcaagttcttagacttcttcctgctttttttttcttccttccttccttagatttattaactcatttgcctaatacccaatgaaagtgactttgttggccttcttttcattggtagtagtgtaacgtcaattagatgacataggtatgacttcctgcattccattgtattttgctatgaaaggaaagattataatttttttatattaaaataccttatatccagaaactaacttcaaaaaaaatttcagcatgtctttctactggctgctttgctttaaaaacacttggtcagagtagcgtgtatgtatctggtgatacactagttcaataccaagttgaaaagcagtttattagtctctattaacatgatactctacatcctgcaggaaatggcagaatagttccttttgaggggaggattgagcacaatcccagattcttatgtattttatttttttaaaaacatttaatcgaagtttgtgtttctcttttaagatcgttgcaaaaatacattttgaaagaacttagtggattttccaaattacatgtttcacttaaatttataatttaataaacagatgaaatataaagaaaaacaatcttttgttataggatcagcggcaaactgaagccatccacttgctccaggcacaactgaccaacatgacacagcttgtttcaaacctatcagcaactgtagcagaattaaagcgggaggtaattgcttagttaccttgtaagacagtcttcctaggaagattgtaggaagggcaagcttgtaactgagcatgatggttcaaagcttaaaccaaacaaaactgatatttaggtagaacttgctttaaacaccaaaatgcattcattattttattgtttgggagctgggttgagagtttggtaaggcatggctgtcatgatttggtcttcctataaggcaggtattacgttaattctgtcaggtcttttgaaaaaagcagtttagtttgatttttattctgaacattgcaaatcattggaaattactaagtaaagaaattatctggatcatttcaataatgtttaccatgttgagaaattccttgtttgctaccttgctgagaattagctgtttaaggacaagagcagaaacaagaaggaaacttcttaggaggaggcagttgcagtaacttgggtgaagttaactaagattttagaagtagaaaatagtaggatgttaattgaattaagtatatatttaaagaggtagaaaataagccttaatgaaataccaggtatgtgaggataagaaatttaggttgaatctgaggggtttgataattgagtagttgagttgtatatgtgttagcatactatctctaagggagagagtgcagatggaaagacagactagatatcaacagaatgttaagtggtgagcttaagtctaaggcataaatgtacttactgtactgcttttatatttcaagaaagagttaaatggggagagaacagaaaaagagcaaatgtctgtagtttgttttcaagcaccatgctctgtatttatgatttcagagcaccttgactgtttaaaaataacttgtttgaattttaggtcccacggtccattctttaaagtagtttataattatgtttatcttttcaggtttcagatcgtcagagttaccttgtcatgtctttggttttatgtgttgtcttgggactgatgctctgtatgcaacgctgtcgaactacttctcaatttgatggagattacatttcaaaacttcccaaaagtaatcagtatccaagccctaaaaggtaaggttaacaatatactccacaattttcttctttttgtttttctcaaagaaatgctgagcagataaagggacatgaaactaaaatactaaaaatatcattgtagcaagatggtaactgtacatggagataatgctattgaataatcgagagaaactaataatatatatattaagcctttgaattattttggttgagaaagatgttaaaatgtggcattcaagggtggaagagaagtaagataagatctttggagaagatttgttttatattagcaataatggttttgctaatttaggcttgttccatatgttatgcaggtctcaaatcctccatttaaataggctacacagtaagttagatcccgtataatcactcatgtgtgtaatgttttcttaatatattaggtgtttctcttcctatgatgacatgaatttgaaaagaagaacatcatttcccctcatcagatccaaatctctgcagtttactggcaaagaaggtagatttttatggatatgatctacatatataaactggcttctggaataagtataatgtacatgctgtgttttcatctgcatccaaacaatgaatcagttatctttgtgtttgtgctagtcaaagccactttatcattttcatgctttaaaactctttgttcctttgaaagcccaaagggtggggagggggtcttagtgttaattagcaatgagtagttttgtttgcacatgctcctgtttagaagtatttctttttagaaagggatgtttgagaaagttcaacagctatggaaaccctgaatgctcaatgtgctctcatagcatcctgtgcttttctgcctcctcttcttgtgcaggtaggacctttttttatctctagtttaggacgttcaaggcactttcatagcccagagtttattttcctattttagttcctttgtaattagtgcttattaagaaacttaaaaatttattcttatagcaatagtaaaataattataatcatttaagggtgctttctaaataatgagctgttttccctttttttttagaattttagttattaagccaagtgtttctgttattatgtccttcaaatagtctttcctgagttttactagtgtaagttttcactccgtgtgcctttattaagcttagagaatttttataaacgcaatatgcctgtgtaacctacatcctaattaaaaagtagaatgcagtctagcacctcaaaaactgctttctttgttctcctctcccagtgtaggcagcattttaacatctaattattgtgagtcatcatgccatttactctaattctagtgcagtattccactgtacaaatgctgcacattaacacatttacctatggactattttcatttaggcttttacatgtctttaagatatgcatgcatctgccaacaggaatggaaatgggcattctgggtcttagcatgtatggcagccttagtgaatactaacacagggtttgctgtggatgaccccgtcagctttgggtgcttcccctagctttgtcaggtgttcacatcctagtaaacatgttagtaattgggtcttgtagtcattcggattggtgtatatgcgtttcttctttgaggtatattcatatagctgtgagatatgttgagattgtttttgtatttataagttctactcttattttaaattaagtgaactaacattatttttcctctaactctttaaaggcaaatagaataggcttttccccccaataatagaattgcttctgttttagacagtgatgtaatcttgacttaaccttgcttttaaagaaagctgaggacagtaggtggggacagtaggtaggaagaaactgacatcagtcctgattctgtccctccctcctctcctctcttctcctccctccctccctccctccttcccgctctctctctctctctctcttttttttccctccctccctccctcccttcctccctccctccctcgtttctttcttccttccctctttctctctttcctttaaaattaaagctcttcttggaacattttttcggtctgccttaaattttcccaccttgttggtattttcagttcttaatttagaaagaaccatgtcagattgttttctttttttaagcaacaacttaaaattttaaaaaaggtagcagttgccttttccccagtgagccatctcattggccttctgtttgtcttttaatcagatttaagtagcatcctcttttttgttgttgttttttttttcgagacagggtttctctgtgtactcttggctgtcctggaactcactttgtagaccaggctggcctcaaactcagaaatctgcctgcctctgtctcccaagtgctgggattaaaggtgtgcgccaccacgcctggctaagtagcatcctcttatatataatggaaaatgggatagataagtcatgtgacagtattgttttactctgaataatctccattgtttccaaattactgtattgctttacaagcctagcaacagtgttccattgttcccatatccacatttatggtagtttctgcttttccttctaatgatagctattctaatgtctgtggattagcctactgtgaaatttgcatttctttaattcattgtgtgtgtgtatgtgtgtgtatacatgtgggtgtatatacatacatatatagatgcacacatgtacatataaataaacatatacacatatgctagtatataaaagtaaaagtaatgcatgagtcacagagcttcctttcttcatgtgcattttcactatccatcttgttttgtttgcactttctgtgttctatctaggcagtctttatgaagtccagagtcctaaaacttagtttttttcttctagttttataagtttagatctgtactatatttggagttaatttttatatatgacataagggtccattatctctgtacaatttattgactagattacctatttttcattgagagtagtctaagcatccttgtaaaagaaaaaaaaaatcacttgaccatatctccacatagtgtaatgccctattgttaaatatgttaaatttgtatgaatttatgatcattatgttttcttggagtattgtagtccaatagtcattatgtaattttgtttaaagtctcctctgtctcaaatgaatgtagctgttctttcttttgcatttaaatgaatttttttaggtgatatatagttgaatttcattacctgattgactggttagactactgattttaaaaattgttttgatgtagttagcttattatcataatattttctatttgttaatttttgtttctgtttttgtcctccatattacttacttttactctgactatagttattttacatgatttttgttagtatatccaacatagttctttatagagttaatctaatgattgcttgtttaccatatacgttctcaagaacctacctccactttcaaacaaagccataccttttcacaagtttggttatagcagcaaaataattaatactacatcctgcctctcattgcatgcaaaattgcaatcatttattctgcttatgcatacacatacatagcttatacacacatacaaaatcatgtggatattaatttgaatatacttatctgttaaccagttaaggataagaaaaaaaattgtttttttttcttattttttctttttgaattattatttttttttttgcaaggcagatctgtggacaacagcactccctcaattttgcttatttatgaaagtctattctcttttgaagaatacataagcaagataagaattatatctggttttttcccctcaaaacctgaactttaagaagaaatttacatcttaatgtttcagatctcactcctggttttttgtttttgttttttcttgtcatattctgctcttagtaagtttatgtttcatcctatcaagatatgccatagttatggaccatggactttcttttaaattagtaaaactacatgtgtatagcgttttctttataagagtagtttaagtctttactgtaagttgtaggaatgaagttttctggtaatgttttgttacaattccaaaaattacccattttcccttaaatgctagtctgtattaacacacacttcgtcggtcatctgagctttgcagggtgagcatttggtgtcgcagcagcctgctgtgctctccttcttcattgtcttgtttgaggctttttgtttggatgaaggggatattcatttccctattgttacacttagttgggagttatgcacagtcattggtctttattggtcacttaaggaaggtacaattacttactaacctaaagaagcttttttgtctctttcagaaccaatacaatgatcttatgaaagcctttgcttatcctgtttaatttatatattttccttattataatcatttttatgttgttttacctcaattgtagtttttctgcttaattctatctcaaggtgttatattttttatttattgtatctttaaatttgtctgcatatgtactgagttctttggtatgtcttaaatcttttttctaagatttttcatttgtcatatttctaaacctctgaattacgggtttttttgttttgttttttttattgttgttgttgttttttttttttttttttgctttgttttgttttgttttttcttgagacaagatctctctgtggtcctggctgtcctggaactcactgtgtcactgtgtagatcaggctggtctcatgactcacagagatccacctgtctttgctgggattagaggtgtgtgctaccataccggttccttgaactactatttttctttttctttaatcctgtgttagatttgttgggctcttagatctctagataggtatcttctttttttttaatacatttaataaaaataatccatagttttacatattttacatctgtagaatatttataagttctcttctatagtatttaatattccccattttttctattatttgcctttggatcatttctttcagcagtggaactgtccattgttcactggaactaaaaacatagcttcttgggcaatattccttgttctaaggcctctgtcttttctgttttgttgccatggttggattggacggttcctttaatgcttccactgaacagtttggtcttggaagctggcatccaggtgttggccctggacagtttctgaagtccttggtcttcaatgcctgtgaggctgtgatcctagtacacgggttaaagaagaacaagccttggatgagatccagcaagtcgtccccagctgcagtgaagatgtgttgtagtgggaccccagggaaactcttaaatgtcacagaatctggaaggctacacatgtcaggccactgttcttcagttggtgtacccaaagtttcaaatattcttgttagctgatcaaggtctgactctccaggcaaaaaaggaacccttagaagcaattctgctaataaacaacaaacagcccacatgtccattcccacatcatacatcctagttccaaacaataactcccttcatggcttctgcatcagctcctgcttcctgccctgcttgaattccagtcctgacttccctggtgatgaacagcaatgtggaagtgtaagccgaataaaccctttcctccccaacttgcttcttggtcatgatgtttgtgcaggaatagaaaccctgactaacacaggggcccaataccatctggtcacaacttgatgtgtgtaagtcctgctggggctcccaaatgatttgaccaggacaaagtctgccagtttcagaactccattcttatctaacaagaagtcctttggtttcagatccctgtgtagaatccaatgctgatgcaaatattctaagccctgaaaagccatcaacatgtaggcttgaatgtgggatggtgtcagcacaagactgttatcctttattataacctctaggtcagtttccataacatccaagacaaggctaatgttagacttatgtccaaatgtgtcaaggagaccaattgtgttcggatgacttagtttctgtaagagctttatctcccttaaggctgttctatttataccacctttagcttctgacctgtgtccaagtttgattttcttaatggtgacgatttggttggtgttcttatctctggccttataggctgtagcaaaatgtccctgtccgaagaagtccagtttttcatagcgtttcgcttgagattttacgtccacagccatgagagtgagaaaccagactctagcatcttagcacctaagctaagtcctccacccctcaggaatttaaagcatctctagataggtatcttttaagtaatggaaaattgtagctgatagtttcccctagatatattacctatcttgattcctccatctcttaaatctcaaatttcataaatgtattaatccatcttcatgtatcctctttatcttgtaaagtttctgtcttcttttaaaatcatgtgtgtgtggctgtgcctttggaagccaactcactcctgagctgtgatctctgagctgcctggcatgggtgctagaactcagccctctgcatgaccaacatatgtcgttaatccaatccgcctttgcttccttaaatatttttcagtatttgtttttccctaagccacagagtctaaagctatatctaatctgttcttaaatttgtccatcgagtcttttgttttacttaccacatttttttgttcctaggagatctttgtgttttttttaaaagtctcgttttatatttcttgaggtatttttctgctttttagtatttaaacacacttaaacatagtgtctttattacccatgtttgagattggaataataatacaagttgtaattgatggggtcatgttattaataagtttctggtatgtatagctttatgataaattagtgtgtgtcagaatacaagttgtttttaacaagttgcattggggtgcagtttagtagctctgtggagagatctgtgcttatcattggagcagaaggtgctctgaatgtgcttttgagtaacagaatttttgaaacttaggggtgaatctatagatgatttcctcatcatgtcggaaagtttttttcaagagcttgtggtcacatgtaccgtgttcaaactctttctatattttagagttaatagtttaaatcagagctataaaagattagagaaaaaggattcctaaatctcactttatgttcttctgacatctatgattccaacacgtcattaatgtgcctgtctgactctatccatcttttgggttacctgtatgctgcgtgtaggtttgtccagtaatgccatttttctcgtcaggtggggaatgaatctggtcccagagaacaacccttactgtatcatttgatacttgttcattcaaaatgtaaaatggaaatagacttatgtaaatgttggttgtcttcagggttgatgaccaattttcaaatatctttgaccaagttcaaattcagagcgcactactctggcttactaattttcagtgtagaaataatagttatcctgatacctttcatccatttcactaataatcactaatgttgttttgggtgtattttgtcatagcataatccacttttcattttataccccttttctttacttatagtagatccgaatgatttgtacatcgtagaacccctcaagttctctccagagaaaaaggtaatactctttttcttttcaagcctattttaagctgtgtggtagtaaatgaattgaaattggcattttattttattttattttattttattttattttttattttagttgatttgggtaattgttgatgtttttgcatttattgtgtcagtgccgaaagggtaacttgtaggagttacttctccaccctgtgagtttagcaccaagtgtcttcctgctaagccatcctgctttttgatttacttattcattcattcattcattcattcattcattcattcatttaaagacaaggtctcacatacactactgtactctgattggtatcaaactctctgaagtcttcctgcctcaaccttccaaaggctaggataataggtgggagacatcatacccaaccagaatgttgggtttctccccaccccttgtttttgtttgttggagataaagtctgacgtatgccaggatgcctcctgagaatggctttgagcctgtgtttgtaccttctgagtgcaggggctaggattgcaggcagacgttccccatgcagttttatgcagcactcagggtcaagcctggggcttcatacctatggtacaagccctttcctaactgatttgcattcccagttcccatatgttcattttcagcggtcatacggtataagtaaatgtttagaggggtcatcaaacctttgtctaagaagtatattcctatatttaaaggtttacaaaataaaactaagaattctttaaagaaatacttatgaggcctgcaaaaccttaaatattatccaaccctttaaagaaaaaaaatgtgcagatacttggatgatagtcattatttactgagctgctcatgcatgccaggcacagttcaagcactgtttatataatcctcttacaacctagcagtggtaataatctctttttaaaaaatgaagactcagacagagtctgtacttagatgtcccagcagatagtaggcactgctgtgtatcttcctaggattcccccccccccctttgcctataaagtctgattttcttttttacctctcaatttacataatatttattttgactagcagtaattgtctgtagtagaatttcagattagtgcaaagtagcattggatttaatcctaacttcagtatttactattttgtaatttaggtagtaagccaaatctctaaagtttgatttttttttttttcatgtaggagccaagggcaaacaaacctctcagggttaacatatatgaaagtaaccagtataacatctgacacatagaggtatttagatattagctgtctctacttaactctatatgcacaagttgctataacttgagttgagtagcatttacaaaggggatgtcagagatactatctattcacagcagaatgtgtgtgtgtgtgtgtgtgtgtgtgtgtgtgtgtgagagagagagagagagagagagagagaatgagagaatacttgttttacttttcataggcaatgctactttcctcttacatctcttatctaataaggaggagtaatttctatgcttttatttctgttatagaagaaacgttgcaagtacaaaactgaaaaaattgagacaataaagcctgcagatccattgcaccctatagcaaatggagatataaaaggaagaaagccctttacgaaccagagagatttttctaacatgggagaagtttatcactcttcttacaagggccctccgtctgagggcagctcggaaacttcatcacagtcagaagagtcctatttttgtggcatttcagcttgtacaagtctgtgcaatggacagacccaaaagacaaaaactgagaagagggctttaaaacgaaggcgatctaaagtccaagaccaaggaaagttaataaaagctcttatacagactaagtcggggtcattgccgagcctgcatgacataatcaaaggaaacaaggagatcaccgtgggagcatttggggttacagcagtctcgggacatatctaaaaggagctgaacatttatactgaaaacttttttgttctttgaagaacagcctgtggtatttgaagggttcagggggagggataaaatattggggaaagtattcagaaattatgggtttttttattttgccttttaaaaaagtagacaggattgtgtcaatcttggctgatgagctacagttttacaaggctgatctcttcctagaaggatggtgataggcattttataaagatgtgttttcacagataattactgggacaaaagtaatttggaagcccagttccttgggtggataggaacgaaagcctaaacctctccttcagcttggttcccgtttcttgcaccttcccatatttatgtgccttttgtctatttataatgccactggaagaggagggagaactttttctgtcatttgatttgttttgtaactttattaggtttttgaagctgcaaacactacaaagctttaaggtggtccatgcctgaagctcagcaatgtgggtcatttgcataaagatcctaaagacttccaacttagaaccgctcagtagtctcactgaaataaacactttctcaagttttctaaaggcctttcagataaaaaggtgatgatttcacccttggtttcatttaatttagttggattgggttttttttccccctgagttattattaactcagtaaaatggtaagatattttcttggaaatgacaggtatttggaataaatttattataaattcacctttaaacacacttaactatttgtgatgatttctctacattgctctcaatgttcacagtaaacactaatcctccaaattttcacatcaccaagaccaggttttccatggtcctgtcactgcctttgtacatagtcacagaaccagccagtgagcacgtcaggcctgattcagtctaattggtaaagtctaatgggattgtgattccttcatgtttgctttcgttggctacaatgtgcagatatgtatgtatgtgatgtcagcatctgtcttcacttgtttttttgttttgttttggttttttccttaagtaattggcagtgtctgagtaaattgatttcttgatgtgtgattgtacagggatgagtgaaagtgatatgtgttttagagagagaattgaccattttgtgttgtaaaattttaagttataatttattgagcacttttgttaataattgtttataaatttgtctaatgccttttttggtattgtttgtaatgtgatttatttaaggcctttttgtttaagttgctgctttaggttaacagtatgttttaggaaatgaatttcccctctcccagtctgcacaattagccattcagagcaatatggcctggtggtacacagcaggcccttgagaagtccagatgtgagccgagctagagtggggagtcactgtgtgctgtgaaaggagggtttttaatatgtaactacagagctgtagtaccattagaaactgtgaatttccaaataaatctgaacacttgtctttattaatcactggctcttctgtcctttaaaagattgcaaaaatttattactaacttttgatcatagatttaagggtgttttggtttttggtttttgttttgttggggttttttttgttttgtttagttttttttttttttacatctttcaggctaaatatgacagcattgctcaaatttcaggcaaccacagtctactctttcacctaagcattatgttcgttaataatcatagtttacctttgcagactctaagcagacagttctgatatttagtaagatgcagatctacctagagaactatagctttagtctgagttttatttctgcagattataactacatgtaagagggaagaaaactaagcggcaaagtctcagacctttaatgagagaagattcttgccaggagcaaatttgtgtttctaaaaggtaacaatcaaactccaagggttgtaaaatcctgaacttctgaattactgctcaggtttttttttagaggatttggatttttagaggatagcacttttggattttagattttggaactaaggatgcctacccagcaaatataattaacagaatccgaaagtcttcaaacacttctcaagtgtttcagataagacatactcaaaccagtatgtaaatctgatttttcaatattccgtggtagccaaccttatattatttgtagtgttaaggtactaaaccagaatgaaataaaacttactcaactcaagcaaatcttcgtgtatctgtggaggtttatatatgcgtatgatttgggaattaaatagtttttacaaagcttgtacacagataggtttcctccctcacgctgctacacacatgcaccctacccccacacctctcactgtccaccatatccacccccagcagcattcattttcaattctgtatttcaagtttccgtgcttaccttgggccttatgttgacagttttagttctggatgcatatccaatttggacacagacggacataaaccatgcttttatttaactgataaaatgagagattcaaacttatggagaagtcaaacattcatgcaccattacctgtattgaccagctgttaactttgtttatttatatatgtttatatagatgtctgcatatacatacatatatacatatatatgtgtgtgtgtgtagtgtatattatgggtatatagaattatgtgtacatataagacatttggtagatgaatatggtaggacatcatgacccttccaccttgaataaattcatgttaattttatagaataaagatatttaccttacatccttacatgactatattagggttctctaacaacttaccaaatgaatctctctttctttctctctgtattttggggatttcttagaatgacttacaggctgaagactagctaatctaacaatggctgcctatgaacagaaggttctagaatctagcaattcctcagtccacaaagctggatatcttagctgctcttcagtaaacactggaatcctgacaaagtagactctattgccagtaaaggagtggacttgctagtgagtcaaaagcaaacaggcaaagagcaaaagcttttttcttccatatcctaagtttccagcagaaggcatggcccaaattagaggtaggtcttcctaggccaaatgatctagtttaaaagagatgtcttccctccttaaagatccagattagaagtgaatcttcccacttcaaattagaaaatccctcacaaatgtgcccctccatttatgggttatatttaatttcagatgtaatcaagttgacatccaagaatagctatcattaagttcaccttgtctactctttttgtcatgattatcaatttccaaataaaagcaatagctatgtcattattacacctaaacatgatagaactaccccacatacagtttcagacattggtatatatttaaccaagtcataattacacctaatgatataactatccttcataaaaccacaacacattataaatttagactaggtggcaatgtcccttgaagaattcttttagtatctcaaacttaaatatgataaccattgatattctcctaattgatgttacatcacatgataaattgaggagagaaaacacaaatatctattacaatgcattcttaacaaaatacaccagaaacactcatcagttttaagccacatgtctacaacggatcaaatggccttagctagtatttataaccacctttctctacaacttgggcttatgcagcctagaccacatttcttaagctttcatggtatccatgattgtactaatacagtagctacagctggacacaaccgggtgtgacaagtgtggtgtggctcaagtatgaataggatctattgggttttgtttggttttaagatttatttgtgtgtgtgtgtgtgtgtgagagagagagagagagagagagagagagagagagagagagagcaaaggccagaagaggcattggattctttggtactggagttacaggcagctatgagccatgcagtgtgtgagctgggaacgaaacctgggtcctgtgacagagctgcacgtgcttaactgctgagccacctctcaagcccatctgacctagaatgtatttctctgtgctcactttcttaatgactgctgtgtaactatggctaactatggctaaaaatgtttgtgatagtctgtagatccaaatgaatatattatatgaacatatatgaatatacatatatatatgatatatatatatatatatcatatatatatggaaattacttttagtcaaattcctaagacttccctttgaacttttaagatgtcaaaatcaatatgtagtgaagtgtttattttgaaatgttggtccttttgtttgtttggtttttttattacgtattttcctcatttacatttccaatgctatcctaaaagtccccccacaccctcccccccccacactcccctacccacccattcccattttttggccctggcgttcccctgtactggggcatataaagtttgcctgaccaatgggcctctctttccattgatggccgactaggccatcttttgatacatatgcagctagagtcaagagctctggcggcgcacgccggtaagatttgctgaaggaggcagaggcaggaggatgtttgtccttttgaaactaagtctcttcttaggaatgctgtaatttgcaattctcacatttttatatattgttggtattatgggtacacggtacttctaatattttctaataactttttgataatatgacaaaagacatgtttttcttaaacattttatcattttaccttactggattccatttattttttttttctcagttgattctttgccaggaatttgacccacatcacatctcatttcatatttcttctacctttatttcgaatttaccaggacttcccaaatagtgctaagtaggaaggatgctagcaggcatcattttcctttatataaactagaaattgtacaatggttataattaataatagtgattagttctagatggatactaagttggctgcagtggctatgatagaatcgtagcacttgataaactgatagagaatttctgtgagtttgaggtgagtggactatatagagaccctatcaaaaagcaaaactataaacatcttcatagtaattatttcgctgaaagttttttcttagtttggaatacatagattttattaaaatattttcagcaacaaatgagtttaatgtgatttgtgttgtgagatgaattatttaacaataggttattcagtattaaatcctccaaattatttggaggaatcaacttagcttttgaatctattattatgtattggctctgtactagttggctagggtaagctatattttttcaaaacaaatcaaatctgaaagttaacatgaaatttactgtcacttacgtaatctctgatagagcctgttggcctttatctgttgtcttagactatttgggacacacagtcccaaatagtcagggggaaaaaatcagagatagcataccttttggaacacctcaaatatggaatgaaatgttatttgttttgtttctttgatgctgaagccagtgacattaccccaggctaagcagacttgggaggtctttctgtgtctctgcctaatatcttttaccataatttttaatagtagggggaaaaggatgaggtttgatttaaacattttgaacaatttaaccttactgaattctattcagtgggaggatcctgaaccatctaaaaaaaagaagataggctgagtgcagacagacatctgttgttctcctcttccgcatggaaacagtgtaaccagctcctttaacctccgcctggctttgacttcccaactatgatggactgtgtgccttgagctgtaagctaaaggtgtaagcttttgtatgttgtttttattgttgatgtgacccaagaggcaacttggggaaagaagaattggttttggctcatagtttcacagaagtttggtagcatagaagggatgtggcagaagcttggttatagagcagctgtgcaccaggaaatggagtgggactggaatctgtcagggtacagccctcaaatccacccctagtggctcattgccattagccagaatccgtgtcacaaaggttctacagcttctgcaaacagtaccaccacatgaggccagggttttaaatacatgagcctgtgagggacattttatacccaaaacacatttatatagacataaaagctatctgtatatatatatgtaactatttctgtattatgtttggtcagaaactacttactcccatagctcaaagtcttcgtgtatctctcgcatttcccaaaaatatctacaaaactataaatatatatgtatagtttttgtttatagtttatatataaactgtatgtgtatatatttatatagtttttctataaactatatatacacatataaactgtatatatgtgtatacgtagttttatatttgtagtttttttacaaactatatatatgtagtttttatatacttagttcttttatgaactatgtttatatacacatataaaaatatatatgtatatatgttttttatatttatagttgatatataaactatgtatatacagtttttatatttgtcattttatagctatttttgggaaatgcatatatatgcacactagtttatgtgtgtgtgtatatatatatatgtatatatatatatataaactatacttgaggtttgagtattaatatccatatatattacatacatacatacatacatacatacatacatacatacatatattcatacatacatatatacatacacacatagtttttacatttgtagttttatagatattttggggaaatgcggaaacagaaaacacttacctccataagtgttaaagaattaaaccctaagtctcataaaaggatactttggagttttctagaagaaatggtaaactgacctctttaagtgatccataggaaagtgtggacctgtaaaaaaggtcttttctgccatttcttgtgaagttagaaatttaagtagcatatttaacaagtggaactagaaatgcactatcagctgatcactagcctcttggtgggactagttctgcttgtatttctgtactatgtatgatcagaactctgttgttatgggtaccataagctataaaagagctcaaccatgtagagcatccagtcctaaataaaaggtaaattctgttttattgtgctactctcttcccttgccaggactgagatgggttagaacctgagttccagagctcacagcatgtcttggccattggttgtcctgtccttttctccctttgttggatgagttgcaaacatctgtagagtggaatgggagggcagggtaaagagaacaaaaaagtttaacctggtgctatagcaagttaggctctgggtctggcatgcattgaaagatgcgcataaaggttttcgtgcataccgttgagttttgagaggaagctcaagctcgattttcctcatctttgtttcgggaagaaactggtaacatatcatattcagcttattcctgtccagcttcaaggatctagctctgctgtattgtctggcttccctgggggaaacagaaccaacagagtgcctatagattaaagtgtgatttattagacggccttaccagatactgtctgggtaaccctgcaatggctcacttaatgctggaaaggccaagaacctgtagttgcatagtccatgaggctggacatgtcagtagtcaaaatatcggcctaaacccttggaggatttctggaaactgaagaaatgcagcagtggcagtaatagcatagatgaacttatcagaatgagagaaggcaggcaggcaaaaagcaagcttccattttgcttctatctgatttgtcactggaaggtgtcattcatatttagggtgggtctttctacttcaaataatctaatcaaggaacgaggaagcacagaatccctggtggccttcctttcagttcattccagatccagtcaacggcctctagcctttccctgttcctttgggcagcgtagttggagagtgccaactcaacccctgccaaaaagctcttatgtggaattgacattttgatactataaggacttagacttaagagtcttcctggagtctctgggactttttaaaaatgtattaatttttttgtatgttggaacttaaaaactatttttactttctaaaattaaaatataacaatatttccccttccctttcctccaaattcagaaaatataccttatgcccctcattccctttcaaatgtatgacatgcttttctttgttgttgttacatatatgtataaatttttaaacataaactattgcatctgtttaatgttgcttgtatgtatgtgatgtaagggcttttggagttggatggtcaattaggggattcatccctgaacacaactaagtctccctctcttggctatcattggctaaggatggtttcctgtgagacttctccctttgatgataacaaccatatagtcaaggtatcatgagtatggctccgctgtcgtttctaagagatctgatctcatccgacttcctggtctgctggctctgaggagcattcggccccctcttctgtggtgctccctgccccctcttctgtggcactccctgagcttgggctccaggatcagttgctctctgtattgggccagtgtggttttctgtaatggtctctgtctgctgcaaagagaaacttctttgatgaggcataagcgctgtgctggtctttgggtatgctttgaaactaagcacttagagtgcagttaggaatcgtgctggtttagaaagtggtggtataaggtttcctctagaatatattcaagagtctggatcagtgggtgaagtatctggacacatttgtcagcaggaaaggcattgatggtgtagctcaccattcctgccgcatgcccttcagggttttcctttcagaaaggctgtgaaaagaacaagaaaaaaaaatcgagataaaaataatattgaaagagctttagaaagtgaaactagaggttcatgacaaaaggacaggccttgtgacaatctccagctgcttcctagaacgtgtactttggtttcttaaacgtttgaccataggcgtctggcatgaccaattacagtttacccagaagctcacgattcatatcaagaggtcactggacacttgttttatgacatttccctgtttatatacagtgttggtcttaaaccttctaccagttacttgttcctgtctttttaacatttcattaagagtttcctacaaagaaatcaattatctctataggttgctttatttggagtaattactgaaagataccctgaactgtatatgatgtcacttcaagtgatatgagttaggagtgagcagatttcaatgatactgtggccagatccttccctcatagcccacagcctggggaaaaaaatcataagaataaggttctaattactagtcaaaggaaagggacccatatcatatctctcatccttgaagatgtgggatactgaaagtcattaatggatggcttagcccagctctaagagccctaaatctataagtactgtataagtactgtatagtgggatgctttctgaaatgaatgcatacagaattggttccagggcccctcacatccttaatactcttatgaaatagcatattgtctgcaggtagcgtatgctttcagtcacctcatacttacagtcacttgtaatatcagtgatgtaaatgctgtgtgaaatgcattgtattgtttggggatagcataaaggaaaactatctgtacattttcagtacaccatgacatttttgttttcaagtatttttgagatggggttagttgactgataagttgttatttctaaatccctatttcttatatatatctttctgtctgtccatcatccatccatccatccatccatctatctatcggcccacctacctacctatctatctctattgatgagttgtcatctacctgttgactctatttaaaatatttatcaacatgtattttattctaattctaggcacatgggttgctcacacatgcacttgccctttaccttgctctagcttgtgaatcaggaggagaagggacaccttctgggtttgtagaagcatttaaaagcaaatcactgtacttctatcttgtcttctctttgcagtgactagcagtgtaaatggtggggcctcagctgttcggggtcccctgatgaagactccataatttacctactgtagacttcgtaggaacaaaaatacacacttactgtggtaagccagtgaggttttgtgattgttcctcacttagcctaatttaagcttattaatacactgtcttgccttgttccaaaacagtttctaagaactattagcacaataggataagagagtgaatcagtgcccaacagggttatgtatacacctctcagcactgagagctggaggccagaggcccaggagtttgatgccaggttggtttacgatagtatccaggccagccttggctatgtagtgagacccagttttataagacaacaataaaaatgaataaggttagtgtataatgacatttgccttagtgagttattggggagaaatacactgtgtgaatggaagccagtatagataataacagcctttggatcttggctcctcagtttgtacaagtgatgctttctactcagacagctctcctctttgtgtaacagggaaagccttcctcagcttaccttcctacaattacagcctggctccctctagtcatgcccacttccaccgtgatttttgtttccttatcacacctaccaccttggaccaaaactctacattttatttccttttatgtctgttccctaacactagatcagaagcttcataaaaggcgtgagcatctttatttattgcttcatctccagcagagagaacactacatgttgtgtctgtccatcagtgttccacacatagttttaaataaattgtgggttaataaattatgatttggtaggggatcttagtacaggataccaatggagtgagtagctacttgcctggaacctgactctgagatatagaaacatgcacaccatatgaagaacctaaccttgctgaatcttctgtttttatcctcccctcccccatgaatcctggatttagataccagtagataaccttcaacaaccacaataataagaatcacataaaagaatggcaattgtggagcattgtgacttattggccatggcttcaaggctctttccactcatgatctaatatgaattttaataatccctgtagtcagtgctattatgattggtccttatctgtatggaaaatgtgcacagagg

SEQ ID NO: 618 - DNA, 5128 bp, Mus musculus
cggcggcggcggcagtctcccgagcgctcctgtgaagcgtccctattcccgttgccgtgggcctctcggggaggccatccgggacgcgagccgctgcggaaccgctccccaagccccactgctcttcggactctcggtcccatcctcgcgtttctgctccggctcctccatcttggcctcgacagtggctgctgtggggaggatgtgccgcctcctggcagggggaagaaggaggagaagatgaagaagtaccggcgggccttggccctggtctcctgcctctctctctgctctctagtctggcttccgagttggcatgtttgctgtaaagagagttcttcagcttcaacatcatactattctcaagatgataattgtgcaataggaagtgaagacacacagttccagaaaaaggatttggaaacaacgaagttaagcctccctgtggttgaagcactccctacagttgatttgcatgaagagtcttccagtgtagttgtaggcagtgaaaccattgaaaatagttccagttcatctacctcagaaaggactccagtctcagagcttgatgaagtagaaaagtctggtactttatctatagccaagccaggtgaagtggagcagcctgaagctgactgtgatgctggggaggctcctgatgcagatgctccagtggaacaacctgcttttgtcagtccaccagagagccttgttggccagcatatagagaatgtgtcatcttcacacggcaaagaaaaagtaacaaaatcagaatttgaatcaaaagtttcagtgagtgagcaagacggtggtgatccgaagtctgcattaaacacttcagatactttaaaaaatgagagctctgattatacaaaaccaggagaaactgaccctacatctgtcacaagtcccaaagatccagaagatataccaacatttgatgagtggaagaagaaagttatggaagtagaaaaagaaaaaagtcagtcgttgcatccgtcttctaatggaggtccacatgccacaaaaaaggtccagaaaaatagaaataattatgcctctgtggagtgtggtgccaaaattttggcagctaatccggaagccaagagcacatctgctattcttatagaaaatatggacctttatatgctgaatccttgcagcactaaaatttggtttgttattgaactctgtgagccaattcaagtgaaacaatttgatattgcaaattatgaattattttcttctactcccaaagactttctggtttctatcagtgacagcatggtggaagaatatgaagaaattgctgactcccagtatcagtcagaacgtcaggaactatttgatgaggactatgattatcccctggattataatactgtggaggataaatcttcaaaaaatcttcttggttctgctacaagaaataaaagtatatctgagaatgccactgccacaactgaacctaaaatgactgaatcaactcgtgtttcaactcctgttccatcacctgaatatgtaatcaaggaagtccatacacatgatagagaaccatcaacctcagatcctccaaaagagagtccgattgtacaactggttcaggaggaagaagaggaagcgagtccatctacagtgacccttttgggcagtggtgaacaagaggatgagtcgtcatcctggtttgagtctgagacacacatactttgtagtgagctgacttcaatttgttgtatttctagtttttcggagtacatatataaatggtgctcagttagaattgctctttatcgacaacgcagcaggactgtgagtaaaggaaaagattttgtgccacctcagccatcactactacttcctgtagaatcagtagaggtttcagtaccgcagcctcccagtggcgatgtggatagcgagaacatggaaagagaagctgaaactgttgatctggatgatttaagtagtgtgcaccaggggcatttgataaatcacacagtggacacaattgaacttgaaccaagctaccctcaaactctttctcagtctcttctcttagatgttactccagaaatgaattcactgtctaaagtagaaggatctgagtctgttaaatctgaaggaggatatattccatcacaattgatgacccaagagagttctgttgagtttgatgataaaacagaaaaaaagaccgagagctttagttctgctgagaagctctctgttatttatgaaacaagtaaagttaatgaggtgatggacaatactgtgaaagaagacatactctccacagaagttgtcaccaagttccctgaaacagtagtaccaccacctatgaacacagccactgtgccagagggtgaaagtgtggaaaccaaacctagtatagctgatacactaaagcatacagtgactccagttatggatccttcattgcctgaagtgaaagaggatgaacagtctccagaggatgcccttttaagagggttacagaggacagctacagatttctatgctgaattacaaaattctactgatctgggatatggtaatggaaatcttgtgcatggatcaaatcagaaggagtcagtatttatgaggcttaataatcgtattaaagccttagaagttaacatgtctctcagtggtcgctatctggaggagcttagtcaaaggtaccgcaaacaaatggaagaaatgcagaaggctttcaataagacaatagttaagcttcagaatacttcacggatagcagaagagcaggatcagcggcaaactgaagccatccacttgctccaggcacaactgaccaacatgacacagcttgtttcaaacctatcagcaactgtagcagaattaaagcgggaggtttcagatcgtcagagttaccttgtcatgtctttggttttatgtgttgtcttgggactgatgctctgtatgcaacgctgtcgaactacttctcaatttgatggagattacatttcaaaacttcccaaaagtaatcagtatccaagccctaaaaggtgtttctcttcctatgatgacatgaatttgaaaagaagaacatcatttcccctcatcagatccaaatctctgcagtttactggcaaagaagtagatccgaatgatttgtacatcgtagaacccctcaagttctctccagagaaaaagaagaaacgttgcaagtacaaaactgaaaaaattgagacaataaagcctgcagatccattgcaccctatagcaaatggagatataaaaggaagaaagccctttacgaaccagagagatttttctaacatgggagaagtttatcactcttcttacaagggccctccgtctgagggcagctcggaaacttcatcacagtcagaagagtcctatttttgtggcatttcagcttgtacaagtctgtgcaatggacagacccaaaagacaaaaactgagaagagggctttaaaacgaaggcgatctaaagtccaagaccaaggaaagttaataaaagctcttatacagactaagtcggggtcattgccgagcctgcatgacataatcaaaggaaacaaggagatcaccgtgggagcatttggggttacagcagtctcgggacatatctaaaaggagctgaacatttatactgaaaacttttttgttctttgaagaacagcctgtggtatttgaagggttcagggggagggataaaatattggggaaagtattcagaaattatgggtttttttattttgccttttaaaaaagtagacaggattgtgtcaatcttggctgatgagctacagttttacaaggctgatctcttcctagaaggatggtgataggcattttataaagatgtgttttcacagataattactgggacaaaagtaatttggaagcccagttccttgggtggataggaacgaaagcctaaacctctccttcagcttggttcccgtttcttgcaccttcccatatttatgtgccttttgtctatttataatgccactggaagaggagggagaactttttctgtcatttgatttgttttgtaactttattaggtttttgaagctgcaaacactacaaagctttaaggtggtccatgcctgaagctcagcaatgtgggtcatttgcataaagatcctaaagacttccaacttagaaccgctcagtagtctcactgaaataaacactttctcaagttttctaaaggcctttcagataaaaaggtgatgatttcacccttggtttcatttaatttagttggattgggttttttttccccctgagttattattaactcagtaaaatggtaagatattttcttggaaatgacaggtatttggaataaatttattataaattcacctttaaacacacttaactatttgtgatgatttctctacattgctctcaatgttcacagtaaacactaatcctccaaattttcacatcaccaagaccaggttttccatggtcctgtcactgcctttgtacatagtcacagaaccagccagtgagcacgtcaggcctgattcagtctaattggtaaagtctaatgggattgtgattccttcatgtttgctttcgttggctacaatgtgcagatatgtatgtatgtgatgtcagcatctgtcttcacttgtttttttgttttgttttggttttttccttaagtaattggcagtgtctgagtaaattgatttcttgatgtgtgattgtacagggatgagtgaaagtgatatgtgttttagagagagaattgaccattttgtgttgtaaaattttaagttataatttattgagcacttttgttaataattgtttataaatttgtctaatgccttttttggtattgtttgtaatgtgatttatttaaggcctttttgtttaagttgctgctttaggttaacagtatgttttaggaaatgaatttcccctctcccagtctgcacaattagccattcagagcaatatggcctggtggtacacagcaggcccttgagaagtccagatgtgagccgagctagagtggggagtcactgtgtgctgtgaaaggagggtttttaatatgtaactacagagctgtagtaccattagaaactgtgaatttccaaataaatctgaacacttg

SEQ ID NO: 619 - protein, 1196 aa, Mus musculus
RRRRQSPERSCEASLFPLPWASRGGHPGREPLRNRSPSPTALRTLGPILAFLLRLLHLGLDSGCCGEDVPPPGRGKKEEKMKKYRRALVSCLSLCSLVWLPSWHVCCKESSSASTSYYSQDDNCAIGSEDTQFQKKDLETTKLSLPVVEALPTVDLHEESSSVVVGSETIENSSSSSTSTPVSELDEVEKSGTLSIAKPGEVEQPEADCDAGEAPDADAPVEQPAFVSPPESLVGQHIENVSSSHGKEKVTKSEFESKVSVSEQDGGDPKSALNTSDTLKNESSDYTKPGETDPTSVTSPKDPEDIPTFDEWKKKVMEVEKEKSQSLHPSSNGGPHATKKVQKNRNNYASVECGAKILAANPEAKSTSAILIENMDLYMLNPCSTKIWFVIELCEPIQVKQFDIANYELFSSTPKDFLVSISDSMVEEYEEIADSQYQSQELFDEDYDYPLDYNTVEDKSSKNLLGSATRNKSISENATATTEPKMTESTRVSTPVPSPEYVIKEVHTHDREPSTSDPPKESPIVQLVQEEEEEDSTVTLLGSGEQEDESSSWFESETHILCSELTSICCISSFSEYIYKWCSVRIALYRQRSRTVSKGKDFVPPQPSLLLPVESVEVSVPQPPSGDVDSENMEREAETVDLDDLSSVHQGHLINHTVDTIELEPSYPQTLSQSLLLDVTPEMNSLSKVEGSESVKSEGGYIPSQLMTQESSVEFDDKTEKKTESFSSAEKLSVIYETSKVNEVMDNTVKEDILSTEVVTKFPETVVPPPMNTATVPEGESVETKPSIADTLKHTVTPVMDPSLPEVKEDEQSPEDALLRGLQRTATDFYAELQNSTDLGYGNGNLVHGSNQKESVFMRLNNRIKALEVNMSLSGRYLEELSQRYRKQMEEMQKAFNKTIVKLQNTSRIAEEQDQRQTEAIHLLQAQLTNMTQLVSNLSATVAELKREVSDRQSYLVMSLVLCVVLGLMLCMQRCRTTSQFDGDYISKLPKSNQYPSPKRCFSSYDDMNLKRRTSFPLIRSKSLQFTGKEVDPNDLYIVEPLKFSPEKKKKRCKYKTEKIETIKPADPLHPIANGDIKGRKPFTNQRDFSNMGEVYHSSYKGPPSEGSSETSSQSEESYFCGISACTSLCNGQTQKTKTEKRALKRRRSKVQDQGKLIKALIQTKSGSLPSLHDIIKGNKEITVGAFGVTAVSGHI

SEQ ID NO: 620 - DNA, 100137 bp, Homo sapiens
  misc_feature (1)...(100137): n = A,T,C or G
tttgcattttttaattttaggcattagtgacattctgctatggaagttgagattttgctttttctccttttctctgaccaataaccccaaccagagacttataatctttcctatcccctcatcttcctgattatgattttacataatgattttgattaattttcagtgtatatattatgaagattatgtaaataccattcacagatgagcttttcttgcatagctctgttttctaaattatttttgttttttcttagttttctaagtgcttgctgctaaggtctgaatgtttgtgttcccccaaatttatatgtcaaaatcttacccttcaaagtggtagtatttggggatggggtctttgggatgtgattacatcatgagctcaaagccctcataagtaaggttagtatccttataaaagaggcccaagcccaagagagacttttcaccccttccaccctataacgacacagcaagaaagtgctgtctatgcatgagaaagtgggctctcatcacagtggtgagatattagactgatgccttgatcttagacctcccagcctccagaactgtcagaaataaatatctgttgtttataatctacccagtttatggtattttattatagcagcccaaacagactaagacagtatttctcacgaattctagtaacttttcacaattctgtacattagccctcgatatactcagatgcagtaggtattctattgatgtgattttcctgaagaggtctctcccagtgtcttccactgctgcaatcaggctgcctcctatgcctgatattcagttattatgctgggttcttcgttcactatcaccccagggattctcatcacctcttttctctgtattggattgcctgtttcctgtatcacatgactttctcttttttggattcttcccttgttttcgtagagcaagatctcctttcatgagaaatggcccacagcaggtaaatttcttgaggtcttgcttgtctcacaatgtctttattgtccctgacgattgatagtttagttgagcataaaattcttggttggaaataatcttcctacagtgtttgaaagacattattactccactatctttcgacttcctgtgtaaatgagaggtctgaaatggttctgattcctggttctttgtgtgtgtgatctatctttttctgctaattctaaaacttctgtgatctctttctctagtgtttccaaaatatcacagtgatgtgccttaatgtcgactgaggcacagtcccactgtgctaggcatttagactaggatgtataagtttcagtttggaaacttagatttttcaaatctaagaaaatatctggaaaaatatttattttctcacctctgttttctctcttttctttctagtgtatgtatactagacctcctggattagtctcctgtctttttggccactttctgatgatttctttgactttattttctaattcttctattgaattttttctttcttctttcatagctttgctttacaagaacttttttgatgattgttgctgttctcgacaggtccctttcttatagtatcctgctcctattacagggtggcagtatctggcaatgttagaattttttgtttctctctcaatgtatagtttttattattctccaaattgttttttgttttgttttcctatttatgaatattcatctccatctgtcatgtaagagcattttctcatgcctggtaatcattagttacctgttcctttttaagagtggagcactaaaatgctgactggatactctgagtacatggtaagggcttgactatgatcttccctgtagggtgaactagctgggaaaagtcagatatcagtcatcttttatttatttcctctggaatgatcagatttctcagagaagattcttccaatcctctccctagagagagagactggctgctgatgcagaaagacgcctgaggtctcagcttcaaatgtgtcctcattcatttcttcccgcaaaattgccattataaaaacttcaaacatacagaagagttgaaagaacagcacaacaactacccctgtatcctccatctatattcaacaattgttaacagtttgccatatctgttttcttcctctctaaacttttgaagctagggtgtcatcgtggacttcactcttaaatatttcggcatatatctcctcaaaaataagaacatttcctacataaccacatgtagtattgtcatatctaagaaaaaaataacaataatttttatcacttaatgcccagttcttattcaaatctccagttgtcacaaaaacgcacttacttttttgcatggtacccatgccgtaaactatgcttggcattcccaagtccagactttatctttttctcccctgataataaatctatagtcttttgctggggatggggtagggacagtcatctagccatgtagagttggggagggtatctgatagttcttaacttgcaatcacttcctaccaccacaagcaccaaacacacatacctttatattatttattattatattattattattattattattattattattattattgagacagggtcttgctctgttgcccaggctggagtgcagtggtgtgatctcagctcattgcaacctccacctcctgggctccagcgattgtcgtgcctcagcccctggagtagctgggtctacaggtgtgtgccactacgcctggctaatttttatattgttagtagagacggggttttgccatgttggccaggctggtctcgaactcttgaactcaagtgatccacccagcttggcctcccaaagtgctaggattacaggtgtcagccactgtgctgggccccaaacacatatacctttaatctcactgccagctggacttggtgctgctatttcctgaatgagctttttggggattctgcatgtcatattgaatcaattttgccatttctcattgctaaattaaggttcagttttctcatgtctgtctgtgttgaggttaaccatgttatttattgttcaaactaaaacacatttgaaggtactggggctcaggaaatgataccctaaagtatgaagccttggcatgctgagtattttgaactaaaggagattggaaggactcagaagcaaagtctctctgtgccctcctgtctcttgcctctccttccctgaggcaggtcatgaaaactagagctcctcttccccaaagctagtcataaaacccagaaatattactctaatcttctcctgcttttttgtgtagcagctggccataaagaagttatctgacctaccatgtctgatagtagattataggcctaccgtgtctgattgtagattataagactatcattccaaaagaggtcatgccctatacccagaaggaagaaatgctacacagagaggccaagaagaatctgaacagacagtctttgttgggttttcccctctcattttattaccattagacatgatcataccattagacaatatctactatcattatcataccctttttgtccagttacatttctacatggctgtccattcttcattgaatttaagcataaaaatggacagttttacctaggtctttgtgtgttcatttctgaagtttcctgtgtcaagtaaaactttttgattaagtaaatttgttatgcttctcctttgttaaccagtcttttgctataggagtgtcagccgtgactcttttttttttttttttgagacagagtctcgctctgtcgcccaggctggagtgcagtggcgcgatctcggctcactgcaagctccgcctcccgggttcacgccattctcctgcctcagcctcccgagtagctgggactacaggcgcccgccaccatgcccggctaattttttgtatttttagtagaggcggggtttcaccgtgttagccaggatggtctcgatctcctgacctcatgatccgcccgcctctgcctcccaaagtgctgggattacaggcgtgagccaccgcgcccagccccgtgactcttatgatgggtaaaaatatcacatcttttccacttctacaaaagtaaaagttggtactattattaattatgccaggattattaaaggtggtaaactaggcttgtcagatcagcatatcatcatgttaggaagcatttcttacttatctgctttccagcttcaagttttttttcttatggccctctcacctgatctcccatccttgcagcctgggtattaacaaacaaacagactcttttctgttgttttatggggttttgtgagtaaaagtaattgcatgtgtgcaatgaatatattatctttaccccaacttaattatcttgaactttgatcactttgtatttgtaccacattttgttattttaatgttcttgaatactttgtttcatagaaaataatatctctaatgctttttaaaaaaatccccacagtacctatagtgaagtattttatgtgtttaaaaaatacctgtttattttatttgattagagctcaccttcactatttcaaacacagaataccaaataagtgtcaagttattgacacttttagacaaaattagaaggcacataagggttgtaaaatagttttgaattcgattctagtgcttactgttccctatagctgaaataccttctcttcatatctctatgaaaatcatactcatttttaaagaaccacattatatctgcctcttttaagtctttgataatttcctcacaaaaaggtaatttccttttcctctaaaatcttgtgatactcacaattcatattatttgaggcatttattccatatatcttatgtatttcatttcccctagagcagtggctttcacattattttgactgtaactcactttaagacatatatttggcagggagtggtggctcactcctgtaatcccagcactttgggaggtagaggcaggcagatcacttgaggtcaggagttcaagaccagcctggccaacatggcaaaaccctgtctgtactaaaaatacaaaaatttgccaggcgtggtgatgtgtacctgtaagctactcctgccagctactccggaggctgaggcaggagaattgcttgaacctgggaggcagaggttgcagtgagccaagatcgtgccactgcactgcagcctgggtgacagagcaagaatctgtctcaaaacaaacaaacaaacaaacaaaaaacaaacaaaacaaaaaaatcccagacatatattttacattgcaacctagtatgcatatatgtatataacagtacacacacacgtatacacacatcacatatattactgaaataagattgccccacaaaaatacttcctcttgctgagacacactctgatattttctaaattattgtcttttagtttttaaaaagtgctgctggattccctcaagattcatttcttgactctctaatgaattgtgaccccacagtttaaaaaacattgctcttttgcaggacttcttagttgggatccatgtatataattcacaggtccatggagggaataataattatatctccattctcctaacctctactgaaatttagaatttgattttattgtgaatgtaggtaacaaactgtggtagtactggctgtatctacaactttgtcaccaatattaatcacagatgttttcatatcacattatgcatattgtaggtatcttggaatgtctcttatactcatcaccattttggaattattgacattaggagacctgctgttagaccttgttatttatgcattaatgaaaaagcacaccttattagatcacaaatttgctttgtaatattttaataactgtatttccctacaattagtttccttggtaatctatgtgttttattttatacctttataaacattctgaaaagggttttaccagactaccaaaagggttcagttcagaagattaagactccctgctagaacgctaaacttttcctggagcaaatttctgtctcagcatctttaatacaaaaaaggctcaataaatatttactgaacactttatttctccaggttacttagggtaactagaacctaggaaaatctattcagacataagtcaaataatgttatgctaaaaagctaatttggtaatttatagagaaagaaatagttggctaggtgctctagactagtcaactgcataaaacgttctcatcctaagggcttgctacttctaggaatttaaattataaggcaaattgtaatttaaggtgattagacaaagaaataagtaaaaagtaaaaaattatttcttgggcctctgtaataaaaaaagtcactgtgtgatatatatcaataaaacacgtgacctctctgcaataaggaatttattcactgcttggggagacaaatgactattaaataaaaacagtgtcatgagggcaggcacaggtgtttcaggtcataataaacagtgtggtctggtgagaaggttgagttatgaaagaaaacagtgggaaataaagcttgaactacatcaactgggtttgattatggaaagctttgaatgccaggccaaggaggcaggactttatttcacaaatacgtcagacctgtaggagatttttgcatcaaagaaaggacatgatgaagataatgttttaggaagcttcatctgagagcgttatacaggaggtactaaaggacgcatcagttacaatccccaacatgctgcttcagttgctactttctctccctattttgaatcttgtacttgtaaattcttgctagatacttccaccagaacctcaatactgtgcttccaaaaccatactagtctcttaaattgtaaatctgcaactcctgactttcctactcatataatggcacatacgttcttagaaattggaccatctttgatgtctccttctctgtcacccacatgtaatcattcccttcctctagttgattccattatgagcctattcaattcatgtatcttcaaaataaacatatgttaacgcagtgatagaagactgaatttgggatcacaaagtagaatttttaaaaagggaaatcttaccttttgttatttgcagtaaaaacagaaccgtgcatgccaacattgcactctgtgatcttcccgccctcagatcttcccgccctcaagagactgagttctcagactgtactaataaagcaatctatgtcttcttctgatttctacctttacctcctgaagtggccaaattaccagtgctctgttaaggtagattaggctaagtagttaaggctcttttcaggtaggtagtaactaaataaagaaggtatatgctattctacacacatatttatatatataaagaagatgatcggggggacagttttaaaagttctgtttatactttttatgcggttaaaatgttaagtgctgattgccacattcaccatttttccatcttatttagtctcttttattgtccatttgtctgttttccattccccaacctttctttgactgatttccaggaaacttctgttttaactgacttttactctggaagcatctaaatgtcattggtctctaagatcctttggagacatataggatctcagcattttgtaatattgaaaggagcaggtaatttttcaactaaatcaaaatacataaaagcttgctcatgaaataccaccatcttagacaacacagttctcttgggtgtcttaaatatgatttgtatatgagataaagaacaaacgagatagccagaaggggttggttccttttctaaggtctgcttgttctcttttaccataagcaaacagagtatctgatctttatcaaggcagggacttgagctgcccagagtttctggtttagtcacccttttaggaatgggagaactcatgttcattgtgcagtttaggccctagtgacttgctgaataatccaaggatctgcagggcaaacgagttatcctgtgtgtggtcagtgctttatagattttattgaattgggagattctgttacagcagggtttctcaaccttggcacttttgactttttggccaaataatttttgttgtggagggctttcttgtgcaccgtaggatgtgaaacagcatccctggcctctactcactagatgccagtagtacttctccaatgtgacaagcaaaaaatgtgttcacacaatgccaatttcaccctggggggaagtctgccccaggttgagaattactgtattatagttaaggggtggttgatagtggttacttagcctaagccttaaaagattatatatataattaaatattatatatgaaagattatacattatacatgctctttttctatattctttcttgccatttttggcatatgttatacttttaagtatggtgacattcatctatactagttttattttatataactattactcactttcttatacttgtctattgagttgtaagaaaattttctctgttctttttctcattatatttaacagatatgtggaaaaatgtctaccagttctttaaaggtcagctctatggaacttctatttatttcatctgaagtcttagaataggaaagaatcaacacaaatatagaaagtcacgtgaagaagctaatttatggggaaaatgagttcaattttgtgcaggtaaaattggaagtgatagaataatatgtccagcaactacttgaaaagaggatgggatataggtttaggagtcaacagtatagttgaaaattaaaattgctcaagagaaaaatggaaaaagctcggagtagtgaaggattaaaccttaacatgaaaccatggaaatgaagctgcaaaaagagaaaagaacatttatagattgaaatagtaaaagctaataattggatgataattaggtgaatggaaagcctaccacgggggtattaataaagctccaactgcaggagaaggaaggaaggaagggaggaaggcaggcaggcagtcaaggaaggaatgaaagagaaagaaaaaagtaaaattatttgtacttgcatgtttcaaaaaatcattgcagggacttggtggaaaataagtggatgggtttgtgagtttgggatgagagggttaggagatgtaacttgataacttcctagatttgagataagcacgtattctaatataacttctttggctgtgatgcactgaggatcagctgagggatacctcagctgtttcctatcctgaataaaagttcctggagtaagaggaaaagagtgtccaacatggtaaagaatgtcaatttatccctaccctttcattgcccctactttcttttaaacttgcatattaatcatttgatactgtttttgggtgagataaatacttgcttcccgcaataggtgacagatgaaaggattttattgtcatatactaagagtggcatcagcagataagtggaactgtacctaattactgccagaaaaggcagttcagggtgaactcctttaaaacaaaaattatcaccctttgtataatttctctaacatcaaattgacttatatccaagaatcacagagcggatcaaatcattcagttctttgggactataattaacatccaattcaacttagaaggttcataaggaaattccgcggctcaaaattaggcgttaggtgggcattttactgagggttttttccctacggccacatgaacaataagtaacccgtcctttaaacatttttcacactaaacattatgccatgttccaaggcacagaccattgcagcctccgtcccctcagcggcgtaaacacttggaatgggcatgctgccccgttacttagtattgagaagtggtcactttttgctcttcttaggtgagtgtaagcgactgccttccccactttaggtgaaccccaggacttggagcgtctgtgggtgctcctctaatggggacaactcctcccttccgactccatcgcagagaacccaaagttcgaaaccaacagaacgaaaagcaacgaagcacacttaaagtgaggaacccggcaagcggcgaaattcttgctgaagagaagaaaaagcgaaaggttttccgctgcaaccaatcagatgagaggattcttggcacgcccctttctatctaccaatcaacatctagctcaatggggcagtccattgccacagggaaagggcttggtgcagcttccctcacaacacacacgtcattctaggccattccacgaactgtgctcaaaagaggaaaacagtgcaacagttccaaagctgatcagtctcgtggtgagcagcgaaactatagacttctctaacaaaaccatggattctaggagggactgggaaagagaaaaacgaattctggaaggcaaactacaactcccaaaggcccttgcgcggactcagcgcgcgagggacgaagggcggtccactgtaaggggaaatgctgaggatcactgggctcctcccggctttctgaacgcaagccagcaagtgggcgggacctggggcgggcggagcggcgagagcatctgctcctgcgctttgtggtctcctgcctccggcttctccgcctgcgacgtcgaagggggcgtggcctgcgcagaggctggtgggggtgcgggcgccgcgggacttgggtgacgcgtccctttccagctcagcggtgtgtgaggtgtcgcggccccgccggcgattggctgttgagaggcgagtacgcggcggccgttggtcgctggcctcacggagcaaggcccccggcgggcggggaggatatggggcggcagtggcggctgcaggaggcgggcgtggacgagccggtggctgcagcggcggcggtccccggagtcctgtgaagcgcccctgtccgcgcctctgtggggccctcagagagggctgccaggacgcgagccactgaggagccgctcagccagcgccatagcccttaggactatcggtcacatcctcgcgctcctgctccggctcctccatcttggcctcggcagtggcggctgccgggaggatgtgccgccttctggcagggggaagaaggaggagaagatgaagaagcaccggcgggccttggccctggtctcctgcctctttctgtgctctctggtctggtgagtagccgcgacgacaagggagttcccgtgaggggagtaaatgggagggagcagcccaggtcacaccccctggtcattttggcttttagggtccgggtttccaaggcccccgtggaagggacaaaccgattacttctcgactctccatctgactggtctggtagtgctctgtgcggagattttcatggtgtattttggaatttacagagactcagtgggagagagagaggtgccaaggtagagggaaccaccaagtgcctttgtactcagttcctctaccccttggagacggtgcagggtttggggtgggtgttcagattgatggtaagtaagttgctccgatttgccgccagtctttgcgttcttagtgtggtaaggggataaagcacgtcggatgtgatgcgttccggacgtgcgattttaaaacgtgagtggtcatgaaggtaagagtaatgtataagcagtagttctcctggacatttctcgcacagcgtttgatcccaagtacactcgggccgctgtttttggaaacttggggggcgtgtgtgtatgtgtgttatgaagcactttttcaattggtttggtggagagggtgtcttagatgtagtgtgtgtagtagtttttggtaatgccccttagtgacgggaaggtaaatgctgtattttcaaggcgggaagagtgctttgtccctaaagcactccttaagttttacggagtttctgttaatcccaggcacttctggagttttttgaggagcagagaaagcttgtaagtcgagggactgctgtcaccgtacttggaaaagccattctttcctcccagggaatttcttcaaagatgtgtgacaattgatgactgaaaagatgcttcttcagtctaggcgatttgctgtttgttatattaaaatagaaattaagtttcctgttttgcttatttctgcaaagcaccaacactattttcatttttatggatgccttatggattccagaagcactgaaattgtagagttgttgctcacataaaataatacataaacaaggggaagagaaaacactcgcctggctgagggatttttattggaagaatgatagaagtttttgagaacaaaaacaattgacttattacctttcattctgaatccttttaatacccgtctcctgtttttaataaaatcctcccctttctacttactgtgttgggtacggagaagtgcctgtaagagataaatccactcacctcattttaaatttaaatttgtagatactgaagcttgtattcatttccatctctttctggggctgcctagttatatttgtagactgtgtattttctttcctctttcttcttggtcttgcccatctttaaaccatgttattcatcatcaaaagtttctgaaatggctaataaggaaaaggtgaacactttcattcaagtttaaaaacacaccagtatctctggcttttttaaattttttaattggatggtgtaaacgaaatcaagcaatagaatgtgattcttacaatcatttgtaaatttaagttaactctgcttctatttcttttgggaatttctggctatcttttgattaagctaaccctcagtatgttttctcaccttcaatcattagctctagtgaagagctaatgaatttccctgttagggaacaaatcggttggcctggtattgaaagtagtagtaataaacttctgtcaagttttttaactcctagtgaggaaaatggatgtggagagtttaagagtgtgaacattttaagaaactttagcttaagaaactattgggttagtatattttgagatttgtttagactgccaaatttagagacattttaattattctttagcaaaacgattaaaaggcattaaaataggacattaaggcttaaagggttttttaaagggtgatgatgatgaatgagattggggaagagaagtggtacctggtgctgattggcaaagggtatgttttttctttgaagcctctgcttttgtgccaagttggaattaatggcacttaatggatttctaacttttgctgcaatctggtgtggtatttcttttcccaacaacctcattccctttaacagaaatggctaccaacaagtcctagggttagataaaacgtttgcaagagttgatgagtgccttttagtagccacttttgtctcttttgttattcacaaattgtctcaaaattttgtgatccgtttctgttttgtacattgagtgctgtatgtctgttctacagtattctagtttctgaggtttcccctctcatgctaccaatattactgtgttatgtttactatcataattttgtagatcttgattatgtctcccctctgcttttgtcttgtagccttgagtactaaccttagattatgtttacagaaaaaccatttcatctatgtcattattaatttttgttgctgttttttccttttgcatagtttataatttttgatcaagtagtatagagtattctaggcataaatgcactatagctgcagcacagagcaatgatagctaatatttgctgacagctgtgtgtcagacacatgatgtttacttgacaataacacctttaatctttataagaaccctataagataggtattattattaacttccttttgcattttacatgtgaggaagtagagaggttaacttggctaagtttaagcagctgttaagcttcggagcttaaatttgaacctaggcagcacaggctcctgagtactttataggtcagaggcctgtattttatatatgtggctccatcatttactagatatgtgttctttgacttgttatgtaacttctttgaaccttagttgttatatcctcagaatggggaaattgatccattcatacttcacagggttgttaggaggatgaaataatacaaatgacagatctttgtaacacagtaacagcgtattatgtaaatatttcatcataacattattcaaccacattttgttctcatacctactgtgccagatgtttttatgagcaccgaaaatccaagatagagggtcaccagcttgtcttggttttaacactggaagtcgcataacctaggaattccctgcattagtttcttatgcctgctgtagcaaattgacacaaatttagtggcttgaacaacacacatttattaccttacaattctgtggatgagaagtccaagatatgtctcacagggctaaataaagttaagatgtcaactgggctcgttctttttggaggctctgaggggagaatctttttctagaggccacctgtattctgtggccccttcctcacatcagcactccaacccttttttcagtccttatgtctactaatgactggtcctcctgcctcttcctcttataaggactattgtgattacattgggtccagccagacattccaggataatctccctatctcataatccttaatttaatcacatctgcaaaatctcttttactatgtaaggtaacatatttagggattaggatgcagacatctttgaggggggcgcattattcagcctataccctataccatactccctcagtcctgggcaaactgggaaagctgcatcaccctaaagaggaaaaaaacataattagtggatattctgagtgtgtcccttaattagtaaaaccttgtgcatccaccttaattgtctataagttatgtacatgtgccaatatagtaatagtatattagtgtatgtaattaatgcaagttagatatttaagaaaaatgagaaaaaaataataatttctgttaacggtaccttttgttctcattaaaataataatttttagtgagagctatgtgattgacctactagattattttatgtcatagtatagaagaggaatagcttcaactacttaggagtcagccctgtcattttcttgttggctgtgcttgcattattaaattctttgcagtaatttttttaaaagctgcttcccgatgttgtgagggtcaattcagttaaaactgaataattcctaagtctacctaactggggaaacataaaccacagtgaatcatggtgtgctgtaagtaaaacccattgtttgtgggacttccactctttccctgggtttctgtatgaatccttacattaatcttagtaaaacttattttttaaaactaaacaaatctattcttccttcaccccaaaggatcatcttggagaagcttatatttagactttcgggaagagcttgacatttaaacaagtctcatacatttggcaaatataacaggtacttacaaaggtttttaggaacagcaaaggaagaattcatatcctacttgtggttctgtcactaactgtatgtctttggacaagttacttctgtgaacctcagctctcatccataaaatggtctgcaggatggatagttcacaatgagcgaattttgttgtaggcagagagaacacttacccagttatctagagcgtgagtgtatgtgaggagagatgggaagggaggctagagctaggttttgaaaggatttgattatcatgcagatgaattctaattctaaccacctgacagaggatgagtaagtgaagtggtttaaactggagaacaggagcatgaggtcacatggatcttttaattagattgctgtggagggtaaagtggaatgtaggggacgtactttggaggcacgaggtcctaagtcgtggtcccactagaagagagttgatatctaaatcaagatgttggcctttttgtccttagtagtaatttttctgagtatgtcagaccagtttttatcagtttaagaggtttatttcctggtttgtgattacatttctgtacccttttgctttttctctcatgattgctggtctattaatatacataagtgagcagaaaaaaatttaaaaactagaacaatatataagctgttttttcttttttgaggtgatgaatagagcatattggaaacatatcgataaaacattttgaaaattccccaggaaatctggaggaatttttttgcttgtttctgcttctgtctctaaactttaaaggtacggaatctatttcttttctgaataatatttgaaataaataaaataataaaacaatcccacttctccaaatcatttgatgccttttttttctttccttgaataaaccaatgaaagatgacctttacaaaaatgatttttttagtggaacttaatgtgaaagactgaggaaaaaaagtttatctttgctctaggatatatattctgaagaaagcacctggtatttttatttataagaggtgtcgggtcatacagtgtcagatcccttcagacaagttagatgaagccacttaataggaaaaggtctgtgaaagaaggtgtgtgacatctttgcataacacttgaacactgtgtccaataaaagacggcaaatgacgtgtttcatgttggtcctttatgttattaaacatttgaggatatactggaatggaagcaggcagtagggttgacaggcaatggaaaaaataaaaggtatcagctcttttgagtattggttatttcatttttcgtttgttcatgaacttgtacatcactctttcacttttctcaacagtctgaatggagaaaagaatcaatatgtataattaatattcttatgcttataatgaaagggaaacttataaaaatttaagtgctttattattctcaagtcatcttcaaatagaaacacctgtatgtacgtgatgcttttgtttagtagtttatacataactggaaagagatgaaatctcttgaaacttatctacatgttttagattatactttagtgccagttgtatgttatgtttttcaaggccatattttagactaatttaaaagtcaaattgtacatgtcacaagggaataggaaattgcttttgaatatttgcagtataagagtgttaatcctttgggatgaatttgtttaataaatgcaagtttttttgaaagaagatttggttttatttaggactttataattaattgctagttaaaattattttatattttacatgaaagtgacacctggctgtatcagaaagtattctgtaacattaatacggttcataggtactaagctaattttgtattattatgtagcgtttgtaatctactggagaaaaaacatgtaaaggctaagaacagtgcctcactcgtagtaagcactactgtatgagttattcattgactctagctactttggtaatttgttgagtagaaataagatggcctaggtttcagagttaaaaatgggaatttataaatccacttaaatattatttgattattcacaatgtatttggtgtgatgaaggatacagaagaattgtgagacttgagctctgtatataagctgcttgttacaatacagatagtggtgtagtgtgaaaggcataaaactatgtcagagcttggttgtagttctttcttttcattgttaatatgaacatttattgagtgattatttctcttctaagtactaaatactattcagtgtaatatgcattaaattattttattctctgtatagatgttttaaggcagacactccattttaaagatgaagaaaggtgggcacaaagaagttaagttcttaacagcttgcccaagttcttacagccaggaagcaacagagccagaactaagaaggccaggttctaagcctgtgttctcttaaccggtatgctgtgctgccagttggctggtagatggtcttgggcaagtttcttcactttttctagttaataattttatctggcaaagtgtcagtttttttcatctgaaaatgtgggtgcctgtattagcctaggaaggaatggacattggaattgttcatgaaacttttaaaagaaatacgcatacctaggattcttaccttgtagattttgtcagtaagtttgtgatactcttttatgcattcaagtctgtattactgtattaggtgaactcagtttattttttatatgtctaacattctaagatacttgatttgaatgttaataaacaacacataaaactgaactgcatagtaagtgcttaagaggagaaaatgagggctagagttctcaaggaaggcttgacttgggtttaagggaaatgtgtggtttataaactctgcttctgtgcaaacaggagcttcatgagctgaaataagatgtactggtgttgataacatgaataatggctatttctttgtgtgtgcatgtgtatgtctgtctgcctgcttgcagtgggtagatggcacttaattgtcaaggagaaagagagttatgaatggaagagataatctagttgatatgggtaagagtggtagtaaacagaaaagcctgaggagaaagagagagatttcagagattgtggtagattttgcaaaccagtccaaagaattagataataaagattcagcaagaaaagtggtgttgtgagaacattattttgacataattgtgctagatttttttttagaggaaggagacttagaggggtgaatacaattggctttccacatccacagattcaaccaacctcaggttgaaaatatattttaaaaacaataaaaataacaatacaacaataaaaatacaaataaaaacaatgttgtataacagctatttacatagcatttacatagtgttaggttttaaatcacctctagatattatatgggaggatatgcatagatgttttaaatcacctctagatattttaaatcacctctagatacttatatggaaggatatgcatagatgttttaaatcatctctagatattttaaatcacctctagatatttatatgggaggatatgcataggtgatatgcaaatgccattttatgtaagagactggagcattctcagattttggtatcttcggatcctggatccaaccccttctggatcccaagggatgaccgggctaaaaagcccttggagtaattgaggcttgtcataagaaggacttcatcttggcagtagaaataaagaacagggtacaataaatagagatttttgaggaggtaaatgatttaattttgtgaaaggttggcaagctggcagtagtgcagtgcagtgcagcagataacagcattaggctaggattctaaataactggattttagtttgcctctaaccaaactctgttcaacatcccctttctgttgtccatctcaatgcaaagagatatttacttaggcttcagtgtgctgtatcctatacaggattctggtggacaaaacaaagtaactgccttcttggagcacactgtcactgagagtacattctagggcctaaaattatgaatctgtgaaataaagttcaatgagaaaagaaatgttaagcattttttgtttgttttctgtttgtttgcttgtttgttttaacttgggcaactagaagaattggtggtggtcaaaaagaagtggaagagttggcaaagggcttggaaggggaaggagctgttagttggaggtgaatggaatatccaagtggagacattttatgggcacttaaaaatgcagacttgaatgcagataaaatttggcctggagtgccaggcacggtggcttatgcctgtaatcccagcactttgggaggtcgaggcaggcggatcacctgaggtcaggagttcgagaccagcctgaccaacatggagaaaccccgtctctactaaaaaaaatagaaaattagccgggcatggtagcgcatgcctgtaatcccacctacttgggaggctgaggcaggagaatcacttgaacctaggagacggaggttgcggtgaaccaagatcgtgccattgcactccagcctggtcaacaagagcgaaactccgtctcaaaaaaaaagaaaaaaagttggctggagttatcctcgtaaagcagaggtccccagcccctgggctgcggaccagtactgctccgtggtctgttaggaccctgacctcacaacaggaggtgaacagcaggtgagtgagcattactgcctgagctccacctcctgtcagattagcagcagaattagattctcataggagcatgaaccctactatgaaccacacacgcgagggatctaggttgtgtactccttatgagaatctaatggccccccaccccatccatggcaaagtagtcttccatgaaactggtctctggtgccaaaaggttggggaccgctgtcatagagggaatcatttttgaaagagaacattggacttttgaaacagaataaagaaaggtgccaagcatagtaaagctctgaaagaaaggaggaaactggaaaggatagatggaaagagatttaaggaagtcatttaagtggtcaacaatataaaatgtcttagataagtttggagagcttgaaaactgagaaacttttcaaaagagggaagtgattgatagcttttgggagtggagaataatagaagatatttggagagctggtaggcatgaattccacacatttgtttggtagccaggagatgtagaagagtacataaaaaaaaaaaagttaacatgtagagtagcttcatacttgtatgctgcaacccattttacacagtgccactggatttgtcttacatgcagctttgattatgtcagtcccctgatgaaatatctttcaaaggctccttgaaggataaaactttaaaccttgataatttttaaatgcctgcagtctgacccacacttactgttgtagctttattttctgcttttcctaatagagactttgtttgagcatgactgatctgttggcctggtagtaatttatttgaggactatttttgtagtctctaattgaaaattaaggtaacaaaactactgtcacttgtgttttagaggctaaatacactgtacccaatttctgaaaatatattattatcaagtatagggcatgattatttccagcatcttagaggacaaattgtattggctgaatttctaatggtaggttataatggtaggatataaaaacagaacatatcacatttgtttactaagtgcttctctatgttggatcaatgaaattatgggccagtttagtgaaacaattttctaatagaatttgatatgtggaatattaagctaagaaaatttaagacccaatcctacatcagagtgaagttaaaagtcagaactactgaaatgcaaaggtttaattagaaacaggcactagaacatagaactttctcagctaagctgtacaattgcacgtgatttgactatggactgttgatgcagccaaatagaataaaaactgcaaggagaaagaggcccagtatgctcttacctattagcagatagaccaagcagaagagaagcaaccttaaaagagctccagactgatacgtggtttagaagaatatctgtcttttaataaaacattgtgatggagagaaactaggttgcttaagcaaaggcactagaggcctggtgatcttttggtcttgttttattaccagtgtttgaccaaaatggcttccacattattcacccatttcccacaagtttctcaatacttacaggatttcagtaaattttttcagatatccaggaagtaatattcaaaaactacaattttcactgataactttaaccatactgcgctaattgagtggctggcactatatttctgtacaagggattaactttgaatttatgtttaagaagcaattctttgttgcctagtttagttatttcttttaccacaaagtgttttctcattcttctttttaaagctctgaaaaagcttttctaaatcatagttcaaagtaggagctcaatagatcatcatgctggcaacagggcagtgtattctctgccttggagttgcttagtcttatgtgagaaacaaaaataaacagttaatttcatttcagtgtgtatgtgctcaggtagagatagccaaagggctgtgggaatttagagcgggccacccaccaaccccagattgtggaaatcaggaaaatgttttagacccttattagtttcttgccccaagagagaagaattataggtattgagttatgttttagatagtgggagtgggagcaggtacagaacattcttgaaagagggaacagcatgagccagagacatgagacagcacagtctgtgttcaaggaactattacaggtagctctgtatcgctgaagcataaagtgaaaggcagggagagtgacaggaaatatgaagctgaagacttagtagaattttagagatttttaaatagcatgtggagagaagcttgagttttgtcatgtagttaatggagtctgtaaaaggtcttaagcaggggaatggtagtgtgataatttactgttagatttttggcagaggtgtgaatggttgatttgcagacgtagcaagttaggaattagggagatctgttaggaggttgctctaggtaagagataagggcttgagttaaggcagtcagaatggggattgagaaatgatttgaagaaatttagagtagaataaacaagatggtcaagggagggtgaaggcaaaggagtagtcacaggtgtttttcaggtttctagtttgaggactgggtagatagcagtaccagatggtgggatcaaggatataggaggaagagatttggaaaaggaagctaatgtattcaattttggatttagatgtttttgagataccttggaatatgaaggaagagagatgcaacttttaaatgagctttgtttatcctcaacattaaggtagggtatcacagaagggttttaaggaatggaccagttaggaaaagataagggctgaagataaagtttcagtagctgtcaactaaaaaccatgagagtacgtaagtctcctatgtagaatataaagggaagatttcagaaccaaacccttggagcatcagaatttaaatagtgaacagaagcagcatatcaaaggagactcagaaacaagagtcagtgtgagatgaaaagcagaagtgtgtaatttgacaagtcaaagaggagatggtttaagttaaaacagcagtcagaggtaccacatgcagcagggaaatcaaaaaaagctaacttctgccacaccatactagtctcagtggtacaatgaggacagaaactagatttcagcaggctgaggactaaatagaaggtgaaaacattgagattacaagtataaactactgtgaaatttgataagtgaaagtagacagaaaaggtagtggctgataataactgacatttcagcacatattctgtgccaggctaagcatagcatatacatttatttcagttcctcctaataagtcaattttacaatgttgatactgagttgaggcatataggctggcctgcctgccttccgtccttctgtccgtccgtccgtccttccttccttcctttcctttcctttcctttcctttctttcctggcagggtcttgctctgtcccccagtctggagtacagcagcatgatcaccactcaccgcagccttgacctccctgggaactggtgattttccttccacctcagcctcctgagtagctgggaccagaggtgtgcgccaccatgcctggctaatttttgtatgttttgtagagacggagttttgccttgttgcccaggctggtctctgactcctgatctcctcttaaatttgtccatactcttggattaaagtattaatctaatttttacaaataaggaaactgaagctcataagttgcccatcactcaccttgcaaacttagatctctctccaaattgttggatttttccatattgctacgtttcatgtttaatattttctagccaacagataaatgaaaagaaaggtaagaagataacactgttacattcactcaagaattggtgatactggtcaaagctagatacagcataatacaaaaataaaacaactatcacaaaggagaagttctgattaactacttcatgattttcgtagtggcaacaagtgataaatatgaaggccgtgtagtagtggctaagaggcgcaggcttcagagtcaaaaaaatccaagttttaacccccggtccctcacttattaattacaggatcttgaacaagtaataaaacctgtataggccaggcacagtggctcacacctgtaatcccagcactttgggaggccaaggcgggtggatcacttgaccccaggagttcgagactagcctgggcaacatggcaaaaccccatctcttccaaaaatacaaaaattagccagacattttggtgcttgcatgtagtcccagctattctggaggctgaggtggaaggatcacttgagcccgggaagggggaggccgcagtgagctgagattgcaccactgcaccccagcctgggtgatagagtgggaccctgtctcaaaataaattatgtacagcgaaatgcacagatcttaactgtatagttggatcagttttgacacatgcatacacctgtgtaactcacaccccctcaagatatagaatattctcatcaccctagaaagttctctcatgtccctttctggtgaatcccccagaggcaagtagtgatctgatttctgtcaccatggattagttttgccaattctggaacatcatctaaatggagttatacagtattagctcatgtgtttgacttcttttactcaatgtaatgtctgagatttacccattttgtttcctttgtcattaattagttcctttttattgctgagtagtagtacactgtatgaatgtactacagtttatttattcttctgttagtggttatctggactgcttccaggttttcgctattaggagtaaaaactactatggacattcttgtacaaggctttttgtagacatagttttcattgctgttgagaagtacctaaaagtagaattgcaactgctgaaacggatattatatgcttttcgatacaatatcctgagaaagtcacaacatcattataatatcctgagaaagacacaatgaaggattctgactgagaatacctaatctgaatctggtcatcatgatacatcagacaaatctcacataagaaccatattatttaaaaagaaaggggactgtagccttcaaaaatgttagtgccacataaaataaagctccagaactgttccaagttaaatgatactgaatagacatgacaaatgcaggacatgatcatagatttaattctgtactggagaaaggaattctaaaaaagacattggattaattgacaaaattgcaatgtggacagtaaatttttgtgtcaatgtaacatttactgaagttgatacctgtattgtagttatgcaagagaatatccctattctgtggaaatagatatcacagtattttagaggtaagttactgggagagagggaacagagggagagaggaaggatgagtgagcatgggcaaatgacaaataatggaacaaattaagtaaaatattaacaatggattgatacagctaaagcatttgtagatttttttttgtactatgctgcctactcttctgaaatttgaaattatttccaaataaaaaatttaaaaacggtttgaattttctcctgtgtgtgagaagttgatagatccattcaagtttatcagtctattatcagttttttccattccttatgccagttttgcaatgtttctagaaatttatccatttctcctgttttcaaatatattgttatatatagtttataatattttataattttaaaaatgtttcctctgtggttgttttttctttttattccatattgtgttaattcccattactatcttccctttattggttttgccagaagtttgtctaatactttcttcaaagaaccaacttttgattttcttaattttctttgctgttttttgttctctattttagcaatgcctatccatatatccttccttgtttctttgcatttgtactctcttttatctttttgagttgattagctcttttgttttcagcatttgtctcaatgtattcagaagcatagttttcctgctattgtcttatctacatcccaccaattgtgattggtagtcttctgctgattatttcataatattgtttcctctttaacctaaggattattttgctacatatttcttgcttccaggcttgggatattgttagctgtctttctgttatttcaaattttgttgcagcatggttggagaatataatcttttagagcttgagtttttggaatttgaggcttcttttgaggctttagtttactatcggtatttgggaaatgttccacgtgtccttgagaagaatgttttaatttatatgtggtataaaattctgtatctttgagcttcttacatggaatataaatatcattttgtccacttaatctgttattttgtgaggtaatttaaaatagaccaccatactttttgtttattctctttccacctgtagctttgccagtggttgtagtatattttctacattgttaggtgcatatatatttgtaattctttcttctttttactcatagataataaatcgctgtcttaataacataatgttttccatcttgtttggtttctatgttaattaaaatggctactttgttgttttcatattttcttaaaactgtatatacttactcaaatttttaaatgagttgaaaattacccctaatgtttcctaacataataattggtacttactgggtaatcttacatgcttgtaaagtttcttcattaaaactcagaggaaaacaattcatttgaaagtgacagactccagtttagttttattagccaagcctaataattgcagactccttctttgcaattattaggcttggctcatttgcatattagtatattctttattgcacattaatgtgtctttctggaattcattattgcattattttgctagatttgatagtatgataaaaaacaatggttaaagatagctggttcagtaattctgcattaggcagatataaaaagctgtcattgcaagccattggatatcatttttaaaaggtatttttttctcaatcactttcacattaaagaatgctttcttctgtaatgaaatttcccttggcacaataaagaatgttttctgctttcttaatgaaatcttccttggctcttcagttgctatattgtttggaaaatttttcctgagtccctctgctgttctttttagtaagaatgaattgatttctcttttaccctaatacttaacgattatttttttagacacatagttgtaacatacacccttaaaatggcaggatgcctagaagtattaaagatcgtaggttgccacaacaagaaaaacttgtcaccatacattcaagttgaaaaccttccttcagggaaaaaaaaaaaaaaatagaaatacagtttctaaaatgaaagcagtaggtttaagaaaagattaaatccccaaagtctgtcttttaaacctaggcattccatttcttctggtgttatttgggtgcttctgataaactaacctaggctgattgccctctattccttgtttacagctatcttcctgggatttgtctttctagtcaccctgggggtttcctttgcctctgttatctcagtatcatattgctgtaattactgtagtttcatatagatctagcccctcatataagaatattcttgactatttctggcttgttatataaaaagtctccctttttaccacctcagtatgtagttcaaactacccctatatattattttgaattgtgaaattgacactttttccaagtaaaaggattgtcaaatattggcaatttcaaacagttctacttactagaagatttcttgccaagtttctatctggacacgttattgtttctatcataaatgagtccttgttatggtttgagagagtgttgatttgcttcttaattttatacttgggaatataatttttatatctgggacttcttttaataggtgattcttttgaattttccaattatataaactcatctgcagttaatgcagatacactcattgtttggaactacagataattttactgtcttttccatttttatgcctcttttatcttcatgttttgtaatgctaatgaaaatggacattcttgtcttatttcagatctatataggtgtctttttaggtttcctcactaaatataatactgacttttagttttatgtattacatatgtattttccatgttaaatatataattattcctgtttcattattgattcttaaaacattgatggatgtataagtttatcagatgtttttcagtggctatggatataatcgtaacatatttttccttgatatttttgcatagcaaatcaagttgattttattatgttggactagttttgaatgtcagagcttaactctacttgataataattgtggtatatttctcctttggtatgttcctagagactttcttttttattgttttcttgataagttttgcatgttatttcataagtactattaacctctagtattcatttatgtatgtgctatttctgttagtttttgatatcactgttaggttctctatgcaaaaataatttggaagcttctatgcttttaaacagttgaggtaactttaggattatctgttcttaaatatttgttagaatttataagaactggtactttccgaggaggttagctatttgacagctttctgtgtaccttgtgtgataattatcagatactgcttctggtgaagactttcctgttgtaccttcatggaattcataatgtcttacttggaatgctgataataatgtttatgtttttcttatacgtattgattttcgtcattaaattgttaaaaggtattaggataggaaccatctgtctgtttatcgcctcaaattctagcccatatagaaatatgttgacttaacaacttttcttctttctttctctttctctttttctgtttgttggtggtggtgggtgttttacaggcttcccagctggcgtgtatgttgtaaagagagttcttcagcttcagcgtcatcatattactctcaagatgacaactgcgcactagaaaatgaagatgtacaattccagaaaaaggtgccttaaataaagttaacattataatttgtgtgtcagctttctgagagtgtctgaaaacattcagaataaaagtaatttcaaaaatgccatgccataatttttggtggagattcgtatttttctttgctattactcaggtaattcttaaattatgacggctcagagatatttatatgtttattcttgttgcttgtagttggaattttgtaacatccttagtcctgtagtatagggtagtgcatgttcagagagctgaaaatgagtgatttgtttttaatgatctataatagagtttttaaagaaaccccaattttgcaaatgagaactattagaagtgagtattccagggagaatctacagtcagtggctttgtagtttgttttatgtaattaggtgcagtaaatataaagactccaaaaaacctcatggtcttaaaacatgtattattttaccattctaaatgataaatggagagtattgacttgatttggcttttgcctttaacttcagtgtatttatttaaaattactgaagtaatttatattggtataaaatatttattatttatgtctcattcctttccccaaaggaacaacagtctactatttcttgtgaaaacgtttggaccttgttctgtgggtatagataacacctttatatttgcccacaaattaatatttttatttccatgaaaatatcatataaatatattacaaattgccatcccccttcccctccagtgatagctcatatatcatcttttcatgttgatatattctgaatggctgcattttaatcttgttatatagacattatttatcagttgttctttattgacaaacttttgcattttgttccctgccatgtgtgcacacatgtgggtgtgtgtatcaacacatacttacaattacatacttgagggttttttgggcatatttagagtggattatttaaatttaagttatgttggatatatttctgggatggagcatttaaaattttgaagacttgccgcatatctcaaaaaaaactataattttatattttcacccacacagtatataagattttgatttaatcccccttttgatgaagcattttgcaaacaaatgtcataaaagtgaatttaagcaaagcattaagggggaaagcatgttctttcagtaaacatttagatacctagtatgagctagataggctcaggtaaacaaagattgaatatgaacttttatgaaaattacactctagaaggcataaaggtattagaaattctaacttgaatgtatgtcaaaaaagagatgaaagaaagagctttatgtatcttcatttgtcaggtattcattggagttttactaggtgcttacaacggtgctggatggtaagactaaaatgcttattaagaaatcaaatgaagttcttgaactggtgtattgcacattttaaatgttgtagcaatgaggggattcaaggaaatagacaataatcttgtatacaaatgaaattaattagagtcaaataaacaaggcagttttttggttttaaagtatggaaaaaaaccatcttcgtattgctttataactgttttgtaaaacagttttatcaggtgatttttgttgttgttgttatataggatgaaagagagggacctatcaatgccgaatcattgggaaaatcaggttcaaatttacctatttctccaaaagaacataaattaaaagatgattctattgtggatgtacaagtaagctatgtcgctttgattttcaataatatgtcatttcaaactactttacaagattgaaaacctttggtcaccatattgtgtgtgtattgttagttttttcactttgaggtactctgtaactggacttaagattacttacctgctaatagtactacttttgagaacatgtaaaattacagataataataaatgtgactagtctcttggtagtaaaagtttgagtataaatcctcatttcttcctcggttctattttggttcattatgatgtatcttgtctcttcagattttcagttgttaagaaatttttttctaacctgaatcacttggaacaaaagggagtatttttatgtagaacacagagtattttgataaccaggatttccacttattgtgggtatgaatagataatagatcaaaatatgttttttccctttttctctcatattacattctgaatattgtttattttgtgcaccagactttatgaaaaatactaaaaactagaatatatacaccataaactgatcagaatgctgaggtatctggaaaccatgtaatatcagtaatggctgaaggtactggggatattttatctgtaggcagaaggactaaggaaaaactaaaatctcgaatattaaaaaaagaacacacatttcaactcagaatgagggagaattctttctttttaaaaaaatacagccttggctaatttttttttcattttttattttttaaccttgtactttttgcaagagccagggctattttataacttactgagttatctaaagcaatagaattagtttcattttattggattctggaagacatttgtcaagggtttatgcataggagtaagagaaaaatgatacttgtagcccttacaattgtatgactatcctgaacactcctaccgttattcataaaacttttattatgatgtagttgtgctcaaatacttccgagtgcttaccatgtcttgtatacctatgttgttcattacagtagccactagccacatgtggccattaagcacttgaaatgcggctagtccaaattgaaatttactgtaagtgtaaaatacacattggattttgaagacttaattaaaaaatagcatgtaggccgggcacagtggatcacctgaggtcaggagttcgagaccagcctggccaacatggtgaaaccctgtctctaccaaaaatacaaaaattagccaggtgtggtggtgcacgcctatagtctcagctactcaggaggctgaggcaggagaattgcttgaacccaggaggcggaggttgcagtgagccgagatcatgccactgcactccagcctggggcaacagagtgagactctgtctcaaaaaaaaaaaaaaaagcatgtaaagtatctcattaatttttaaattttgaatacatgttcatatggtaatatagtatttgataataaggcagtagtcattttctcaaggcctccatcataaaaatgcagatgactatttatatttttttgtgaatttctcggtgtaaataattccccaaatgatcatactttatattctccggactgcgtgcctcgatgtttgtttgtgctcttgtactggccctccttttctttaatgcctagctcttctaattcatcatagtccttagtttctttttccttgagctgaacatgagtacctctcacttgatattcatttattgagcatttaaacacctactgtgcgctagatactgtgctagacactgggaatatgaggatcaagagaacatagttcttactgaggacatttatggtatagttgaagaagagagggagacatgaataatggcaattgagttgttatagatgcagtgataaaagtgtacagagaacactggaggcataggggaaagggagtagttaattctgtttagggttgatcttggaggaggaggtgctgatagaggttttcaaatatgaacaggtgttaggtagatttcacattgtgttttggaggactgaaaggcccaggtcattcaagactgaaggagcagtaagaatcatttattgcttcatggtgttacttgaacatatcttatatcgttgcttattgatacacattatttcctaaactgctcagggtcaagaactatgtattgtactgttttgtacatgtccatagggtttctttgttgctactatcattcatcaattagagaagagggaaatctctgtaggtcctgatgcaaagtaggaaataggtagggagaaagtgctttcctagtttatgaaatgccatgaaaaatgcttagggcctgtattttcatatgaaatgcattccttagggcggtaatattggaagaaaggatttttataaaagtactttttttagtgaacattgtttatattgtcatttttcagaaatgctttccataaatgcccgttctgctaaagagatgttatattaatctcaacatttaatttagctgacttgtttttttaaacagaatacagagtcaaaaaagttaagtccaccggtggtggagacactccctacagttgatttgcatgaagagtcttccaatgcagttgtggacagtgaaactgttgaaaatatttccagctcatctacctcagaaatcactccaatctcaaagcttgagtaagttgttacaaaaaacaaacacaaaaaagaatctccttagttagtgatagaaaaatttccttaaaagataaagcagcttgatactcaagtttgaagtttaggctatatagcagacctaaattacagtgcttgtgttttgtgtgcgtatgtgtgcatgcgtttgtgtgttttgaatgtaatgattttataacaagtttatttagctaactaactcaatgaagctgatagatcccagatatgaaatctctatatagtctgagcaaagtaaggttctacttaggaaacagtgcttatttgaattgaattccctataattatcaactcaaatgtcaggttattcatttccattaagtatcactgtcatttcattcatttttatgtcttcgtgtgaatcgctaactttttcaaactcgataataaatattcagagtgtttaggtttaagtgatccttaatttagaaaatttgttatgtacttctcctagcttcttcctgcagcagtccaaagaacaaaacaaaatgtccttctcttaatactacattaagcatttcctttatcaaatgagttgacataaataaagtgcaagaagaataactggtacataactcaagaatgtaagggcctgggttgaaggagttgcacaagatattatggttaccatttagaagcttgtctcagtatgggccagggaacagaagacatgttgagaaataatgatagtatttaaacttttaaatttaaatgattcagaaggaatttaaggctagatactatatatctgaagagtgaatgttatactcccattatattaaaaatgactggttaatgaaatggaggtgaggcagggaaaaataggaaggtttatattttaaaaacgaaattctaagaacaccttaaaattttagtgaaatgtcttgagataatgacttttgaaggatgccataagtaacaactttaatgctggtagaattagtatagtaatgatggaaattaaactttagagaagatacattgagaataagtaatttttaaaaatcttatttttgaaagaccaaatattaacctcatatttggtaagtagttatttagaagctgaggacaataacagatcaagtcagcaattgactttacatgatttaaaattttctttctttggtttacattatgttttggaaatcactaatagtgtttttaatgtatattacctcaagtttatttaattaccagattatgtttcttgtttctttttttagtgaaatagaaaaatctggtactattccgatagccaaaccaagtgaaactgagcagtctgaaactgattgtgatgttggtgaggcccttgatgctagtgctccaattgaacaaccttcctttgtcagtccacctgacaggtgggtaggagcagttgtttgtccttcttatgattctgtaataacagcagtgtcctgtttgaatggactttggtgtatgttaaattccactttgattgagagaaagctgatctctttgtgtttcttccttggtttactttgtgcatgagttcaaagaatttagattgtatagaatttgttatccagtaaaatctgtttatttaatatatcttttggttttaaacagccttgttggccagcatatagaaaatgtatcatcttcacatggtaaaggaaagataacaaaatcagaatttgaatcaaaagtttcagcaagtgaacagggcggtggtgatccaaaatctgcattgaatgcttcagataatttaaaaaatgaggtaggtatataacttgcactatctcttacttctttatgtaatgcatttttgttattagctaagcttataataatttgctaactatatttgtcataaaatcagggagattaagtagacaataacatgtggaactaacacgaactgtgctccctgagagcaagtgattctgtttccattatagtgtttatcacataaagttgtttcaagtgtgaactctctctggttatatattattaaatgattttgtgccacccacagctgtttgatagcagatacataaagtccttatttaatcatcttcttagaaagctatctagaagaaggtatgactaattacatttaattatcttcagaatacaagttaataatacaagattaaatttaggctcttcagtcagaactattttaatggaacattttacctttcattatttgtgtgcaaaatacaaccagaccaccttatattttagagtgtgattcttataattaaggcagggcttatcacagtggaacagttttactttcttttctccttctgagttctaccttgacttcatgcactgtagaatttcttgaagtagtatcaacacagcaatttaaacttccctcaggtaagcaataactaagttacagagatgaagtatattccataaacttaacaaaaacaaaaataaatagggtccatgagtagttcagtgtgctgactaccacatccatatttattcctctttaatttggggatcttttgttctctgctttctttttcacgtattttcagtgaatcttcacttacgactaactaaacttcattctggagactttcactatcacgggaccaactgttttgacgatgtttcttacaaatataggagctcaggatttcatagtctaacatcttgaaggaactacttttctcagtgataccaaatcacgcatatgttaaagtttagttgtcagatatcacatccatgaataaaattagacaaacgttaaaacacatctttgaaggtatttataataatgtcaaatgtaaaattcaagcatggcagctaactttgtcctagatttgcttgttctccttagcagactgaaatttctttattaccttagagacttaaactgtttgtgagtctatgctaatcggcaaaagagtagaattttaattaactgtattaattactttctaaatgaattagtatcccagaaaaatcatgacagataatgagcacattatgagtaatagccaatagttttatgtagtatctacttcagaataactctgtcccgttaagtttgtgtgagtgggagagaatttgctttctgatgccttgtgctagcctcttatttcaaggatctgtgagacactgattgccgtacttatacagagaatgctttccaaactgattttgttgtattgtttatagacagtgcattacaaagtgatttttattgtatttgttctcttatttgttgctaggaggatatagtgatttctttggctgggcttcaaagggtaaatgtatgttctttttgttgcagtttttgtatttgagctttactttgttagtatctcagctaggtaaatttttataagtgtatgtttcttgtttattttctcaatgtatctgatgcaggacaggcaagccccaaaattagtgcttagcccgggagggttcttggcttagcccaggaaagaattcaagggcaagccagtggtattaaacagcgactttaattgaagcggcagtgtacagcagcagcagcagaggtaatgctctttgtggagtagggctaccccataagcattgtgcccagaatagcagctcagaagcagttctgcagtcatgcttatatacaattttaattatatgcaaattaaagggtagtttatgcagaaatttctagggaaaaggtggtaacttctgggttgtcaggcagttgttatgggaaggggtagtaacttttgggtgttgccatggaaagaggtggtaacttccaggtgttgctgtggcagtggtaaacagacatagcacattggtgggcttggcttacagaaatttgcttccgtctgggacctgttttagctggtactcaatttgatctgatgtccaagacccgcctccagaattgaatcccaccttcccacctcattcctccctcagagattagatactcctccttaatcttaagaaggctgcacaaggacagagatccatcttctgtaactgcttcctgctgagtttacagtgtaggccctgtctagcaccagatgagtgaaaatctttggataactgataggggcccagagacaggatgagttggaagccttgtgctaacgttatctttacctggaactgttgtaatctaagacaaaactttgctaagaggttaaacgagcaaggaccaaaaattagtaacaagacagccttcaaaggtcccagaagaggtaggtaaaagccagttgagacttgcgaaggcagttttgatagttgaccagctgtagttgcaatgagtgccctggttatatctgtaaccaggtagtttactcatagatcttttgaatgttaatctcaacctgtctggagttgttcatataggtgcagcaggttttattaataactgcacatactctaccttgttcagctagtaaatagtccagtgctagtctgttattgagaaatacatttgccaaagagtctagggactcttgaattctctttagtgcatgacctgtgttggtggctaaggattctagggtttgagtcaagttgtttagggttcactttaagcaaagccacccaagggtactgctgccctgattcctgccagaattaatcctattgctcatttacttctggtgttactatgactgtgatccctgaaggggcaagagtggctaacatgtattcacctcagttccaagttttgatacataagggaaagctactcctaaaagagaagatgttgacttttaactattcagaattaaaaaacaaaaaacagatgactacctggggagtcaggagtggttatggggtgtaacttcttcccattcatggccacaaagaaaaatgagctgaattggggcacaaatggagaccctatggggtgtgatctttattctttgttgccaacttgagtctatagagatactttccccctattctaatgggggtagttgaacaatctttgttttctgaaagagggtggcaccgccaccttcccagactagatagttgtttttcccctgtatattctaatccaggagaagccaccatgtatggtctccttgctttcaagtggaatcccatttacctcactgcagcattggtatcttggcagctagagttgtattcagagcattgcagggaaacttctgctttagtgtcattagcacaaaagatgcagaaggtaggatcatgagtgcactggaggtatacatacccaacttcccaggtccaggtaatggtggggaggttcaggtggatttcattcagtggggggagttcattccacttatcaagtaagggtttgggtatttcaggattgctgtggttagttaggaggtctgtgggggatgtttgtgagattttttggataagtcagaagattgaaatctttatcctggggatgttgatgacgaatctagcaaccatgaaggtggtgccctgatgctataatttttgaaatatttactgtagaattatgtttctacccacaccagctcagggtaattgggagagcaaacaagattaatagtgacaacatgatatctgcggttgggccttagcatggcctctacacccaataaggacaagagaggtgtttcctaggaggttggctaaagtgatcgaaaagaagtattacactattttgctcccccagtgctcaaaagggttcaaggaccaatgagtacccactcacctctactcttgtctggcccagaacatcccctggctacaagtcccctgactccaagtcccctggccacagggttcccaccaagggacacaatggacctggggcaggcagcatactacctcagcattggcacaggagaaaataaaatctttgccattaacattgcatccagcaccttctgacaacaaggaggaatacaaaacaaaaatcaaaatctgtagccccccaacagactgaacagatgctcccttcctggccaaagggaatggatttgggcaggcacctaccagccccccaaacacttctaagcaatatcagagtcaaaaccaaaagccaaaataagttacacatcaataaaaaaacaacagcatagaattaagctatactggaggaaaacactgctcccacagacctctctctaagactaaacattttagcctcaggtcacaacagcagttgtagctggaggagaaaaactcacaggagctcacaaaaaaagctaaaagagttaaatgaatctgagaagctttcaaaagaatagattacaagattgaaaagcaaaatttctggtaatttagcaaattaacattttaagaaaattgggttttaacattttttttttttttttttttattttgagatggagtcttgctctgttgccaatctggagtgcagtggtgcgatctctgctcactgcaacctccgcctcccgggttcaagtgattctcttgcctcagcctcccatagctgggactacaggcgtgcaccaccatgcccatctaatttttgtatttttagtagagatggggtttcaccatgttggccatggccaggatggtcttgatctcttgacctcgtgatcacccgccttggccttccaaagtgctgggattaacaggtgtgagccagtgcacccagttagaccattctttagaaagtgtattgtaaacaatttccttttaattataccaagtttaatcatacacaaaatttctttttataaaagtctcctttatgaaccttgtcacgacataacacagaccctccacaacatgcttgaattttcttacttgtctgatatggtttagctctgtgtcgccacccaaacctcatgttgagttgtaatccccacgttagaggagcggccagatgggaggtgattgaattgtgggggtggaatttccccttgctgttcttgtgatagtgacttctcacaagatctagtttaaaagtgtgtagtgcttaccccttcactctcttcctcctgcactgccatgtaaagaaggtacttgcttcccctttgcccttctgctgtgattgtaagtttcctgaggcctccctaaccatgcttcctgtacaacctaagaaactgtgagtcaattaaaaattaaacctcttttcttcgtaaaacacctagtctcaaatagttctttatagcagtgtaagaacagactaatatagaaaattggtaccagagaagtggggcattgttaaaaaggtacttgaaaatatggaagtgactttggaactgggaaatgggcagaggttggacagtttggagggctcagaagacaggaaggtaacagaaagtttggaacttcctagagacttgttgaatggttttgaccagaatactgatagtaatatggacagtgaaattcaggctgaggtggtttcagatggagatgaggaactcattgggaatttgagcagaggtgactcttgctgtgatttagcaaagagcctggtggcattgtgcctctgctttaaggatctgtgggactttgaacttgagagagatgatttagggtatctggcagaagaaatttctaggcagtaaagtattcaagatgtggcctggctacttctaaaagcctgtgctcatttgcataaacaaagaaatggcctaaaactggaacttatatttaaaacggaagcagagtataaaagtttggaaaatttgcagcctgacttgtggtagaaaagaaaaacccattcactggggagggattcaagcctgcagaaatttgcataagtagagaggagccaaatgttaatagccaagaaagtgggggaaatgcttttagggcatttcaggcaccttcatggcagcccctcccatcgcaggccaggagacctaagagggaaaaatggttgcgtgggccagtccccgggtcctgctgctctgtgcagcctccggacatggcaccctgcatcccagctgctccaacttcagctgtggttgaaaggggcaaaggtacagatcaggccattgcttcaaagggtgcaagccccgagcctttgcagcttccgtgtgatattgggcctatgagtgcaaaaagggcaggagttgaggtttgggaacttctgcctagatttcagaggatgtatgcaaatgtctggatgtccaggcagaagtctgctgcagggacagagccgtcatggagaacctctacaagagcagtgcagaggggaaatatggggtgggaacccccaatccccagcatccccactggagcactgcctaatggagctgtgagaagagggccaccatcctccagaccccagaatgttagatccaccaacagcttgcaccgtgcacctggaaaagtagcaggcactcaacaccagctcctgaaagcagttatgggggctctaccctgcagaaccacaggggtggagctgcccagggccttggtgatgaatgagttcttgcgtgatctggttgtttaaaagtgtgttgcacttcccccttcactctctttctcctgcgccaccatgtgtaaaaggtgcttgcttccccttcagtcttccaccatgattgtaagtttcctgaggccttctcaactgtgtttcctgtacagcctgcagaactgtgattcagttaaacttttttttttttttcataaattacccaatctcaggttgttctttacagcaatgtgagaatggactaatacgttgtcctatactacctctttcttgaataactggacattttactttaggacaaggatttactatgcaagatttctccctcatataaaattactctttttttatatcctttgcaaaacaaagagaaaacattttctatccataacattctttatgtctctcttttctacctaatggtttccttatattttgaacttcccttttagtaacttccaaattaaacaaaacattttttcccaataaaaaatacatttctttagcacattttatgtaaacctagcaagaaatcctgaactgcctaccagacattagaattttatagatgagaatcattttaccatttttagattttataccatacaataagctcagtctattctattctgttctgatctgttctgttctgttctgttctgttctattctattctcatgccattttaatcattttaaagcctatgcacataagtaatttacctaggaaagggttgccaaagtggagacttcagaggccctgacttgctggagaacctacctggtagtggagacactgagaaaataggtagccacttgttgactgctgtaggtggctgtccatttgaggtcaggagcctgtgaactcccaattcctttgaccaagaggggcagttacaagcaaagcagttataagacagctcccaagaaggagttgcaactcgctgttaggaaaataatacttctaactttaggacagaaaagggcaagactaatacttccctagggagaggggctataacccacagtcctaaaggaatgtcaatgccaaaaaccccagcgcatcttgggtgcagtctataataccaatgctgtaaacccagagtgcctgcatttcagccaacgagggtcccttcaccaatgccaaaaaccctagtgcaccccgggtgcagccaacagtgtcccatgactgagttgaggtcacagaatgtgactgtggtgtcccagagtcaacacactggggggacctctcacaactaagtgtcccaccttaaataattgccacacacagttgacagaaagttaaaagcaaacaataagactgcacacattttaggattgaaaatgaaatgactggtggaataatgaactagaagggcaaggaccagtggaagaggtgctcaggatgtgtttcagggcacactaacgatgggggcttttaactgaccacttagccaaaggcttttgttccctagcttacctgataattatggggggtggtagaggggacacacccatccacagaagccaaaatgtgactggtcttccacatgggatttgggtcttcatccaggttccctcatctagagtgggctcagctgctgcagtgggaggggcttgcacaggggctggtaacctactggtctgcctgtcagagcagtgggtcccatatgaggcagtggcattatggccacttgctcgtctgctcagctgtgctgtctgccagggaaaatgatgactctcaaaagagcttttgattagtgttagagctcaggttttacagctctgcttagttacctctctggtcatctcacctgctgccatgtcttgctgtcttgttttgttaactgctgtctctcattgtcccttgctgttttcttgctgtttctctgactgccatctctcattggctcttgccaatcaccttctctccatctctgctgttgcatcatcttgcctctcctccagtcactgccatctctgctttcttcatcccttcgtggtcaccagatgattcaggacagggaagcccccaaattggggattagcccaggaaggttcttggcttcacctaggaaagaattcaagggcaagctggtggtgttaaacagcaacttttattgaattgactgtatacagcagcagcagaagtactgctctttgaggaacagggctaccccacaggcagggtgcctagagcagcagctcagaggcagttctgcagtcatacccacttttaattatatgcaaattaaggggtggtttacgcagaaatttctaggaaaatggtggtaacttccaggttgctggatccttgtcatggaaaggggtggtaacttccaggtgttgccatggcagtgctaaactgacaaggcacgctggtgggcatgtcttacagaaactgctcctgacctgttttatgtgggcatgcatatggttcggtgtcagagccctgcctccggagtcaattgagtcctgtctccttccttatattcaaactagatttttattatctaattgaaaaaattaaattagtggtaatactagctcttttgtctttttctgccatgtattgttttaagtagccatacacttcatttagtaaatcaacttgttctgtaaagcactctaaggtggaagttggatggggaccaaattgctgtcttcctaaagggaggtttggaaatggctctacttcctttgaagaaaagaagaaatagtcccagaagttatggatatttcatgttagtgctcaaaagcatgctcttatgtagcaaatataaactaaatgagacttatattgtttaccagagtttcctatctaatagattttgtacacttctcaatatagtgttagtgaacacatcaaaactttgttttaggaatacagaaatgattcaataatggaataaatgtctgtattcattattcagtttaagaggaaaaaaagtcacaagattggatgcccttcctcagtattccttctcttgtcttcagatataaccactgtcttgaatttagtattttttttgtttagttttagagcttttcaaataagtataaataatatatattatatggcatagtttaatataaatgacattcttaagtaacattttattcaacattgttttgagatttgttcattgtttccactgctctgtttatagtgactactgcagttcatccattcctcatttaatggatatttaggttattatttttggtattaaaagcaatgctctaatgaacattcttatgcatatcttttggacacacatgagtgttttcacttagatttatacatggggtgtatttagggattatgcacatcttaatattgttaaattttaaactccttttagcatagatttctcttggctcaacagatatttcacacttggccacagactatcacactttaaactccattagatttgtataatttatgtcagcatgccccaacccccaggccacagaccagcaccagtccatggcctgttaggaaccaggcgcacgacaggtggtgagcagcaggtaagcaagcattatcgcctgaattctgcctcctgtcatatcagtggtggcattagaatcttatatgagtgtgaaccctattgtgaactgcacatgtgagggatctaggttgtgcactccttatgagaatctaatgccttatgatctaaggtggaacagttcatcccaaaaccatctccctgccccatccatgggaaaactgttttccatgaaactggtccctggtttcagaaaagttgtggaccactgatttatatgatatctcaggctttcatttggattccatgattattactgaaattgtatttctttttacaaatttattgattttattctttgcttcccacccaccccatccccttatttgatttgctgatactctttatacttaataataattctttgttgactgaatgtattgcagatacttctctcagtgtgtgacttattcgtccatgtcatttatggttaacctaaccaaatgtatcagcttttaaaaatgatttatgcattctgcatcttattaacatgatttataaagatttttaaattttcttctaaaatgtaaagttttgttttttcacatttagaatttttaatttgccttaaaatttttgtgtacacagtgtttctttttaaggatattgtggaaataatattaaaacatctaaaattatctagcttcctttaatggatgtattaacttatattttaaggtggatgcatggcaagtatacaatttattcatttgtacaggctatatatgagtaattgtttgctttagagttttataaattatttttttcaacgacctatgcttatatcacttaacaagtgaaggaacacatcctaaaaagaatgtttaaattatctcaagagaaattcaacttttaagtaaaccaaaacctttctttttacgttttttattttttcaaaatataatcattcattataaattggaactttaatttgacagaaacatttgtatttatttctaaaatttatttgtattatttgaaagttgaagtcttcttactttttggtgtttctttcagagctctgattatacaaaaccaggagacattgaccctacatcagtagcaagtcccaaagatccagaagatataccaacatttgatgaatggaagaagaaagttatggaagtagaaaaagaaaaaagtaaggaagtatttgagttctttaaattttttttttaagtatatggtgtagtttaatatgctttctttttttgattggtaaaacaaaataaaatttacttttgaaaactttttaaaggtgaaacttaaccaagttgctgttgatccatccatccatcatgtacctgtatataattacatacagttttagttttaattaaaatccattcttgtaaattattaagtgagcataaaataaggcatagcagtgattttcatcacaatacgaggaaaattgaggcatggaaactattttaaaattcatatggaactcaaaaagaacttgcataaaatccttgggtttaaaatattctttaacttaccaaaaggtgttttacatatgatgtttcaagaacatacctaaagaaaagcttgcttatgttatgaggcagaggagggtgactaaaattataatttattccctgtgtgatgggttattaggtgcagcacaccaccatggcacatgtttacctatgtaacaaacctgcacatcttgcgtgtgtaccccagagcttaaaaaaaaaacaataaaataatgtaagaaatacatccttaatagatgtttataatagatataaatacagaaagctttgattctcatggacaagcttcattttgtgagttatgttacttagacataagtaatgtagaattttgtagttaatttgttttggggggatattttaagctattgaggtggagcactttgatttttttatgaatttttaaaatattctctcaagtgttaaaacctattcttttctagaagacagcttattgctttggagatcagtgttgctagaggtattttcagtcataatcatcaaatatatatataaatatttataataacggtttgtctgcaggtcagtcgatgcatgcatcttctaatggaggttcacatgccaccaaaaaggtccagaaaaatcgaaataattatgcctcagtagaatgtggtgccaaaattctagcagctaatccagaagccaaggtaggtgtttaaatataaaattttgtatatataggaaattaacgactttttaaaatacaggttatttgtttactgggaactatattttaatgtgagatattttccttattcactaataaaagcagaatatgcttttcaaaacattatcttgtatgaattcttacttatattggctgatgtattttgccctgcattttttaacttttaaaaacccgtatgaaattttaaaaaggaaataactaaaatattatttttttctttaaagtaacaggcattgaattttaaatgtatcattgtaacactaatttaatgctgttgccgtgaatggtgaatcttagccacttttatgcttttttcccaagtgagtgttttaaagtcttaggtgtacttaagatctaaaaatacagaagtcccagaaaactttaaagttaaaataaatactttcttcattattccttaagtaatttgtttcctttcctctttttaaaatagagcacatctgctattcttatagaaaatatggatctttacatgttgaatccttgcagcactaaaatttggtgagttatacacaattttaaaaagtacattctacatatatatgcatattatgttaagcttttacattagggttacattgacatataataatttaataagcttttatgattgattagtgctgatactatgcaaaactgaggacaaaatgccttcctttccttttgaggaggtcacaaaaagcaaaaaatggcagatctggttaaacaattatgaaatggtataaaaagtactgttgaaagggtgttattgaaagagtgatgatgcgtaactgcaagaggagatgagagaaggcttcctggaagaggtaattcctgagctgaatcttgaaggattaataggaagtggcagatgaatgaggcagaggtattcaggaactgtaagaataaggggggtactgctgccatctcggcacactgcagcctccctgcctgattctcctgcctcagcctgcggagtgcctgcgattgcaggcgcgcgccaccacgcctgactggttttcgtatttttttggtggagacggggtttcgctgtgttggccgggctggtctccagctcctaactgcgagtgatccgccagcctcggcctcccgaggtgccgggattgcagacggagtctggttcactcagtgctcaatggtgcccaggctggagtgcagtggcctgatctcggctcgctacaacctccacctcccagccgcctgccttggcctcccaaagtgccaagattgcagcctgtgcccggccgccaccccgtctgggaagtgaggagagtctctgcctggccgcccatcgtctgggacgtgaggagcccctctgcctggctgcccagtctggaaagtgaggagcgtctctgcccggccgccatcccatctaggaagtgaggagcgcctcttccctgccgccatcccatctaggaagtgaggagcttctctgcccggccgcccatcgtctgagatgtggggagcgcctctgccccgccgccccgtctgggatgtgaggagcgcctctacccgggcgcgaccccgtctgggagttgaggaacgtctctgcccagccgccctgttcgagaagtgaggagaacccccgcccgggcaccgccccggccgaaaaattaggagcccgtccggcccgcagcccccccgtttggggaagttaggagcgtctctgcccgggagccaccccaatcctggaaggaaggtgggggggtgagccccatgcccggccagccgcccgtaatgggagggaggtgggggggtcagccccccgcccggccagccgccccgtccgggagggaggtgggggggtcagccccccgcccggccagccgccccgtccgggagggaggtggggggtcagcccccgcctggcaagccacccggtccgggaggtgaggggcgcctctgcccggccgcccctactgggaagtgaggagcccctctacccagccaccaccccgtttgggaggtgtacccaacagctcattgagaacggaccatgatgacaatggtggttttgtggaatagaaaggggggaagggcggggaaaggattgagaaatcggatggttgccatgtctgtgtggaaagaggtagacacgggagacttttcattttgttctgtactaagaaaaattcttctgccttgtgatcctgttgatcggtgaccctacccccaaccctgtgctccctgaaacatgtgctgtgtccactcagggttaaatggattaagggtggtgcaagatgtgctttgttaaacagatgcttgaaggcagcatgctcattaagagtcatcaccactccctaatctcaagtacccagggacacaaacactgcggaaggccgcagggtcctctgcataggaaaaccagagacctttgttcatttgtttatctgctgaccctccctccactattgtcctatgaccctgccaaatccccctctgtgagaaacacccaagaatgatcaataaaaaaaaaaaaaaaaaaaaaaaaaaaaagaataagggggcagtgctaaaaaggagtatgtttcttctgggtgactgttagatattacaagaagaaagatacaatgagagtaggggtggaacataagcctggagcattcgtttatctataagtaggccatccagtgctgtgtatacccagagtgttacatgtcatgggtatttattttccgccaatgccatgctatatgcagttttatattatgcacatggaaccatgcttttaattttttcctaagcagcaatatttttggcatctttccatgttaataaatgtaaatcttagcatcattttaaaaaaaaacagctttattggggtatagttgacatacaataaattgcatgtataataaactacatgtcaaagtgtataatttggtaagttttgacatttatgtatctgaagccatcaccacaataaagataacaaacatatccatcattcccaaaagtttcatcatacctctttgtaatttctctcaaactctcttcccccacagcaattacagatctgctttctgttactataaattagtttacagtctctagattttttatgtaaatgaaatgatagtttctggtaccagttttaatggctgcttagtatttcattgtctggatgaaccataatttgttaattctctttgctaaatatttaacttgatttccccccctgcccttatagactgtgtgtacttcgatatagcaaaatatatatacaaaggtggacatctgaagccttgaatccttaagataaatttctaagaactaaatcgaagactatgataactttttaagacaatgtatatgccaaactatcctctagactagtcattttacactatcactgtctgttcttaagaaagtcatcccttctccaagaatgagtgttatctaaaaaaggaatttttaaaaaaaaatgatggagcaaaatcaatattgttttatttacaggtcttttccccccactaatggtatcctttgggaagtatttaaagatgcttcttatagacaactaaggctacataccctcctcttaacattttaatgagtaactcttaatggtagtctaatttatggaaactgttaatgtcatatttaatatgaactgttattttgattggtttaagtaattgtcttttgttctttttgaaggtttgttattgaactttgtgaaccaattcaagtaaaacagcttgatattgcaaattatgaattattttcttctactcctaaagattttctggtttctatcagtgacaggtaaattctaaagctgtttctatagggtctatgttggatctctgaaaaaaagaaaaacaaaaaaacaaaaaagtgggtcacattttgacttcagtccatttattttttaaaggtcagtttgtaataacaacgataatacgactgtattgtaggctcttgttaatcacttaccttttaccttcattagctcatatgctttaaacataaccatatgatattattctcttataatgtggggaaacagaaaaggggagattaagtgccttgcccaggtcacatgacttgtgagttttagaaccaagattcagaactacaactctgacttcaaagtcctcacttgcagtcattatgctgtcttgtttctaaacatttcttttaaaagttgttaaaaacatacatgtgtaggtgctttatgaggtatatttttattaaaatatattctaaaactttttttgtacatgtgtgattataaaagaaataaatatatgttgtgaggaatttggaatagaactgcattttgtcaaccagagatagcccttattagcattttaatatatttcttccagtctttactatgcacttatttattaattctataaaaatatgtacttttacatcctggaaatactctttagtcttttacacgtatcatttttaatgtgtacacattattttttgttcaacagagatgtgaaatcatttcataaatactttttgagtgtccacgatatgccatgtaggatgctgtttctttatggaactgttattttgtcatttaatcattaagggttttccttggtgtttcttcctccacctcacactcagcactgcatatatacagtttttgaaatcggttctcaagacctcttgagaattctgttattctgccgctacccttgctcagttcacttctttttctctcagctgcaattttcttatatgtcaaatgaacatacacagctctgataagtaaagtgtatttttttaacgtggtgagagggctcattattttgaggagttcttataatgtttcagtaaacagatataatagttttagacttttatattaaataccaaagtctcctttaaaggggaatagatatgtcaaactcagatgtggttttaaaagttttttcttcccattctctttccaccagtacttgtatttatactttacattattacacacatgtcagtatgtgaagagctgtgccaccttcttccaagacagtctcttggtgactttctgttataaaacctcctcccaaaccccaagaagtggtactggtcctactttttgttaatggtgtgatttttcaaggcattctttcctggtaaagagaaacccgtcagttcagttggaaaagaaaatgtattaaatgtatgtatttatgtattaaactgttaagtcagcgtgttcacctggaaaggaaaaaaattatattttgaaaatatgatagaacctttcaatatgtggtttataatttttaaaaaagaacatattgcttatattttttagatatccaacaaataagtggattaagctgggtacttttcatggtagagatgagcggaatgtacagagtttccctttagatgaacagatgtatgcaaaatatgtcaaggtaatgtttacacatacaggactatgttctataatgaaaatatacgtgttattcacactttatacacctcatctttttagaaatcagaaaagttaagaaatagactacactataccacttaatagataattcttacttgggtatattatttcatgaatcaaatattgctacattcccttttgcattgctggaagcctaggccagttttttgttatttatggccctgataaaattccaaattataactatttaagttttttgagtctttatgcaaaatgtcatcttcatagtatatttctttctattttgaaactgaaatcattgctggtcactgaagtctttaaagcagatgtaatttcttgttagactctgattcttagaccatttcatctttaacgtccacttatttggcattgttacagcttttgtctttttctttgtatagccaaatgaaatattctgtgtccaagtaccaattgcaaataaaatagagttttaaacactggtgttttatatttccactgctgcttctaccaactaattaagtaaaattatcacttttgaattgggttagacaaaatagggaaaattcttactccttcctttcctcttttttttctttaaaattatagccataccttaaagtactattgaattaatattatgacatttttggaatggcagcagttctaatttctatcctttcttctttaaatgtgagaacttatagctacctaattttgtcttctgtgattttaccatctctttttaaagcatgttttaaattgacttctataaataggtaaacttgtagtattcttaatctcagtataaaaatgctaaattctatttttaaaataaagttgatattctcagttaattcaaaattattagttcaaaaaaattaaggaatgttttcaattccttctaaaatgagtactgaaacaattacttaattttttatacagtacactttcttcactctgaagaggcaaaaacgttaaaaatcatttgctaggtgataaaatcgtatttaattttggaaggatattttattggaaacataaagaatgccttataaaactttccaccttgttccttttatggtgggagattatacagcattttaaatattagttttataaaaaaccttctttggtagaattgagtctaaaggcaagaaacatttacttacagctcatgaaaagcagagaaaaattactttctgattttcattttatggtaataatgttatataagttttttacctggatgttccttatcttaaaataactacacccaaatctactactttttaatagcatacattcgaaaggccaattggtatatatcttccacttctgtaagttgtacttgaaataacatagcataccaaaaattcatactttccccgaaataagttgtatataatatacaagtataaatatcattccataatggactgttaccaatatgtatatgtgtagaatatatatgtatatgtgcatatatatcaatatataaattcatatatggatatatacttgatacatgtctgtaatacttaaagtaaaagattgtttctagatactgtttattaattgcttttagaatgctttctatctaacagctatataaaataacagcaatggcttgtagattagttaacttataaccttaaagttaatttatttcattgcaatcatttagattatactctcaggtagtgatggcaaaaatttaaatcattgcttttatttctgcaaggaattaagaatactacagtgttatccatcacatgacattactctctatactttatacaacataatttacaaatatttaaagatgcttattgcatgatgtctagactttggaactgatttctttttcttttcctttctcttgcttcagatgttcatcaagtacataaaggttagcaaccttctcttttgcactattaaataacagggcatggcgtattaatgcattacaaaaactttacaagtattgattttggggaaaataaggactttatagaaatgtttagaaatgttataatgaaaaaactgagtatattgttagataatcttacatgctctctgctggcttcccattttatgtgcttttattctttaggttgagttgctatcacattttggatcagagcacttttgtccattaagccttataaggtaatgcagaacaaaatacatttattgagtttttaaaaaaattgatatacaaaattttcgatatatttaaagtgaagaaataattttctcttacgtgagttaataccatagaaataaaaactgtgaaacctttcttttgaatgcattttggaaaaatgtcaaaatatcctcttttaaaaaaaaaacctcattttgtatatttgttttaacttgcttgctattttgctatgatgataatacacagaaacgttttagactgatatgaaaactcatccatttaaatgccttaaatagattagttttacattttaattgaaacagtagatgacttaaatgtaaggagcagccattatttttgagtccaaaagccagtggccctcaaaatatgaccaaagttgatgtttgtcatttattgtgaagagattagtcttaacgagtgttttgttttggaagtctttaatgaaattgttgttgatagggtatttggcactagcatggtggaagaatatgaagaaattgctgattcccagtatcactcagaacgccaggaactatttgatgaggactatggtaagtgacatcaaacagatgactgttaggtatattttttttactttttaaaaatcgaatagtaatgggggagtatagcttacttaaatcaatatgactgttgtcttcaggcttttgttttgttgtttttaactctaatcaacttttacttaaatctgttttctaatatgattgctttgtattcgtattgctttccaagcttatctatcacttatttgtaactgaaactcccttctataacattaatggtataaattatgattatatccctatgccagggccaaaaatctgttaaactcacaagatactgaaatagtagaaatgagctttaatgcctgtgatttcccatgagcctaagagcaagcacattttggcttcctgtgagccattgagaaatcctgtgactctaaagagttagaggaaagttttatgacactctccatttcctctttaagtccttattttaagatgtgttaaactattgtttgaacaatctaaattttctcaagagtgaaatgaagacattgactaagagttggtaaagtatattgaaagcttgaataaaaacgtcttataaatgtggttaaaattttggtaagcattacagttattttccttggtttatatttgtttgttaaatggtttcttaatcttacatgctttttgtgaacatgttttagatatatgattcatatttatcataaaatgttttaaatgtcagctgactttgacaggacataatttgagcttttaaatatgttaccattggagctagatctcagcataattacttttattttcgtttttaacagattatccactggattataatactggagaggataaatcctcaaaaaatcttcttggttctgctacaagtgagtattttgaggattttctattcattctactactttttcattctgacacacacagacattttgtcatggtatggttgaggagaattctcccagtgttgaactttgagttgaaataaaagatactgtcttttgaaaagtatttttatagaaatgcgataagaatatatgaaaagaaagaggagagagacaaatgcaatcgtaataaaggtgtttcttctactctaattaggcgctgacattttgggacagattccttatagtgaagaaagggctatggattttcttggggaaagaattattaaaacagtcataccacagttaatctatgggtatggttagtttgccatttagttacaaaatataaagggtgctcctaccatcatgataatgaataccaataagaatactagtaataatatactccttgtaaactaagaaacaatgaataagatatactggtgctttagtttgttgttattccaaagtcgaatcccaacctagtggtaggctcactaaggagactactagaaagaccattacctgactgacactttatttttcatggttagattctgtgtaggtatatttcaatgatgtttttgattatttctgaaaaatgtaaaattaactacaagtagttttctttttatttgaaaattattaatcaaatttaataaaaacaaatcttagtaaaatcgaagactagttgcgtgtgcttgtcactttttgctcttagtgaattgaattgttgaataccgatgtctgtgaacattgactttgtaagttttttagctattcaaccagtagtctaaatacttaggttgatattttgtgtagccacagtatatagagttaaaattacctctttcatctctccttctagccttttctttctttctttcctttcttttctttctcttcctgccttccttgccttccttgccttcttccccctccatagaagagtatagacctcagtggactttttaggggatgggaaaaagagtgttaaaaatacctgtagaaggaaaatcttttgtgattacaaagtaatattcaactttattacatatcagttcagtatattttgttttactttattgctaggcttctgactttctagatattagtgattacttttaaataggattcctagctatctagttattgatataaaaataagtcttattcactgctatgtgatgtattttttaggagtgaaagaaatgtcttatctgtctggatattaatgtttttgtttcccttaatttgcattttatatgttacatagtagtcattattctgccatttatgtagctcagtaatgttgaattagctctgaggaagcattattattttatggggtcagaaaatagccccagactaaaagatctctagcttctggtaggtactggaaaaaagaggacaccttaaggaaataatgtcttattgtagtttcagataaaggaaaagtgtgttgatattctggattttcttgctatatcttcctatgtggttaacttctagatgccattaaaacctaaccataggccaggcacagcggctcatgcttgtaatcccagtactttgggaggcctagataggcggatgacctgaggtcaggagtttgagaccagcctggccaacatggtgaaaccccatctctactaaaaatacaaaaattagccaagcatggtggcgtgcgcctataatcccagctactccagaggctgacgcaggagaatcgcttgaacccaggaggcggaggttgctgtgagttgagatcgcaccactgcactccagcctgggggacagagtgagactctgtctcaaaaacaaaacaaaacaaaacaaaacaaaaacctaatcatatatcaggggaagacatttccctgtttgtattcatgtctctgatcagtatatcaattaattagacatagaatcttgtttagatacttctgtttggatctttctccttgaaggtatatcacttaattttccttttacagatctctgggagggcaaggttatcttccagtgttctaggtattgaaagaatttatacagtgagataagatgggtgggaggatgtcagctgagtctctaaaatgagatttaaaatgatctccacctcctgaagttttagaacaagagaggcagtaagagctgagtgataagactttattgtcataaaactttatagacttggcctaacactgctgccttctgtatctgtgtccttctactcttctctgaagtttgggactgaattagctatagcctccaaggtggtataacttgaagaagtaaataataaagtggaatcagaacttcagtagttctgattcaaagaactggtctttggcacaagaatgtcttgagtttgactataatcatcactgctttctaaattagcttgaaattggcccattttgaaactagttttttttcttgtttttaatgtgtacatagtatccacaagctagaattgtctttaatcttaatagaaactccttttctttttgctctcaagtagttactagttataggaaatatgtcaccagaatactttgcctgtgctgagagttggatgtcaaagagcatccacactgcataaacattcttgatattatataatttacttaactactaaaaagggagaagctgttatcttagagcagcattcttggctttgtgtgtatggcttcctgattcttttgtttacattcttgaactaaaacatttaaatcttttacatcagcaagatttctccatatcactctgattttcttgttctttgtcatgtgaatttgccagacctctgcctactttgatattggcgcaggtctgcctttgctcttaaatatgtggttttggtttttgttaaaatcaccctatctgctaaagggagataggtgcatgtgcatgttgaagagaaaatgtagtttttacttctcaagtattttttgtggaaaaaaagtagatcctagaaggaccattttcctagaaaatgtgggcatgcttcagagatagtacacataggaggaagtctttttttgttggtttatcttctgttgtattatataaactcttcaacttcagcagcctggaaaaatgtttgttttctttatcaaaaagagacattggagcactgaagactgagtaaataatatggagatatttggtctttaggaccaaatattaggagcattttattcctaaaggaatgaggcgggatgaataagttgcccaattcaaaaatttaaaagttgactaatccaggagaaattagggatatttatctctagtttggcaattatattcaaagatgtcattttagtctattctgaaagttttttaatggccagataatcatggtgtatacaaactatcatgtgtttagatacaaattgaaaatagaatagaatattcacaattctgctttctctcaaaagacaaaaaagatacattaggcagtgttctgtaaacatgggaaaattattttaggttaaatgggctgagaagaaatttgctaaattttgcttttgttaccacgtttcctgaaatgatgataataaataatattttaaaagggtgaatagaaggatctttattgtaggtactggtgttaaaatttaggttcagaaataatactgtaaagctactttctttacacagattaacacatttatcttcttgaattatttaataatgaatgtcaaaaaattcgaaatctcatataagatctcactttgaaacaaagtatataaactgttgattgcacaatttgggttttgtgaagcagtcagttttgactataggtggcagtgtaggtggggcatcataaataatattgcagtattggttggcattataaagggtgtatgaggaaataacagtttccattccagacttcatcttggtttatgagggaatacggagtttccatttttgttatctcataccgcagcatctctttagcttaagtaagaattaaggccacttctgtttatcagtttgccaggtcaaagggcaatattaaaaatgttatttaaacattttaaaatggcaaatattgagcctttgtgtgttacagtaatgattagaaacaaagtaccactgctttgttgactttcagcgtatacactcataatttcgtgaagatcaacattatggctgattcctagctatcactttaaagcagtttgaaatctgctactatttctcccatcctgaagcatatatttacaggatgagctccaggcagcactctttggtttacttgcaaccttcctgatgtagtagatttttctctcttagatccttttctacttttcacatctctggttttcattgaaaatatgatgaatactctgtggatcgctttaggaagggagattaagacagaaataatgtatgatgattaatatgtagcccctgccagatcttagtattttaatagtaggagtatctgataccaaagaattaacttctagtggaatttcaaaggttagactgggaatgaaagttaatttcacttgaaattacatcacattactggaaggaaggtcttctattcccagtaccattttttatggagttctgatattttgttatgctcatgtataaatatatctatgtagatattgaggtttgtaccacttttttcatgtaaatatcctccttcaaaagagaagtagggttagcaggtatgcaaattgctttttacaacactttgttttatgaccttgacttttcattaatctgccccatacctgtccccagccaattaactaaagaatttgtatgctttatgatttaaaaagattgctgttttggtcaatgagttttttaaaagtcatcaaagagatttgattctatgcaatatcaatttagaatttaaccatattaccatagatatgataggctaatcattgaaaatgttttctgcttttttttggataatctctgttttgtttttacctgtgataatcacataatgtaggaaaagcatttgcttttttacacttttttaaaattttaaactgtagagaatttttaaagaaaaataggtttttctgtaaaataagaattttggtcatcacatttttttccctgtcccagtacagactgtatgttgagttatacttgagtttatagtatgctgaagacagtgttttggtaaagtgtctagggaagttttacaagaaaagtatatttaaggccaggcgcggtggctaacagctgtaatcctagcactttgagaggctgaggtgggcagatttcctcagctcaggagtttgagagcagcctgggcaacacagtgaaaccctgtctctactaaaatacaaaaaattagctggacgtggtggcatgtgcctgtagtcccagctactcgggaggctgaggcaggggaattgcttgaacctgggaggcagaggttgttgcagtgagccgagattgcaccactgcactccagcctgggcaacagagcaagactccgtctccaaaacgaaaagtatatttaaatataaaattccttttgaacataaaaatttagatacacactttacacttttggctaaaatttatttgtgtcctatattggactttagttgtgaggtgaatacaaaagtaaccagtcaaaaaatgcaaaagatcattctaaatgattttttgactatctgatattaatttatattagaatatttaggtatttggtactttttctgattgaattttgttttagatgccattctaaatatggtgaatattgctgctaatattctgggagcaaaaactgaagacctgacagaaggtacctaatcattttatgggtcttttaaatagctggtactccagggatccttatatttaggaaaatcaagtaatgagttaagaaaatttgattgtttacatttagaaatatagaaataattcagaggaacttaccaatctttattattcattgtttatttgaatttcacaagttctgttttataaaagaatactgtctatataaaacttatgaatttgccttttgacttctcctagctctaatattaatagcaatgattttattccttatctctttaccgagattttgatgtcctaatggtacttcaagtatgttattcttttatgtgttaaatagctacttgatttagaaagccatcttttccttagagaatggcagatgataatatttttggcaagaagaaacagtcttgcctttttgtttttttaaaaaatgcttagatccaagtgaacacttaaaatgactcatttatttcctctcatttaacaactctttcagtatctagaaggcatattaatcacgtaaggttacacaacattcatagtcacctgacttgatttaattatctgagaaattgagaaacgatatatattacttgtgatcttatatgatcatttcttcctaaaagaactttgattttttaagaaaaagtctgcagtagcaaacctatttggcttttttcttctcttccaagaaatttgttttagtaaaatattttcatggtacagcttttaaaattgaactcaacattgggcatctttcttaaaataggaaataaaagtatatctgagaatgccactgccacagctgcacctaaaatgcctgaatcaactcctgtttcaactcctgttccatctcctgagtaagttataatgtgatattaaatagaattttgttacaatggagagataagtatattagtataaaaaaaggaatttgtgatttgtgtgtgaaatgattacctgtagagagctctgaatcataggatagacattctgtggccacttagaaaatctgagttgcttcttcccattagtgtatatgcatactgggaatataattcagatcaaactttttttggggggggtattatatattactttcattattcacaacagtgactcttttccatactggaaataattgaccttactctgcaggtataggcttgaggacaaattttaaaggcccccccttttttttattaagttcaagtttaaaagcattgatctgtggtatccctagaaagctaccaaaatacctagagcagtggttcttgaataatgtatttgccacacagcaagctcttaactgttccatttctctgaatcatgtaggcctttccccaggttgcagtggggacactttgggcagggatgtatctaaataggtaatagatatatcttttaccttttttgtcttttctgccagaggtggttacttttgttggtacctctacttcttacctataataaataataagcttataatgatttggataatcaggtagttattgtagacttaatttatgtatatttcattagatacactccctacaaaactttgcaagtcctttatcttagaacaactctacttaaagagtataagatatttgaaatgaaccacttagttcaagatagtatgtaatgagacctgcagtgggtatgctttgaactgcaattcctgagaactatactatttcaaaaatgatattttgatgctttgaaaggcatagtgagaaaattatattatcctgtgttaatcctgaaagttactggagatatttattgggtaattagaaaatatagcgtatgtgttattgattctgaaaaggacctaagaaatctattggggatagagacattcttggtgtttctaattatgtggagctgtgattgctgttcctgattttgtaactaggtttcttcagttaacaacacgctatgtcgtatttttcaaaactaaataaaactgatttggttttttatatatatatgtacacactttcatacacatatgtgcacaagtagataggaatatttgttgaaagctgtagtcacaggctaacgtagcagtttttatttttccatattagttttttaatagatatttttgcataatttcttattcagtatttcttcatgtttgtcttaaattctttttaatgcttttgaagtaatcttttgaagcaaatatgtgaaaatgaaggaatccatgataggatgtcactgttaaagttacggaaagccaacttattttcttttcctaggttttagtaggttttgccatgtgaatttgagaaaaaacttttaaagtatatttctgattacagtgtgtatgatgggatataacatctgtattcagtattttttaccaaattcaatataatttttctctctccccttcttcagacattacttgtttttactgtcataaattatttggtagaaaagcaatatattacctgaatatgtaagaaatattattagagactaaatatatatggctataaatatctttttatttaccgaagtgtagtctaattatgttttaatttggtccatttactgttttactaccaaaatgaaagtctacatcatagatactattttattactttcttctgtctttgctattgtgacattagtctttatttgaagacatttcctggcatgcttagtaatttttcagaatgggaaaatgtgtgtttgagcataattatttttggtattgaaattaccatattttttcatattggactttttatgtataaggctacacccagtaattaactatctttatcttggaaggaatcacaagcattataatttataacactgtccccataagcttcatccccccactctcctgtatgccacatacatactccacagcctcaaaatgggatagaatattaatagtggcactagtagtttaatagcagcactgttagcatatcataagccagaattgttattaaagtggttaggtatttggcttagaagattagcctagatgatagcaaaattattttaggaagggagatatgtttcttgtccttaaagtagataatcctatgtgtgtaggtgtgtgtgtgcgttgtgtgtttaatgctgtattggagttcctcaaatcattcttagaaaaattatgtttgagaccaacctagctgccttttgaaaatagggtattcaagtacaaagtgcactcataaatattaagaatcctagattctagttttagctctggaccttatttaagctagtttattaagctagctcttagttggcttaatttctgatgtgtaagggatagtgaagcttgtaaagattcagtgaatatttatgagaggaaaggaacactacattcagtgaatggaagtattcacttagaaacaattcttaaacagattaaaagaaagcaagtttgatatggtaaatatggtggtttgagtcatctggctagtcacttgataaatagtatttctcttatcatttctgagcagtatttgtttttataataaaagtgttttgtaggtgaaacatttatccaaaaacaaatttcttctatatttccaaccttttatcttctgtatggatacatttatttttctttaacatatttcaactttagacttctaagtaagtgatttataattatgatatatgtatttctaggtatgtaaccactgaagtacacacacatgacatggagccgtcaacaccagatactccaaaagagagtcccattgtacagttagttcaagaggaggaagaggaggcaagtccatctacagtgacccttctgggcagcggtgaacaggaagatgaatcatcaccctggtttgagtcagagacacaaatattttgcagtgaactgaccacaatttgttgtatttctagtttttcagaatacatatataaatggtgttcagttagagttgctctttatcggcagcgcagccgaactgctttgagtaaaggaaaagattatcttgtgttagctcaaccacccttactacttcctgcggaatcagtagatgtttcagtattgcaacctctgagtggagaattggaaaatacgaatatagaaagggaagctgaaactgttgttctgggtgatttaagtagtagtatgcaccaggatgacttggtgaatcacactgtagatgcagttgaacttgaaccaagccattctcaaactctttctcagtctcttcttttagatattaccccagaaatcaatcccttgcctaaaatagaagtatctgagtctgttgaatatgaggcaggacatataccatcaccagtgattccccaagagagttctgttgagatcgataatgaaacagaacaaaagtctgagagctttagttctatagagaaaccatctattacctatgaaacaaataaagttaatgagttaatggataatattataaaagaagatgtgaactccatgcaaattttcacaaagctgtctgaaacaatagtgccaccaataaatacagccactgtacccgacaatgaagatggggaagccaaaatgaatatagctgacacagcaaagcaaactttgatttctgttgtggattcttcttcattacctgaagtaaaagaagaagaacagtctccagaagatgcccttttgagagggttacagaggacagctacagatttttatgctgaattgcaaaattctacagatctaggatatgctaatggaaatcttgtacatggatcaaaccaaaaggagtcagtatttatgagacttaataatcgtattaaagccttagaagttaacatgtctctcagtggtcgctatctggaggagcttagccaaaggtaagctttattatgaattagcacagtcagcttcacacagtgagttaagcagcatagagtatgacctgtgattacaggagaggatttaattatctcatgatataatagaggtaagcgcaattttagcaagagagagaaagaaagctacttgaatgctgatcagtgccttaatgaattgattttttgtttttaattttaaaagtactttccagtgacaaaacacttttattaggctggcaacaagtttgaattatctatactcactttcaccttttttcggttgcttaactttagccactttttctgcttgattcccagagggctcatggaaaaaaatgatagtatatagaccttaaagcttttagtggaatttgaccagatatcacttaagagtttagataagtgaagacagagatggactgaactggatgattgggcacatttgcagtttgctctcttttaaacaggtctcggcatcctagttctagttgtaataatttctgcttttaagtgccagagacagtgccaattcattaagacaccaggcctggctttttaaacctatttactcttttttttatcctctgtgtgtccattgtctgtccttagggcttctctaccaacgttttgcaaacatctaggcacaagtgtccagagttcctgaaacaccaccttttcttacatctcttaaattgaaatgccactaataaggtgtcaccaaggcagtcttatatctgaagtaggaaatttttctaatccatacatagaattaattggctaatcatgtgtgtgtgtgtgttcatgtgtaacatgcccacttagctaccccatacctgctcttacttttccctacctccatctgcatcccaagggaaccacagaaattactaaattttacatagcagaagataaatagaattgtattgcataggcctgaataagagtcactttcagaaaaatagatttgtctcatatatcaaaatcagaagtatgtttccattactaagtggaataagtaagaaattaaagctgatttagaccaattcttacttcataggtaccgaaaacaaatggaagaaatgcaaaaggctttcaataaaacaatcgtgaaacttcagaatacttcaagaatagcagaggagcaggttggtttctacatcccttatttactttttatataaatttccactgaattctgtagggtctcactggtaaacagtaagtattgtagtttcactttttccccctgctagctggtgtttaagcctgttatattaatgtgatgtcatgtttggaaagttacatagctattagcatcattatcttctgtagagaaagatttgtttaattttttttttaattatacttttaagttctagggtacatgtgtacaacgtgcaagtttgttacatatgtatacaagtgccatgttggtgtgctgctgctgtacccattaactcgtcatttatattaggtatatctcctaatgctatccctcccccctccccccaccccacaacaggccctggtgtgtgatgttccccaccctgtgtccaagtattctcattgttcaattcccacctatgagtgagaatgtgcagtgtttggttttctgtccttgtgatagtttgctcagaatgatggtttccagcttcatccatgtccctgcaaaggacacaaactcatcatttttaacggctgtatagtattccatagtgtatatgtgccacattttctttatccagtctatcattgatgggcatttgggttggtttcaaggctttgctattgtgaatagtgccacattaaacatgtgtgcatgtgtctttatagtaaaatgatttataatcctttgggtatatacccagtaatgggattgctgggtcaaatggtatttctagttatcaatcattgagaaatcgccactctgtcttctacaatggttgaactaatttatactcccaccaacaatgtaaaagcattccatttctccatatcatctccagcatctgttgtttcccgactttttaatgattgccattctaactggcatggatggtatctcattgtggttttgatttgcatttctctaatgaccagtgatgatgaggtttttttcatatgtttgttggctgcataaatgtcttcttttgagaagtgtctgttcatatccttcacacactttttgaggggtttttcttttcttgtaaatttgtttaagttctttgtagattctggatattaactctttgtcagatgacggatagattgcaaaaatattttcccattctgtaggttgtctgtnnnnnnnnnnnnnnnnnnnnacatgaactcatccttttttatggctgcatagtattccatggtgtatatgtgccacattttcttaatccagtctatcattgttggacatttgggttggttccaagtctttgctattgtgaatagtgccacagtaaacatacgtgtgcatgtgtctttatagcagcatgatttataatcctttgggtatatacccagtaatgggattgctgggtcaaatggtatttctagttctagatctctgaggaatcgccacactgtcttccaccatggttgaactagtttacagtccaaccagcaatgtaacagtgttcctatttctccacatcctctccagcacctgttgtttcctgactttttaatgattgccattttaactggtgtgagatggtatctcattgtggttttgaattgcatttctctgatgaccagtgatgatgagcattttctcatgtgtctgttggctgcataaatgtcttcttttgagaagtgtctgttcatatcctttccctactttttgatggggttgtttgattttttcttgtaaatttcagttcttcgtagattctggatattagccctttgtcagatgggtagattgcaaaaattttctcccattctgtaggttgcctgttcactctgatggtagtttcttttgctgtgcagaagctctttagtttaattagatctcatttgtcaatttcagcttttgttgccattgcttttggtgttttagtcatgatgtccttgcctatgcctatgtgctgaatggtattgcctaggttttcttctagggtttttatggttttaggtctaacatttaagtctttaatccatcttgaattaatttttgtataaggtgtaaggaagggatccagtttcagctttctacatatggctagccagttttcctagcaccatttattaaatagggaatcctttccccatttcttgttttggtcaggtttgtcaaagatcagatggttgtagatgtgtggtattatttctgagggttctgttctgttccattggtctatatctctgttttggtaccattaccatgctgtttttgttactgtagccttgtagtatagtttgaagtcaggtagcatgatgcctccagctttgttctttttgcttaggattgtcttggcaatgtgggctcttttttggttccttatgaactttaaagtagttttttccaattctgtaaagaaagtcattggtggcttgatggggatagcattgaatctataaattatcttgggcagtatggccattttcacgatattggttcttcctacccatgaacatgggatgttcttccatttgtttgtgtcttcctttatttccttcagcagtggtttgtagttcttgaagagttccttcacatcccttttaagttggattcctaggtattttattctctttgaagcaattgtgaatgagagttcactcatgatttggctctctgtttgtctgttattggtgtataggaatgcttgtgatttttgcacattgattttatatcctgagactttgctgaagttgcttatcagcttagggagattttgggctgagatgatggggttttctaaatatacagtcatgttatctgcaaacagggacaatttgacttcctcttttcctaattgaataccctttatttctttctcctgcctgattgccctgggcagaacttccagcactatgttgaataggagtggtgagagagggcatccttgtcttgtgccagttttcaaagggaatgcttccagtttttgtccattcagtatgatattggctgtgggtttgtcataaatagctcttattattttgagctacatcccatcaatacctagttaattgagagtttttagcatgaagggttgttgaattttgtcaaaggccttttctgcatctgttgagttaatcatgtgatttttgtctttggttctgtttatatgatggattacatttattgatttccatgtgttgaaccagccgtgcatcccagggatgaagccaacttgatcgtggtgggtaagctttttgatgtgctgctggattcggtttgccagtattttattgaggatttttgcatcaatgttcatcagggatattggtctaaaattctcttgttttgttgtgtctctgccaggctttggtatcagaatgatgctggcctcataaaatgagttagggaggattccctctttttctgttgattgggacagtttcagaaggaatggtaccagctcctctttgtacctctggtaaaattcatctgtgaatctgtctggtcctggactttttttggttggtaggctattaattattgcctcaatttcagagcctgttattggtctattcagagattcaacttcttcctggtttagtcttgggagggtgtatgtgtccaggaatttatccatttcttctggattttctagtttatttgcgtagaggtgtttatagtattctctgatggtagtttgtatttctgtgggattggtggtgatatcccctttatcaatttttttgcatctatttttttcttctctcttttcttctttattagtcttgctagtggtctatcaattttgttgatcttttcaaaaaaccagctcctgaatttattgattttttttttttgaagggttttttgtgtctctgtctccttcagttctgctctgattttagttatttcttgccttctgctagcttttgaatggtttgctcttgcttctctagttcttttaattgtgatgttagggtatcaattttagatctttcttactttttcttgtgggcatttagtgctataaatttccctgtacacactgctttaaatgtgtcccagagattctggtatgttgtgtctttgttctcattggtttcaaagaacatctttatttctgccttcatttcgttatgtacccagtagtcattcaggagcagattgttcagtttccatgtagttgagcagttttgagtgagtttcttaatcctgagttctaattcgattgcactgtggtctgagagccagtttgttataatttctgttcttttacatttgctgaggagtgctttacctccagctatgtggtcaattttggaataattttgtggtgccgaaaagaatgtatattttgttgatttagggtggagagttcagtagatgtctattaagttggctcagtgcagagctgagttcaagtcctggatatctttgttaactttctgtcttattgatctgtcgaatgttgacagtggggtgttaaagtctcccattattatgtgggagtctgagtctcattgtacattgtaggtctctaaggacttgcttcatgaatctgggtgctcctgtattgggtgcatatatgtatttaggatggttagctcttcttgttgaattgatccctttaccattatgtaatggccttctttgtctcttttgatctttgttggtttaaagtctgttttatcagagactacgattgtaaccccctgcttttttttgttttccatttgtttggtagatcttcctccatccctttattttgagcctgtgtgtgtctctgcacatgagatgggtctcctaaatacagcacactgatgggtcttgactatccaatttgccagtctgtgtcttttaattggagcttttagcccatttacatttaaggttaatattgttatatgtgaatgtgatcctgtcattatgatgttagctggttattttgctcgttagttcatgcagtttcttcctagccttgatggtctttacaatttggcatgtttttgcagtggctggtaccaatcgttcctttccacttttcgtgcttccttcaggagctcttgtaaggcaggcctggtggtgacaaaatctcacgtttgcttgtctgtaaagcagtttgtttctccttcacttatgaagcttagtttggctggatatgaagttctgggttgaaaattcctttctttaagaatgttgaatattggcccccactctcttctgacttgtagagtttctgccaagagatccactgttagtctgatgggcttccctttgtgggtaacccgacctttctctctggctgcccttaatattttttccttcatttcaactttggtgaatctgacaattatgtgtcttggagttgctcttctcgaggagtatctttgtggcgttctgtgtatttcctgaatttgaatgttggcctgccttgctaggttggggaagttctcgtggataataccctgcagcatgttttccaacttggttccattttccccgtcactttcaggtacaccattcaaatgtagatttggtcttttcacatagtcccatatttcttggagtccttgttcatttgtttttactctttttttctctaaacttctcttctcgcttcatttcgttcatttgatcttcaatcactgataccctttcctccacttgatcgaattgtctactgaagcttgtgcatgagtcacgtagttctcgtgccatggttttcagctccatcagatcaattaaggtattctctatgctgtttattctagttagccattcgtctaatcttttttcaagatttttagcttctttgtgatgggtttgaacatcttcctttagctcagagaagtttgttattaccagttgtctgaagcctacttctgtgtacttgtcaaagtcattctccatccagctttgttctgttgctggcgaggagctgcattcctttggaggagaagaggcgctctcatttttagaattttcagcttttctgctctggtttctccccatctttgtggttttatcttcctttggtctttgatgatggtaacgtacagatggggttttggtggaatgtccttcctgtttggtagttttccttctcacagtcaggaccctcagctgcaggtctgttggagtttgctggaggtccactccaaaccctgtttgcctgggtatcaccagtggaggctgcagaacagccaatattgcagaatggcaaatgttgctgcctgatccttcctctgaaagctttgtctcagaggggcacccggccccatatgaggtgtcagttggcccctactgcgaggtgcctcccagttaggctacacgggggtcagggacccacttgaggaggcagtctgttcattctcagatctcaaactccatgcttggagaaccactactctcttcaaagctgtcagacggggacgtttaagtctgcagaaatttctgctgccttttgttcagctatgccctgcccccagagatggagtctacagaggcaggcaggcctccttgagctgcgctgggctccacccagttcgagcttcctggctgctttgtttacctactcaagcctcagcaatggcagatgcccctcccctagcctcactgctgccttgcagttcaatctcagactgctgtgatagcagtgagcgaggctccgtgggcatgggaccctccgagccatgcgcgggatataatctcctggtgtgccatttgctaagaccattggaaaagcacagtgttagggtgggagcgtctcaattttccaggtaccatctgtcacagcttcccttggctaggaaagggaattccctcacccttgcacttcccgggtgtggcggtgccccgccctgctttggctcacactccatgggctgcacccactgtccaacaagccccactgagatgaacccagtacctcagttggtaatgcagaaatcacccgtcttctgcgtcgctgatgctgggggctgtagactggagctgttcctattcggccatcttggaaccttccaagaaagttttctttagcattattcatagtacattgtgtgtgtgtgttaaatagaaacatagaggactttcctgcaactttgttaaactctaaaatatttttgtttgtattttttttaatgtagataatcttattgactgcaagtaagaacggctttgtttcttctttttgatcgtcataccttttttttccccctatctcttggctagagccatatagtgatacaataggactggtaattatgaccgttcccctatcttgctgattttaagggaactatttcagtattgcacctctagtgtgatatgtgtgttgtcacataataaagaaattttacacttttctaaaaggttatttgggtctcggggatggtgaagtgaggaggccttatactgcggagttttgttaggtgcatcttactttcctattcatggcacgttataaattggagatacactttgcaaatattttctcccaatccattacttgttttcttattctctttacagtgtggtttgaagagcagaagtttttgatttgttgaagcccaatatatcagttttctctttgctctatgaaatatttgcctaacgcaaaatcacaaagattttttcctttgttttttctagaagcttaatagtttagttttatattaggcccatgattcattttgagttaactttgatgtgttacagggtatggatcaaagttctttttggaaagtcagggttagaagagcaaagcatatagacatccatttgttctagaatcattcgttggaatgagcgtcctttctccacagaatttcctttgtatatttgataaaaatcagttaaccatatatatgtgggtctgtttctgggcttttgttctattgatctgcttgtctatctttaaggtaataacacaatgttatgtttgttgtagctttatattaacatttttagtcagctaatgttaagtcctccaattttattcttttacaagattgttttggctgtagtagttttttgcgtttctgtgtggattttaggctcagcttgttaatctctaccaaaattgaatcttgattgagattgtgttgatgaatttatagattaatttgcataatgtcatcttaatattaaggcttctgactcatgaacgcagtgtgttatttagctttcattagtttgaatacgaaagccccttcctctgtattttctctttgctgatatgtagcatctatgtcttgtgtctcaaagacttatgtgagtacttttcaacaatgttgtatattaatagtattggaagttaatcctgattagaagtgttaatcaacttactaactttaatagcttgtcctttaaatgtttataactgtcttgaattcatcagagtcaaatgtaagtcaggattcaaaagaaacaatttaaaaagtcacatttagcattttggaaagatgaagtaggatagaaagtaccatagtggatcacagtaagggaagtaagtgaaatattttgttacagttttatacaccccccctctccacacacaggtacacagctttttaaaaaagtttttgaatcaaaatatgaaaaacttaggtctagaataataaatagctatgtagatatttcatataaggtcctaaaagagttttagatttccttgacttcttcctgccctcgtttcctcctccctaactttattaaaagttcaaattttcgaccatcctggctaacacggtgaaaccccgtctctactaaaaatacaaataattagccgggcatagtggcgggcacctgtagtcccagctactcgggaggctgaggcaggagaatggcatgaacccgggaggcggagcttgcagtgagctgagattgcgccactgcactccagcctgggcgacagagcgagactccgtctcaaaaaaaaataaaagttgaaattttcagttaaagtctccctaatacagggtcataactatgattgtgatgtagaattccctaaagtatgcatacaaactatattataaataagacatctttgttgattataaaagtttctaaaattcagtgctgcctaaaacagatggaaagataggcatttttgatgcatttctttcattggtgatattttagcattggttggatgaacaattatggatatttcactatgtaccatcctaagttccaatataatatgctatgaaggaaatttttaaaacttggttttgggcctactttataaccaaaaaaattcttcagaaaattttcaatttgtctttgcgccaactgctttgctttaaaaacactgacttcttaaatatttctggttatatgctagtttatatatatggaacacatgttaatttgaaaagtaatttaccaaattctgttatacagtatttcacattgtagcagtgggtgacaaaaataaataaataataattcttgttggggagggttagacacggtcccagatacttcgtgttttgtttatttctaaaatttctgttcaaagtttacttactcattgagattcctattaatacatttgttttggaataacttaatggttttttttagattatttgacttcaatttataatgttaatagtttgtagttaatattcaaaaaaaaataaattcctttatcataggatcagcggcaaactgaagccatccagttgctacaggcacagctgaccaacatgacacagcttgtttcaaatttatcagcaacagtagcagaattgaaacgggaggtaattgttattgctggtattgcgagacccaatgcatgtatagaggttgtcataaagccaggcttgttaacatgaacatggtacctaaaactttgaccaaacaaaattgtcatttgtagtgaactttttcaaaaaccagaatatggcatttttaagttttgaaaatatattatcatagtcttttgtaaaatatggctttcataatttaggccatacctataatataggtataaaacttctagcaggccttttgtaagcattgatagtagcaacacgtacttcattttcaattcaaaaaggcctataaagttgcttaacaaagcaaacatttcattgatttaaaaactttttattgagcatctagtgtatgtgaagtgcgagctgtacactcctaggttgtggtatacggtagttaatagtccctggcctcacagggtttacgtcctgggggagggatagaatacatttagtaaataaataaatagatgataatttctcctagtgatacgtactatgaagaaaattaaatgtgtgtgtgtgtgtgtgtgtgtgtgtagggtggtagcagtaagggatgctgctttagttagagtgatcttggaaggcttatctgaggaggtggtattacaactaagtactcaagaggagttagcagccacacattgcctggaatgataacaaacctgtttctagcagaactagggcaaaggactggagagtagaaacagtgtaatgtgtttgacagcagaaagaaagctggtatggctggagcagagtgagtgagaaaagtgaagctgagaaatgggttcaagatattggcagaggcctggtcatgtaggacttcgtagacaatttagagtttgaattttatttgaatctttgtatcattagaagtattaagaagtgatatgggtcatgtcattaatgcttagcactttgagaagctctccatttgttgctttgtggagaactgcctgttggggaacagcaggagcagaagcagacaggaaaccaattaagaggtaattgcaggccaggcatgatggcttttgcctgtaatcccagcgctttgggtggcccaggtggtcagatcactcgaggtcaggaggtggagaccagcctcgccaacatgatgaaacgccgtctcttctaagaatacaagaaaattagccggtgtggtggcatgtgcctgtaatcccagcaacttgggagcttgggaggccaaggcaggagaattagttgaacccaggaggtggaggttgcaataagccaaggtcacaccactgcattccagcctgggcaacagagcaaggctctgtctcaaaaaaaaaaaaaaaagtaattgcagtagcctgaatgaggtggtattgacttagagtaggattctaaaagtggagaacagtgtaaacttgttgaattcagaatatttgtaagttgtagaaagataagccttaaggaactaaggttgatctctaagttttgggcttacgtaactgggtggttgatagttcattttataagatgggaaagactgggtaaaagcacaattattttttctccttgaggaggagatagtgtaaatggaaagacaaacaaaatgtgacaaaatgttaacaattggtgagatagataaaggtgtaaatatatttcttgttttatttctaaaacttccataggtttcactcctatagaaagaattggaatgctgcaaagaattttttttctttaatgtcatagtttattttcaaagagcatgccctgcatttctggtctttgaagcacattaaaaaaatacttaaaatgatttgtcctttgaattttagatacccttatatttttcctaatatgatttcctatgattattatttaaccctcttctcatctcaggtttcagatcgacaaagctatcttgtcatatctttggttctttgtgttgtcttgggactgatgctttgtatgcagcgttgtcgaaatacttctcaatttgatggagattatatttcaaaacttcctaaaagtaatcagtatccaagccctaaaaggtaatatcagcattatatttcacaattttattttttttactatgctttgtatatttttgagaaattttaagcaaataaagggagactgaggtaatttctttccctatatgattatcttgaaaccaaaacattaaaaacatcattcgatagtaagatggtcctatgcctaacctggctctgtagactataatagagaaaacactaatagtaagtgcatgaaacccctgaaatatttggttgagaaagatgcttaaatgtggaattcaaaggaagaagagaatactattttaatacagtaccttttagacaaagatctctaaatttttttttccacctgtattagcaataactggagtgttagagttagtcccgtgtggtatgtacagttctcaataacctctgtgtagcctcaacaaaagagtaaattatatgtgctttactcgttgtaaccaatatgtatttttcctaatgtgttaggtgtttctcttcctatgatgatatgaatttgaaaagaagaacttcattcccactcatgagatccaagtctctacagttaactggcaaagaaggtagatttctgtggatatataatatgtatatataaacatgaaactagcttctggcataaatataatgtcagtgttgtgttcatgaccatctgcaacaaaaaatggatacaagtagcctttgtctttgtgctgtgtcaagccactttatcattttcacattttatatctgtctttgttcctaaaagcccagagggtagggaggggggcttagtttaattagcagttggtagctttgtttgcacatgctcctgtttagaagtatttctttttagaaagggatgtttgagaaagttcaacagatatggaaaacctgaatgtgctcccatagcatcctgtgcttttctgcctcctcttcttatacaggtaggaccccttttgtctctagtttaggactatgaggcactttctgaacaaaaatctggtctcttttttttagctccagaacctataattaggttccattgtctaacactaaataaatacttacatttaaatgaatggatgtgtactgagtggatattttcctatttcagtatcttgtaattaatgcatattaatagaattagaaatttgttttcatactaatattaaaataactaaattaattacatattttatttaggagtgctttcttaataatcgatggttgtaggatttagtaactgagtagcatgtttcaattgattaaattattcaagtaatcattcctgggcttcactgttttattattatcacaaagctttacagacttaacccattacatgtgtttacttaaagctagtaaatctcttcttcctccttgcttttttctttttcttttggttgatatgtctttttataagtgaaatttttaatttaagtataattatgtgtaaaacgtaatgaattttcacaaacaatacagctgtgcaaataacacctaaattaagaagtagaacatgagcacctcaaaaacttccttgtgctcttttagtcactgcccatcctttcccagagtagccagtattttgatgtgtaaccattgtgagattcaccatgccattgactataggcatttgtttattttcgttccttatagtattccattatataggtatactgtacattattcatttacatttagattattttcattttgaggttgttacatacttttggtaaacacctgtgcatttctgttgggtatacactggaaatgggattggtgaatcatagggtatgtgtgtgttcagctttagtaaatactgtcatacaattttccacactgttttatgaatttgcccttctatcagctgcgtatgagagttacagttacttcatattctaaacattccttatttgaggtatacccatgcaattaggaaatacgttagatttttgcttctcagcatttctagtcttaagtgaaatcgtgactatcttactatttctcttctctttatccaattttttagggccaaacagagtagctttttgcacctgataatagaattacttctattttaaacaacagtgtcatcttggtgtatctttaccagtaaagaaagttgagtagagtaggtaggagactgactttagtcctgattctaccaatagttaattcatttatttcttctgttgtttgataagttcttgttgttatggcatttatcatagtatgctttgattttacctatttttacttgccttattttcacttctaagctctgtgggagagaccatgtctttttcttattgtgataaaaagcacataaaatttatcattttaacagtttttaagtgcacagttcattagtagtaagtatagttacattgttgtgaaacagatcttccgaatgttttcgtcttgcaaacctgaactctgtgtccattaaccaattccccttttctccctctctcagtccctggcaaccactattctattttctgtttctatgaattcaactacttcagataccccatataagtggattcatacagtatttgtctttctgtgattggcttatttcactcaacataatgtcctcaaggttcatctacattatagcatgtgacagaattttttcctattaaagggtgaaataatattccatccattttatttatgtacctcatttcctttatccattcatctgtaagtggacatttggattgcttcccctcttggctgttgtttgagtagtgctgttcaggggtatacagatatctctttgctcattttttagttggattgtttgagttttttgtttttaagttcagggaattctttataacctccgttatggattataacccccattagataatatgatttgcaaatattttctttcatcctttaggttgctttttcactgttttgattgtgtccttggatgtacagtttttaagttcaacgaagtcccatttgtctattgtgtttttgttgcctgtacttttgggtcatatccaagaaatcattatcaagttcaaggtcatgaagcttttcccctgttttcttccaagacttttatagatttatgtctttaatctattttgtgttgatttttgtatatagtataagataagggtccagtttcattctttggaatgtgaatattcagtttttccagcaccatttgttgaagagactgtccttttcccattgagtggtctttgcacccttcttaaaaatgagttgaccacgtacatgagggcttatctctgtgttctttattttgtgccattggtgtatttgtctgtgtttatgccagtactctaccactttgattactatacctttgtaatgtgttttgaaatctggaagtgtgagttatctaacttcattctttttaaaattattttccttatttgaggtcacttgagattttatgtgaattttagggtgaactttctatataagcagtgtcgttttactagttcacttgcagattattttggattttcagtgaatacaggtacgtatactgagaacaaagacagttttgttttttcctttgcagtccttatagcttttatttcctttgctttcttaactgtgttagcttgcattttcagcaatgttaaataaaagtgattgacaggcatctttgtcttgttccaaagggaaagcttacagtgttttattgctaagattgtatttgtcatagatgttttgtggattttttattctgtattttgtcattatgtgttacctattgtcataggtattctataaatttttttatattatattttatttccatttttaatgttacaaacatgaattatattagattttctaatgttaaacttatattgcatttttaataccagttgctcatgatatacgtgtgtgaattttgtattgtatatattatttctacataattttgttagataattatttagaaattttgcatctatatgaataagattggcatgtaatattttctcatgttggattttggtatgtaaggtttataaaaattagatgggcaggggtatcccttttaattttttttttttttccccttccatgctttcattaagattttttattggggaggaagtaaatattccctttactgccattatgttggaagttgtgtactggttctgttcttttactagttaccctagaagtcagaagtattaatgtttgccaaagtctcaagttcatcaatacttgtatcttctccttaacaatacatagatcttaaaactcttatttgtcccaagccttatttatgttactgttcttgtatattttaattctattctttctgcttaattttaactcaacaaggtatttctttttacacttaatgttcatttaaatttaccccacgtttactaatgtttttattcttcagagctttcatttgtcattagttaaaactgaaatattctcctcttctttttctttatcattttgagattcgtgaggctctttggagctctggatttgtaggtttcttttacttgttattgagaaattctcaaccattattttttcctcccagatattccctgtgccccagtctcttttagattctcatatttaattaaacatattacttctccgtatatcttccctgtcttgtaaacattccacctttttgactttttatgctgtattttggatgatatcttctgatgtgtttccaggccagcagtcttactgttgcaaatttattcattgggttttcaatttcagttattttttccatttccaggagttctttttgtattttttaaaaatccaggtctgtattttccttgttatatgtttcctgcagatattttcaagcttattttctagacatattaagcataattatctttatagtttgtgtttgataaatctaatatcttaaatttttgtgagtctgttcattgtctttgtaagctcttactcagggtatgttgtgtctttgtgtgctactttttctctttgaaaagttatttgtagggataatttgaggcctagaatataggttcttatttgagagggaatttgtgtgtgtgttacattcatgtaataccttacattcatgacttgtggtttgttgggccaccaggtgatgataatttggactgcaagttcatgcatggcttcattctttacctgagaatatagtcctttggagtctcagtttactgtacacagggagatggtatcttattacactaaactttgggtgggccctaggacctgatttctgatccattcccttatgataccatcagaaccaaagttcatatattcttgtgttggcaaatgttttcagggcaaaaatgacttttgtcttctacttgactgtccgggttcccacttttctttcagttttagcctagggattactttcttggcagcttttcaatgcttttagtgattttttttaaaaaaaacaaactatcattacttagttgctttcattgtagaggttgatctgaataacataactgtttctagaaatagacatcattattaaagaaagtaaattaagattagtaatctggtagaaatgactgtttagagggatgttttgatattttcatatatttgatgactttctcaataaatctctgaaatataatgtaaaaaattataattggttgaattgtattaataaatttcccaaatgtgtagagcttctgtagtgaatttactatgtgtaagcttttgtctctgtcagaccttaaattgtttatttttagtggattgaataggactaaagtctcatagccttttaaaaatgtgtgtctattttgtcagtgtgggggtggggttgggatatatcttgaagctgcttagagtaatgaaaccttagaaactttgggctaaaactaataaatctaatttactcactatgccagaagtgttcattcattattgcttagtgatatatattgcatgttcaagctgtttttagattgggatttcatagttttgatcatagtaataaacagagaaaaatatcttggatctctttttgtgtttatttctctaactggcttccaaacacggtcacgactacttgttgcacattgttaatctacctttgtgacacagtttagaggctagtcttttagggaagtattcaaatgatctgtaggtttggtgtgagcttacccaggaatgtttcttttcttatcaggtaaaagagtgaggctgggcccaaagaaagatcgttattgtattggttgataaccagctactagttaacaacttaaggaagtatagttatttgaagacgaccagtcaagcataggaatcatatcatcttccaccttgcctctttttgcttactaatttaaaatgcataaatatatagttaacctgatacaaattcattggttctattactagaggataataaggaatgaatgatttgtcttattttagtgtttaattatagcaaatccaccaaatccactttacattttacatctgcttttttttttttttacttacagtagacccaaatgatttgtacattgtagaacccctcaagttttctccagaaaagaaggtaattgtttatttctttttaagtttattgctatgttttgtgataataaatgaagaaaagaggttgaaaggtttaaggtaattacctttaagtagtccttaactgaatgtttattttctatcatgataatgttgtaaataaatattaacaggggtcagcaagctgtgacccacaggccatatgggccatgagccagataggttttctcatttttaaagagtgataaaacagaacagcatgcaagagagaaaatgtgtgacctgcaaagcctaaaatatttactgtctgacccttcacaaaaaaaatttgttgatccttggatgattgtcattatttattaccgaatgcatgccaagcacagagcatgcaccgttcctctaatcctcaccacaacctgaagatgatgttatcctcatttttttttttaataaaaaaacagcaactcagaatgtacttaggattttttggcttcaaagtctttgctttttcattttgcctttcaaattaagttatactaattttagttgtaatttcatctaggtgaaagaacttgggctttgtaggcaaatagcctaagattcattctcaacccggctgcttactacattgtaacttgggcaaagaaccaaacatctgaaccttgcttttctcatttaagaatcaaggataaaataccgacctttcagggttaatagctgccataatacatgaaagcaacctgtatgctctctggcagttagtaggtattcagatattagtatcactccctaaacctatattcataggtagcaggtaagcaatttaaagagttttgattcagtagtatttacaaaatgggaagatgatgctagtatctatatagaacataacaatgtatgtgttctgtgctgtttataatactgttttacttttcaccaggaggtggcacttctctattagctcagctctctaggtgtttgataaggttactatgggaagtatcattactaacttttcttttacttgtgttgtagaagaagcgctgcaagtacaaaattgaaaaaattgagaccataaagcctgaagaaccattgcaccccatagccaatggcgacataaaaggaagaaagccctttacgaaccagagagatttttctaatatgggagaagtttatcactcttcttataaaggtcctccatctgaaggaagctcagaaacttcatcacagtcagaagagtcctatttttgtggcatttcagcttgcacaagtctgtgcaatggacagtctcaaaagacaaaaactgagaagagggctttaaaacgaagacgatctaaagtccaagaccaaggaaaattgataaaaactctaatacagactaagtcgggatcattgccgagcctgcatgacataatcaaaggaaacaaagagatcaccgtgggaacatttggtgttacagcagtctcgggacatatctaaaattaattgaacttttcatacagaagacttttttgttgttgttctttgaagaacagtctgtagtatttgaagggtttgggggagggagaaaatattaatgggaaaggcattcagaaattatggtttctacctttttaaaaagtagatgggattgtgtcaatcttggttaatgagctacagttttacaaagctgatcacttcctataaggacaatggtagacattttataaagatgttttttcacaagattaattactgggacaaaagtaatttggaagcccagttccttaggtgggataggaatgaaagcctaaacctcttcctttagctttgttcctatttcttgcaccttcccatatttatgtgccttttgtctatttataatgccactggaagaggagggataactttttctgttatttgatttcttttataactttgttaggtttttgaagctgcaaacactacaatgctttgagggggtctgtgcctgaagctcaggagtgtggatcagacagtctaaagatcctaaaaacttgccaactggatctttgtttagcaaactcactggaaatgaacacttaatggaatttttaagtctgttctgttaggtagatggtgatgctcttgttattttcacttattcagactggattacttcttacttagttactaactcaatgaggaaaaatccctacaggatctttttttgcaaacaactgatatatgcagacaaatttttgacaaattcaccttttaaacacacttaaccatttgtgaaggttttctttagcttacattttaaacatacacaataaacactaatcctccaaactttcactgtttttattagtatgaatataaaatttgaaggtttggccaattagtacaagtctcatgatataatcactgcctgcatacatatgcacagatccagttagtgagtttgtcaagcttaatctaattggttaagtctaaagagattattattccttgatgtttgctttgtattggctacaaatgtgcagaggtaatacatatgtgatgtcgatgtctctgtctttttttttgtctttaaaaaataattggcagcaactgtatttgaataaaatgatttcttagtatgattgtacagtaatgaatgaaagtggaacatgtttctttttgaaagggagagaattgaccatttattgttgtgatgtttaagttataacttattgagcacttttagtagtgataactgtttttaaacttgcctaatacctttcttgggtattgtttgtaatgtgacttatttaacgccttttttgtttgtttaagttgctgctttaggttaacagcgtgttttagaagatttaaatttctttcctgtctgcacaattagctattcagagcaagagggcctgattttatagaagccccttgaaaagaggtccagatgagagcagagatacagtgagaaattatgtgatctgtgtgttgtgggaagagaattttcaatatgtaactacggagctgtagtgccattagaaactgtgaatttccaaataaatctgaacacttgtctttattaattactggctcttctgtcttttaaaagagaactcagaaattattaatctttgaacagagatttaagtttttgccacttttaaagttaaatatagcagcattccattcaatattgatcacatttcagccaactacaaaatgatggtacttttacataaacattttgctccctatgctatcagaatttcagtttttcatatctaaatacagcataacattttgtaacatgaggtttattttttcctctctcacataactacatgagaaaaaaaacttaagtgaaaataatagatttatgcctattaagaagcaaaaactatatagatatttatccaatgggatttttagtgttccctgatgatcaacctcattttatttcttctaatgttaagtaaagcattaaaacagtatgaaataaaaggaaactagggaattggtaagaacaaggatgcaaagtaaaacaattcttttaattgaatttttaaaaacattaaagttgtggctcacgcctataatcctaacactttgggaggccgaggcaggggatcatttgaggagttcgagaccagcctgaccaacatggtgaaaacccgtctctaataaaaattaaaaaaaagtagccgggcatggtagcacatgcctgtagtcccagctactcaggaggctgaggcaggagaattgcttgaacctgggaggcagacaggttgcagtgagctgagattgcaccactgcactccagcctgggtggcagagtgagactgtctcaaaaaaaaaaagttatgcatacatataatttgataaattagttttataaggcttataaagtaagaacagaaaacagttctctattctgtaccatttcactcacacacaacgcacacacacacacacacacacactaccagtaccacccatctttctctaccaaagatttcttgcttcccagtggcaaacattttttattccgtctgcagttattgtgcttcccttaccttgctgcttatttttccatttttagatgtgtcctcagtttgaatatacaaacttgtacgcatgaacatgagatagatataaacttatattggttaatgtaattggataagtctattcaaaatcacacaacaggacaacttagaagtactgcttttcttcaactgattgatttaaaaaatttcaaatctgtagataagttgaacaccatgtgcctttgcccagattcaccagttgctaatctttttagttttcttcatgtgtatgtgttttatatgtatatgtgtattatatgtatatatgtatgtataaagatatgtatgtgtgttatgtgtatatatataaagaaacatcttttggtgagccatttgtaagcaagttgggacattatgaccctttccccctaaatactgtagcatattttttcctaaagtaaggacattcacttatgtgaccataatacccgtataatatgtaagaaaattaataactccataatatctaatacacagtatatagtcaaatttcttcagttaccctcatttgtttattttggtccagggtccattcaaggttcatttggttgtattgtctatttagtgtctaaaaaaaatagactacttcctgactttgaatattgtccttgtgcaaggtccatacttactttctctgaatcatcccagttttagtggatgagctgcccaagtgagcaggaagagcttttttgagtaatgtgttgatgttgtcactgaaattttatcccaacccacgagtatttatagttaacacattctttaaaatatcctgttggagcaataacctccgcattacactccacttaatctattactttaaaaattaatatttcaggctgggtatggtggctcacgcctataatcccagcattttgggaggccgaggcaggtggatcatttgaggtcaggagttcgagaccagccttgcaaacatggtgaaaccccgtctgtactaaaaatagaaaaattagccaagtgtggtggtgcacacctgtaattccagctactggggaggctgaggtgggagaatcccttgaacccaggaggcagaggttgcagtgagctgagatcgcaccactgcactccagcctgggcgacaagaacaaaactccatctcaaaaaaaaaggatctttcaaatacttgcttacaacagagtttattactgctattttgaagtcatatagcctgggctaccaaatctgcttcatattttttgacagatcaccaaatactaaaacccaaacaaatgccttataacacttgtaaggacttttgagcaaacataagtattgatgattttttaaaaagtgaataaagagcaagttttaattccaggatagtttaaaatagccagctccccagggaaatggtatattacacagtttaagagcaggtgctgactgggcacagtggctcatacttgtaatcccagcacgttgggaggccaagatgggaggatcacttgaggccgggagttcaagactagcctagacaacatatcaagaccccatctccacaaaaagttttttaaaaataagctgggcatggccaggcatggtggctcatgcctgtaatgccagcatttgggaggctgaggtgggtggatcacaaggtcaggaggagttcaagaccagcctggccaacatggtgaaactccatctctactaaaaaaatacaaaaattagccaggtatggtggcatgcacctgtaatcccagctactcgggaggctgaggcaggagaattgcttgaacccaggaggtggaggttgcagtgagccgagatcgtgccactgcactccagcctggacaacagagtgagactctgtctctaaataaataaataaaagctgggcatggtggacgacagagcgagactctgtaaatagataaataaataaataaaaataagctgagcatggtggtccatgcctgtagtcctagctactcaggaggctgaagcaggaggaccacttgagcccaggagtttcaggttgcagtgagctatgattgtaccactgcactccagcctaggcaacagagtgagaccctgtctcaaaagcaagtgctttaaagtcagactgcctgttttcatatttgctatccacctcttactgggtacggcattggacaaatcacagtctcattaaacatgagatttctcacctgtaaatgaagataagagcacctatttcaaagggttgctttgaggatcaagagtgctaataactgtcatatacatggcatagtacacactaaacataagccatcagttttcagatgctcagggttctgatccttggtttctgtacatctatcagcaggggtcaagaaaggagctcattatgcttggtgtaagacttccatcatctccagcctctctccatcatcaccaccatttgaaaggtcagtagggagttttgagtccagtatactctgagaaagaccacccctcagttttgtcatcatgagggtcagtagggcaaaccaaagctctgcagagctcctgcaaagatgttgccacccctttctactgcccagtatgaagtcttgccaactttgtgcctcaaaaccattaaggtgaatttcatgtcttagattcttgttaattttataaccacaagaagcctcatatgacttgtaacattcttttttctggatccatattccatccccaactcctaaaacacttctgtgccctctggaactctaatccagtcattagtaaaattccctggaatctttcatttctttcagccttcgctttgcctctgttctatttgaaactacttccctgaatccttctcaggaggtcacttttttttcctatacccctcacaccaatgggcctgaagataggctagttgttgtccttaatcttcaatgccactataagactactctccacttttgcttaaatttctctttgaatcttgtatcaacaaactataccacctgctgtctctccttattgcaaatgatcccctgttttctctcacccttattcttggggtcacttattccattgctgcttctgttataattcttgatgatttcaatatctatcttacattagtttttctagtttctcagttccttgctttctctaatgatcttgttctccagactgtattggccacttactcccgtgatgaaatcctagtttttatcattaccaaaatccataattctttcttaatacgaattttaagcatctggttctgactaccacctcctgttttactagctcatacccccttcccaccctaactcttaacaattctttcatcccaccatatcctacaatccattagtcataccactgggacagccaagtataaaggggtccctagagaaactatgaccagcctgtgcactgagagaacaggttggagctacaaaagtttgtgccctttgcagtggagaggagcttggcctctcctgttctggagtggaacctgccattgaatctgtgaggcaggaaactggctagcaggactcttgctttgctgagagttcctctttccctttatttcctcttcacccaataaattccatttttctcaaccttcaaagtgtctgtgagcctaatctctcatggtcgtgtgacaaggaccttgtttttagctgaactaaggagaaagtcctacaacagcattggcacccaacatggggcttaagaaagggtgactgagatgcaaaccaagaaatctctccctttcacttctaagtgttttcatctctggacttctgagggtaggggaaaccaggccctcacccccattactcccagggtcaggggtctttccatggccttttccttcctttttctggatggacaggtgaacagtggctcctcactccccctcccttcccagttggggctggggaatgccacacattaacagtgtcttcatcttcccctgcgaaggagttcaactctcatctgacagcaattaagtttctccctccggaagaggaacccagttgcataagaataagaggttctcccctaggcatttttaaagtgtttttttttttccttccttttctccaccaggtcaagagctgacttttaagaaaggtttttttcctcttagaagacgtttttctaagctaagaatgataaggatcactctttatattctctgtaaagttttaattgtgaaaaaggatttgtgaggctggtcttaagctgtagccaactggtgtgctttgagtgtctgtatggttcgtagaaaactttgcttcaggcctccatcttgttttacaacttgggggcatggcctgtaacccagcagcaaggctttgtttagcaatcctgccttggggaattagtcctttctggtttgatatctgcatgtttttctagccatgtctcttaaaggactccacctggtgactgtgttttcttctgcctgtgtagctatatatgtgttgtgtgtgatgtctagaaaaggagctctaattaattggcctaaaggaagacaagcacttgaatcaaatattttttaaagggaaggtaaaagctgtgatacctttcagttcacatgactttaatatttgagaaataaaaacaaccttaaagattactggtaaaaagcagatgtcatcaaaatataaataggtggactaaattacgcaggtcagatgcaagctttgctaagtgttttgaggttataaactgctttttggtggtaaggcctggggacatatggaactaaccatgctcttaattatgctggaaggagtcaaaccttggctgcacctggcacaaaattaaaacaacttgccaggttttacattaaagttaaaattgctagaggttaccattataacatgtaattgaaactactgaaaatagattcacatgcaaggtatttaagaacagtaaaatgtgtttttaataaaagattacaaaaaggcatgaaaatgtaaattcttgcctagggttaaagaattattctaaattaggataaagctgcgggttcaaaaaagtggtggaaggattgtgggaattaatcttgtgaaagagattctctgtgtgaacatattgactaggttcaggggggtatattgtgtagtttttgaatgaaagcacaacagagtattcttggggcactgatttgccctttggcaaaatttgtaaagggttataaaaggcttttgcttctttaaaatttctgagtcatcattttggcaaaataaacaattatggtcatctagaattctattttataacatcaggtgttttaaactgctaacatatttaacaggcttcttaaaatcaaactttagtttcaaaattttctttcctgacacctggctttttggatatatcagagggcctctggagtgttcagaaaagagaggtaaacaggattattttacatgtttaggtacatgggatcgacaaaatgatgttcaatcttctttaggtatattttggtgaataatactaatatatgttccaaaaccatatgggattcctaaaattctaatgtctaagtatatgctatcaatcataattaaggttatgttaagttattgtaaaccgtggagataaccaaacttctttgtcaatcatgtttctaactgtaactaccctggacattttgttattcgtagacaattgttgtcttgttctaatctttttcaaaagacagtttataaaaagctatagaactataggtaggtgacctcaaacacaggtttttgataactttggagactgtgacattggaataaatgaaaaatgtacaggactcatgaagagctaaaatgttcatgaatatcaaacaaatcaataactaaatggactgaactcaggaaactgaagcaaatcttttttactttggcttgaaatgttgctgaactttgttttgtttttcagagttgaggaaacttactttgaactatttatggccattaataattgagtaaggtatactcctgtgaacaaaatttggagcatgtttgtttctctcttcctggttcttctagaatttggaaaccatctgtgagtattcttaattcatagcaatatagttgtttggatcagtgcaataagaatccatttttcttttgcaacgggatgcaattggagaaactggttgttttaccaaggctttgactggaagtgtatgcttcactttaaggaatcaagcctgacttgcagagctgataacagccccttggggaaaaaactggcctcataccatcatctacatagtctctctacagggctcctgacctgtggtcaataaagaatgtcactttctaacaggcctaggagctccaagttaatcttgggaccttaagaggagaggatcacccaactaacaggtgtttgaggatacaaacccctggctgggcttgaatttaaaaggtcttatctgagattccttacagaatagagttccatcaaagccaatccaaaaggcctgtgtagaaataattattcttgttgcactttatgcaagtaatcaggccaagtataagattaaaatctattgcaaacaactcagtcctatcatgattttttttaacaaaaatgaggaccggagagaaattatgtttcaaaactcatacatttgtcattaaattataagctcattagttgtttttaggtttttgcctacattttagacaccctgcttgttgctgtgaaccaaccagcaatctcctgctgcagctcagaaagaacaaaagggatgggtaatgtagaagtctggatcaatattctagttctgagcaattatcctgcaaatcctgccaggtgttgggaataaataggacatccatcactcagaggattccttttgggaaagtaagactaagggagctaaccaaagccaagcaccatgcacccaaatcttagcaagcataactagctaccagtcatctgaatgtatcacaagacatccttttctctcccttgttggaggagggctcagttccacagtttcaccttagcattcggcttattgataaggagtccatgcaccatcccacaaccccaccaagacacagttttgtcccaaagaattttgtcaattctaagctttggatccctaggaaagaaaactggatctaagggatccagaggcagatgataatggaagttaaaaggcagagcacaagtgagcatggttgattcctgctgattaagacaagcctcctgtttcatggataaaggtcatgctagtatcactggcaaaaatgaggtctagggaatgccaaggctactgacagcagggggaaagagacataggtgagagcagataatttctattctctaggccctccctgcttcatgggtacaagccgtttggcactcatcatggcacctgccaaggtcgctgggacttggggctgcaaggacagagaaagaaagaggatgttcttcctactgtccctcacgtaccttgggtatctgcttggaagagaaaggaaccagggattatcgggggaacaagcccccagtatttcaacataggttattttctattttccctaagagtcggctggtctgagaaataaagagaaagagagaaattttacagctgggcctccgggggtgccaccacatattggtaggactgtggtggcaacctcaagccacaaaaccagcaagtttttattagggatttcaaaaggggaggggtgtacgaatagggagtgggtcacagagatcacatgcttcaaagggcaataaaagatcacaaggcaaaagagcagagcaagatcacaaagcaagggcgaaattagaattactgatgagggtccatgtcccgctgggcacgtattgtcttgataaacatcttaacaggaaacagggtttgagagcagacaacctgtctgactagaattcaccaggctgaaatttcccaatcctagtaagcctgagggcactgcaggagaccagggcatatttcatcccttatctcaaccacataagacagacattcccagagcggtcgtttatagacctacccctgggaatgcattccttcccccagggttatcaattattaatattccttgctgggaaaagaatttagcgatatttctcctactcacacgtccgtctataggctctgtgtgagaagaaaaatatggctctattctgcccgaccctgcaggcagtcagatcttatggttatttttccttgttccctgaaaaatcgctgttattctgttctttttcagggtgcactgatttcatattgctcaaacacacatgttttacaaacaatttgtacagttaactcaatcgtcacagggtcctgaggtgacatacatcctcagtttacgaagatgatgggattaagagattaaagtaaagacggcataaaaaattataagagtattgtttggggaagtgataaatgtccatgaaatcttcacaatttatgttcagagactgcagtaaacacaggcataagaaattataaaagtattaattttgggaactgataaatgtccatgaaatcttcacaatttatgttcttctgccacagcttcaaccggtccctctgttcggggtccctgacttcccgcaacaagggatgcctgctcctctctttctagatgggtagccgttcatcttcactctgtacccctttcaaatgcatcctgaatctcctttgaaaaaaaacaccttcttcttcttttttcctcctctgtcctctcttcactgataggtaattgtgtctccatactatgggacactccccttggatgcatcctctgaactgggaaaagttaatttcccaaaccttaaactggttggcttaggattggactcaggggaagggaacccaggagcccaacatgttggcaaaatggtaaaaggcctcgggatttttgagctgtccttaccccctgcttttctcattttaatacatgttttctaatgacctggtttgtctcttcttgccttcaggtcatcaaactccaaacagtcatgcaactgg

SEQ ID NO: 621 - DNA, 5917 bp, Homo sapiens
cccaaagttcgaaaccaacagaacgaaaagcaacgaagcacacttaaagtgaggaacccggcaagcggcgaaattcttgctgaagagaagaaaaagcgaaaggttttccgctgcaaccaatcagatgagaggattcttggcacgcccctttctatctaccaatcaacatctagctcaatggggcagtccattgccacagggaaagggcttggtgcagcttccctcacaacacacacgtcattctaggccattccacgaactgtgctcaaaagaggaaaacagtgcaacagttccaaagctgatcagtctcgtggtgagcagcgaaactatagacttctctaacaaaaccatggattctaggagggactgggaaagagaaaaacgaattctggaaggcaaactacaactcccaaaggcccttgcgcggactcagcgcgcgagggacgaagggcggcgggcgtggacgagccggtggctgcagcggcggcggtccccggagtcctgtgaagcgcccctgtccgcgcctctgtggggccctcagagagggctgccaggacgcgagccactgaggagccgctcagccagcgccatagcccttaggactatcggtcacatcctcgcgctcctgctccggctcctccatcttggcctcggcagtggcggctgccgggaggatgtgccgccttctggcagggggaagaaggaggagaagatgaagaagcaccggcgggccttggccctggtctcctgcctctttctgtgctctctggtctggcttcccagctggcgtgtatgttgtaaagagagttcttcagcttcagcgtcatcatattactctcaagatgacaactgcgcactagaaaatgaagatgtacaattccagaaaaagaatacagagtcaaaaaagttaagtccaccggtggtggagacactccctacagttgatttgcatgaagagtcttccaatgcagttgtggacagtgaaactgttgaaaatatttccagctcatctacctcagaaatcactccaatctcaaagcttgatgaaatagaaaaatctggtactattccgatagccaaaccaagtgaaactgagcagtctgaaactgattgtgatgttggtgaggcccttgatgctagtgctccaattgaacaaccttcctttgtcagtccacctgacagccttgttggccagcatatagaaaatgtatcatcttcacatggtaaaggaaagataacaaaatcagaatttgaatcaaaagtttcagcaagtgaacagggcggtggtgatccaaaatctgcattgaatgcttcagataatttaaaaaatgagagctctgattatacaaaaccaggagacattgaccctacatcagtagcaagtcccaaagatccagaagatataccaacatttgatgaatggaagaagaaagttatggaagtagaaaaagaaaaaagtcagtcgatgcatgcatcttctaatggaggttcacatgccaccaaaaaggtccagaaaaatcgaaataattatgcctcagtagaatgtggtgccaaaattctagcagctaatccagaagccaagagcacatctgctattcttatagaaaatatggatctttacatgttgaatccttgcagcactaaaatttggtttgttattgaactttgtgaaccaattcaagtaaaacagcttgatattgcaaattatgaattattttcttctactcctaaagattttctggtttctatcagtgacagatatccaacaaataagtggattaagctgggtacttttcatggtagagatgagcggaatgtacagagtttccctttagatgaacagatgtatgcaaaatatgtcaaggttgagttgctatcacattttggatcagagcacttttgtccattaagccttataagggtatttggcactagcatggtggaagaatatgaagaaattgctgattcccagtatcactcagaacgccaggaactatttgatgaggactatgattatccactggattataatactggagaggataaatcctcaaaaaatcttcttggttctgctacaaatgccattctaaatatggtgaatattgctgctaatattctgggagcaaaaactgaagacctgacagaaggaaataaaagtatatctgagaatgccactgccacagctgcacctaaaatgcctgaatcaactcctgtttcaactcctgttccatctcctgagtatgtaaccactgaagtacacacacatgacatggagccgtcaacaccagatactccaaaagagagtcccattgtacagttagttcaagaggaggaagaggaggcaagtccatctacagtgacccttctgggcagcggtgaacaggaagatgaatcatcaccctggtttgagtcagagacacaaatattttgcagtgaactgaccacaatttgttgtatttctagtttttcagaatacatatataaatggtgttcagttagagttgctctttatcggcagcgcagccgaactgctttgagtaaaggaaaagattatcttgtgttagctcaaccacccttactacttcctgcggaatcagtagatgtttcagtattgcaacctctgagtggagaattggaaaatacgaatatagaaagggaagctgaaactgttgttctgggtgatttaagtagtagtatgcaccaggatgacttggtgaatcacactgtagatgcagttgaacttgaaccaagccattctcaaactctttctcagtctcttcttttagatattaccccagaaatcaatcccttgcctaaaatagaagtatctgagtctgttgaatatgaggcaggacatataccatcaccagtgattccccaagagagttctgttgagatcgataatgaaacagaacaaaagtctgagagctttagttctatagagaaaccatctattacctatgaaacaaataaagttaatgagttaatggataatattataaaagaagatgtgaactccatgcaaattttcacaaagctgtctgaaacaatagtgccaccaataaatacagccactgtacccgacaatgaagatggggaagccaaaatgaatatagctgacacagcaaagcaaactttgatttctgttgtggattcttcttcattacctgaagtaaaagaagaagaacagtctccagaagatgcccttttgagagggttacagaggacagctacagatttttatgctgaattgcaaaattctacagatctaggatatgctaatggaaatcttgtacatggatcaaaccaaaaggagtcagtatttatgagacttaataatcgtattaaagccttagaagttaacatgtctctcagtggtcgctatctggaggagcttagccaaaggtaccgaaaacaaatggaagaaatgcaaaaggctttcaataaaacaatcgtgaaacttcagaatacttcaagaatagcagaggagcaggatcagcggcaaactgaagccatccagttgctacaggcacagctgaccaacatgacacagcttgtttcaaatttatcagcaacagtagcagaattgaaacgggaggtttcagatcgacaaagctatcttgtcatatctttggttctttgtgttgtcttgggactgatgctttgtatgcagcgttgtcgaaatacttctcaatttgatggagattatatttcaaaacttcctaaaagtaatcagtatccaagccctaaaaggtgtttctcttcctatgatgatatgaatttgaaaagaagaacttcattcccactcatgagatccaagtctctacagttaactggcaaagaagtagacccaaatgatttgtacattgtagaacccctcaagttttctccagaaaagaagaagaagcgctgcaagtacaaaattgaaaaaattgagaccataaagcctgaagaaccattgcaccccatagccaatggcgacataaaaggaagaaagccctttacgaaccagagagatttttctaatatgggagaagtttatcactcttcttataaaggtcctccatctgaaggaagctcagaaacttcatcacagtcagaagagtcctatttttgtggcatttcagcttgcacaagtctgtgcaatggacagtctcaaaagacaaaaactgagaagagggctttaaaacgaagacgatctaaagtccaagaccaaggaaaattgataaaaactctaatacagactaagtcgggatcattgccgagcctgcatgacataatcaaaggaaacaaagagatcaccgtgggaacatttggtgttacagcagtctcgggacatatctaaaattaattgaacttttcatacagaagacttttttgttgttgttctttgaagaacagtctgtagtatttgaagggtttgggggagggagaaaatattaatgggaaaggcattcagaaattatggtttctacctttttaaaaagtagatgggattgtgtcaatcttggttaatgagctacagttttacaaagctgatcacttcctataaggacaatggtagacattttataaagatgttttttcacaagattaattactgggacaaaagtaatttggaagcccagttccttaggtgggataggaatgaaagcctaaacctcttcctttagctttgttcctatttcttgcaccttcccatatttatgtgccttttgtctatttataatgccactggaagaggagggataactttttctgttatttgatttcttttataactttgttaggtttttgaagctgcaaacactacaatgctttgagggggtctgtgcctgaagctcaggagtgtggatcagacagtctaaagatcctaaaaacttgccaactggatctttgtttagcaaactcactggaaatgaacacttaatggaatttttaagtctgttctgttaggtagatggtgatgctcttgttattttcacttattcagactggattacttcttacttagttactaactcaatgaggaaaaatccctacaggatctttttttgcaaacaactgatatatgcagacaaatttttgacaaattcaccttttaaacacacttaaccatttgtgaaggttttctttagcttacattttaaacatacacaataaacactaatcctccaaactttcactgtttttattagtatgaatataaaatttgaaggtttggccaattagtacaagtctcatgatataatcactgcctgcatacatatgcacagatccagttagtgagtttgtcaagcttaatctaattggttaagtctaaagagattattattccttgatgtttgctttgtattggctacaaatgtgcagaggtaatacatatgtgatgtcgatgtctctgtctttttttttgtctttaaaaaataattggcagcaactgtatttgaataaaatgatttcttagtatgattgtacagtaatgaatgaaagtggaacatgtttctttttgaaagggagagaattgaccatttattgttgtgatgtttaagttataacttattgagcacttttagtagtgataactgtttttaaacttgcctaatacctttcttgggtattgtttgtaatgtgacttatttaacgccttttttgtttgtttaagttgctgctttaggttaacagcgtgttttagaagatttaaatttctttcctgtctgcacaattagctattcagagcaagagggcctgattttatagaagccccttgaaaagaggtccagatgagagcagagatacagtgagaaattatgtgatctgtgtgttgtgggaagagaattttcaatatgtaactacggagctgtagtgccattagaaactgtgaatttccaaataaatctgaacacttgtctttatt

SEQ ID NO: 622 - protein, 1392 aa, Homo sapiens
MRGFLARPFLSTNQHLAQWGSPLPQGKGLVQLPSQHTRHSRPFHELCSKEENSATVPKLISLVVSSETIDFSNKTMDSRRDWEREKRIGKLQLPKARTQRARDEGRRAWTSRWLQRRRSPESCEAPLSAPLWGPQRGLPGREPLRSRSASAIALRTIGHILALLLRLLHLGLGSGGCREDVPPSGRGKKEEKMKKHRRALVSCLFLCSLVWLPSWRVCCKESSSASASSYYSQDDNCALENEDVQFQKKNTESKKLSPPVVETLPTVDLHEESSNAVVDSETVENISSSSTSEITPISKLDEIEKSGTIPIAKPSETEQSETDCDVGEALDASAPIEQPSFVSPPDSLVGQHIENVSSSHGKGKITKSEFESKVSASEQGGGDPKSALNASDNLKNESSDYTKPGDIDPTSVDKDPEDIPTFDEWKKKVMEVEKEKSQSMHASSNGGSHATKKVQKNRNNYASVECGAKILAANPEAKSTSAILIENMDLYMLNPCSTKIWFVIELCEPIQVKQLDIANYELFSSTPKDFLVSISDRYPTNKWIKLGTFHGRDERNVQSFPLDEQMYAKYVKVELLSHFGSEHFCPLSLIRVFGTSMVEEYEEIADSQYHSQELFDEDYDYPLDYNTGEDKSSKNLLGSATNAILNMVNIAANILGAKTEDLTEGNKSISENATATAAPKMPESTPVSTPVPSPEYVTTEVHTHDMEPSTPDTPKESPIVQLVQEEEEEDSTVTLLGSGEQEDESSPWFESETQIFCSELTTICCISSFSEYIYKWCSVRVYRQRSRTALSKGKDYLVLAQPPLLLPAESVDVSVLQPLSGELENTNIEREAETVVLGDLSSSMHQDDLVNHTVDAVELEPSHSQTLSQSLLLDITPEINPLPKIEVSESVEYEAGHIPSPVIPQESSVEIDNETEQKSESFSSIEKPSITYETNKVNELMDNIIKEDVNSMQIFTKLSETIVPPINTATVPDNEDGEAKMNIADTAKQTLISVVDSSSLPEVKEEEQSPEDALLRGLQRTATDFYAELQNSTDLGYANGNLVHGSNQKESVFMRLNNRIKALEVNMSLSGRYLEELSQRYRKQMEEMQKAFNKTIVKLQNTSRIAEEQDQRQTEAIQLLQAQLTNMTQLVSNLSATVAELKREVSDRQSYLVISLVLCVVLGLMLCMQRCRNTSQFDGDYISKLPKSNQYPSPKRCFSSYDDMNLKRRTSFPLMRSKSLQLTGKEVDPNDLYIVEPLKFSPEKKKKRCKYKIEKIETIKPEEPLHPIANGDIKGRKPFTNQRDFSNMGEVYHSSYKGPPSEGSSETSSQSEESYFCGISACTSLCNGQSQKTKTEKRALKRRRSKVQDQGKLIKTLIQTKSGSLPSLHDIIKGNKEITVGTFGVTAVSGHI

SEQ ID NO: 623 - DNA, 5655 bp, Homo sapiens
ggagcaaggcccccggcgggcggggaggatatggggcggcagtggcggctgcaggaggcgggcgtggacgagccggtggctgcagcggcggcggtccccggagtcctgtgaagcgcccctgtccgcgcctctgtggggccctcagagagggctgccaggacgcgagccactgaggagccgctcagccagcgccatagcccttaggactatcggtcacatcctcgcgctcctgctccggctcctccatcttggcctcggcagtggcggctgccgggaggatgtgccgccttctggcagggggaagaaggaggagaagatgaagaagcaccggcgggccttggccctggtctcctgcctctttctgtgctctctggtctggcttcccagctggcgtgtatgttgtaaagagagttcttcagcttcagcgtcatcatattactctcaagatgacaactgcgcactagaaaatgaagatgtacaattccagaaaaaggatgaaagagagggacctatcaatgccgaatcattgggaaaatcaggttcaaatttacctatttctccaaaagaacataaattaaaagatgattctattgtggatgtacaaaatacagagtcaaaaaagttaagtccaccggtggtggagacactccctacagttgatttgcatgaagagtcttccaatgcagttgtggacagtgaaactgttgaaaatatttccagctcatctacctcagaaatcactccaatctcaaagcttgatgaaatagaaaaatctggtactattccgatagccaaaccaagtgaaactgagcagtctgaaactgattgtgatgttggtgaggcccttgatgctagtgctccaattgaacaaccttcctttgtcagtccacctgacagccttgttggccagcatatagaaaatgtatcatcttcacatggtaaaggaaagataacaaaatcagaatttgaatcaaaagtttcagcaagtgaacagggcggtggtgatccaaaatctgcattgaatgcttcagataatttaaaaaatgagagctctgattatacaaaaccaggagacattgaccctacatcagtagcaagtcccaaagatccagaagatataccaacatttgatgaatggaagaagaaagttatggaagtagaaaaagaaaaaagtcagtcgatgcatgcatcttctaatggaggttcacatgccaccaaaaaggtccagaaaaatcgaaataattatgcctcagtagaatgtggtgccaaaattctagcagctaatccagaagccaagagcacatctgctattcttatagaaaatatggatctttacatgttgaatccttgcagcactaaaatttggtttgttattgaactttgtgaaccaattcaagtaaaacagcttgatattgcaaattatgaattattttcttctactcctaaagattttctggtttctatcagtgacagatatccaacaaataagtggattaagctgggtacttttcatggtagagatgagcggaatgtacagagtttccctttagatgaacagatgtatgcaaaatatgtcaagatgttcatcaagtacataaaggttgagttgctatcacattttggatcagagcacttttgtccattaagccttataagggtatttggcactagcatggtggaagaatatgaagaaattgctgattcccagtatcactcagaacgccaggaactatttgatgaggactatgattatccactggattataatactggagaggataaatcctcaaaaaatcttcttggttctgctacaaatgccattctaaatatggtgaatattgctgctaatattctgggagcaaaaactgaagacctgacagaaggaaataaaagtatatctgagaatgccactgccacagctgcacctaaaatgcctgaatcaactcctgtttcaactcctgttccatctcctgagtatgtaaccactgaagtacacacacatgacatggagccgtcaacaccagatactccaaaagagagtcccattgtacagttagttcaagaggaggaagaggaggcaagtccatctacagtgacccttctgggcagcggtgaacaggaagatgaatcatcaccctggtttgagtcagagacacaaatattttgcagtgaactgaccacaatttgttgtatttctagtttttcagaatacatatataaatggtgttcagttagagttgctctttatcggcagcgcagccgaactgctttgagtaaaggaaaagattatcttgtgttagctcaaccacccttactacttcctgcggaatcagtagatgtttcagtattgcaacctctgagtggagaattggaaaatacgaatatagaaagggaagctgaaactgttgttctgggtgatttaagtagtagtatgcaccaggatgacttggtgaatcacactgtagatgcagttgaacttgaaccaagccattctcaaactctttctcagtctcttcttttagatattaccccagaaatcaatcccttgcctaaaatagaagtatctgagtctgttgaatatgaggcaggacatataccatcaccagtgattccccaagagagttctgttgagatcgataatgaaacagaacaaaagtctgagagctttagttctatagagaaaccatctattacctatgaaacaaataaagttaatgagttaatggataatattataaaagaagatgtgaactccatgcaaattttcacaaagctgtctgaaacaatagtgccaccaataaatacagccactgtacccgacaatgaagatggggaagccaaaatgaatatagctgacacagcaaagcaaactttgatttctgttgtggattcttcttcattacctgaagtaaaagaagaagaacagtctccagaagatgcccttttgagagggttacagaggacagctacagatttttatgctgaattgcaaaattctacagatctaggatatgctaatggaaatcttgtacatggatcaaaccaaaaggagtcagtatttatgagacttaataatcgtattaaagccttagaagttaacatgtctctcagtggtcgctatctggaggagcttagccaaaggtaccgaaaacaaatggaagaaatgcaaaaggctttcaataaaacaatcgtgaaacttcagaatacttcaagaatagcagaggagcaggatcagcggcaaactgaagccatccagttgctacaggcacagctgaccaacatgacacagcttgtttcaaatttatcagcaacagtagcagaattgaaacgggaggtttcagatcgacaaagctatcttgtcatatctttggttctttgtgttgtcttgggactgatgctttgtatgcagcgttgtcgaaatacttctcaatttgatggagattatatttcaaaacttcctaaaagtaatcagtatccaagccctaaaaggtgtttctcttcctatgatgatatgaatttgaaaagaagaacttcattcccactcatgagatccaagtctctacagttaactggcaaagaagtagacccaaatgatttgtacattgtagaacccctcaagttttctccagaaaagaagaagaagcgctgcaagtacaaaattgaaaaaattgagaccataaagcctgaagaaccattgcaccccatagccaatggcgacataaaaggaagaaagccctttacgaaccagagagatttttctaatatgggagaagtttatcactcttcttataaaggtcctccatctgaaggaagctcagaaacttcatcacagtcagaagagtcctatttttgtggcatttcagcttgcacaagtctgtgcaatggacagtctcaaaagacaaaaactgagaagagggctttaaaacgaagacgatctaaagtccaagaccaaggaaaattgataaaaactctaatacagactaagtcgggatcattgccgagcctgcatgacataatcaaaggaaacaaagagatcaccgtgggaacatttggtgttacagcagtctcgggacatatctaaaattaattgaacttttcatacagaagacttttttgttgttgttctttgaagaacagtctgtagtatttgaagggtttgggggagggagaaaatattaatgggaaaggcattcagaaattatggtttctacctttttaaaaagtagatgggattgtgtcaatcttggttaatgagctacagttttacaaagctgatcacttcctataaggacaatggtagacattttataaagatgttttttcacaagattaattactgggacaaaagtaatttggaagcccagttccttaggtgggataggaatgaaagcctaaacctcttcctttagctttgttcctatttcttgcaccttcccatatttatgtgccttttgtctatttataatgccactggaagaggagggataactttttctgttatttgatttcttttataactttgttaggtttttgaagctgcaaacactacaatgctttgagggggtctgtgcctgaagctcaggagtgtggatcagacagtctaaagatcctaaaaacttgccaactggatctttgtttagcaaactcactggaaatgaacacttaatggaatttttaagtctgttctgttaggtagatggtgatgctcttgttattttcacttattcagactggattacttcttacttagttactaactcaatgaggaaaaatccctacaggatctttttttgcaaacaactgatatatgcagacaaatttttgacaaattcaccttttaaacacacttaaccatttgtgaaggttttctttagcttacattttaaacatacacaataaacactaatcctccaaactttcactgtttttattagtatgaatataaaatttgaaggtttggccaattagtacaagtctcatgatataatcactgcctgcatacatatgcacagatccagttagtgagtttgtcaagcttaatctaattggttaagtctaaagagattattattccttgatgtttgctttgtattggctacaaatgtgcagaggtaatacatatgtgatgtcgatgtctctgtctttttttttgtctttaaaaaataattggcagcaactgtatttgaataaaatgatttcttagtatgattgtacagtaatgaatgaaagtggaacatgtttctttttgaaagggagagaattgaccatttattgttgtgatgtttaagttataacttattgagcacttttagtagtgataactgtttttaaacttgcctaatacctttcttgggtattgtttgtaatgtgacttatttaacgccttttttgtttgtttaagttgctgctttaggttaacagcgtgttttagaagatttaaatttctttcctgtctgcacaattagctattcagagcaagagggcctgattttatagaagccccttgaaaagaggtccagatgagagcagagatacagtgagaaattatgtgatctgtgtgttgtgggaagagaattttcaatatgtaactacggagctgtagtgccattagaaactgtgaatttccaaataaatctgaacacttgtctttattaa

SEQ ID NO: 624 - protein, 1244 aa, Homo sapiens
MKKHRRALVSCLFLCSLVWLPSWRVCCKESSSASASSYYSQDDNCALENEDVQFQKKDEREGPINAESLGKSGSNLPISPKEHKLKDDSIVDVQNTESKKLSPPVVETLPTVDLHEESSNAVVDSETVENISSSSTSEITPISKLDEIEKSGTIPIAKPSETEQSETDCDVGEALDASAPIEQPSFVSPPDSLVGQHIENVSSSHGKGKITKSEFESKVSASEQGGGDPKSALNASDNLKNESSDYTKPGDIDPTSVDKDPEDIPTFDEWKKKVMEVEKEKSQSMHASSNGGSHATKKVQKNRNNYASVECGAKILAANPEAKSTSAILIENMDLYMLNPCSTKIWFVIELCEPIQVKQLDIANYELFSSTPKDFLVSISDRYPTNKWIKLGTFHGRDERNVQSFPLDEQMYAKYVKMFIKYIKVELLSHFGSEHFCPLSLIRVFGTSMVEEYEEIADSQYHSQELFDEDYDYPLDYNTGEDKSSKNLLGSATNAILNMVNIAANILGAKTEDLTEGNKSISENATATAAPKMPESTPVSTPVPSPEYVTTEVHTHDMEPSTPDTPKESPIVQLVQEEEEEDSTVTLLGSGEQEDESSPWFESETQIFCSELTTICCISSFSEYIYKWCSVRVYRQRSRTALSKGKDYLVLAQPPLLLPAESVDVSVLQPLSGELENTNIEREAETVVLGDLSSSMHQDDLVNHTVDAVELEPSHSQTLSQSLLLDITPEINPLPKIEVSESVEYEAGHIPSPVIPQESSVEIDNETEQKSESFSSIEKPSITYETNKVNELMDNIIKEDVNSMQIFTKLSETIVPPINTATVPDNEDGEAKMNIADTAKQTLISVVDSSSLPEVKEEEQSPEDALLRGLQRTATDFYAELQNSTDLGYANGNLVHGSNQKESVFMRLNNRIKALEVNMSLSGRYLEELSQRYRKQMEEMQKAFNKTIVKLQNTSRIAEEQDQRQTEAIQLLQAQLTNMTQLVSNLSATVAELKREVSDRQSYLVISLVLCVVLGLMLCMQRCRNTSQFDGDYISKLPKSNQYPSPKRCFSSYDDMNLKRRTSFPLMRSKSLQLTGKEVDPNDLYIVEPLKFSPEKKKKRCKYKIEKIETIKPEEPLHPIANGDIKGRKPFTNQRDFSNMGEVYHSSYKGPPSEGSSETSSQSEESYFCGISACTSLCNGQSQKTKTEKRALKRRRSKVQDQGKLIKTLIQTKSGSLPSLHDIIKGNKEITVGTFGVTAVSGHI

SEQ ID NO: 625 - DNA, 88607 bp, Mus musculus
  misc_feature (1)...(88607): n = A,T,C or G
agacagagattacaagagtcttgcatctatctcaggaccgaggacatagctcatgaatattatatacttcttgagtggatattgaatgggaatatgctatatagcatgtgcttgtataatttgagtttgaggccagcatgggctacaggaaaccacacttaaagaaaaatgatctagttattttcttttcccttttctcttctctttcttccttcctttgacctcacacattctaccattgagctacatgccagcccttaaaatcactctgagagaggattttgttaaaagttgcccaagctagccttaaacttagaatcctcctgtctccaccttctgggtctgtgggatcacaggtgcatatcaccaaacctggcttacatcattttttattatgcatctcaataaatccacaaagcttaataaaatttcaaggaaaaggctctttcaaataaaggtaaagatggaaaggcaagcccagagccaccctagttgctttaggtgacaggccatggtgacttggatcacagtcactgtgagtggaagagaaaagcaaagacctgactattaactgcatgtggagaataaatactccatatggaggagagaatggagtctgggggttttcccagatttctggtatgaacaaattatgtagatggtgctactgcaggttgagttgctaggaaacaaaactatgcacgtggtgctttggagaacaccagcctaaggagagaaaaagaagcagacgtaggctgagaagctgacctagcagccaagggcagcccatgcgggactctggcacgtggagcgaaggcaggctgtggggatatctgatgaggtgacatggccagacctctacagctccacaccaaccaacaggaaaatcagctccctttaaacgatgccatccttcaaacagggctccgagcccagagccatcctcagcctgcactcccaatagctaacaaaacaaaacatttctgctcagcagaagacctctctgcagcacctcccactgttcctgtggctggcagctctctcctccacacacagaaaactccttccttggatcaataacaattatatattctataaactcacaagcatcagccaagtagtataggggtttgttaggaacgactgacctgtgacagagttagttacttctctccgctatgacaaaagtcattggtaggaacaactagagggaggctggattggtttagctttagagtaggggcttgtggtcccctggaggcataaattttccacaactgattttaataaggattcaactgcttctccagcccaccacccaggaaaggtagtggaagagaaaagttattagggcacaggggaagtagatttgtttagaaatagttctttgggggagcaagtccaaccttcattgtcaggatatcagcagctcagtcccatagcaaacatcaaatacaaatcagcagtcgaagtccagtcctcttgacaagcagacaccacgcaagaaccatcagctgcagttcagtcctgaagaagccacgaggctctcccaccagcccagggctgaggaagtggccagaagccacaggaacctcacaaaaagttctttggtgagtttcttctctctggcgtcaccacttgtggagctcggcaaacacaatgtaaggtgaaccaatatatgtgtgtcattagcaaagactattgaggtggagcaaagcaaaccagtgctcaagatcccactatttgtggggtcatatatattcatatatatatatatatatatatgtatacactccatctcgcatccttttacacgtcagctatagcaaaacatctttccacctgtgtctgcttcaaggaaatgtcaactgactttccaaagaaaccaggagtttcctcttcagtccatcatggcagggaaggactgatgaagatgctctaaatgataagggaaatatagagcagagattgattactcacgtggtggccctaccagaaaccagattgtacacaggaaggatccaggagcaacctactatttaggacctgccatcagtaacctactcaaagtttccaaactgtcctccaaacgtagtgggccccgctggagacaaagggttcaattttaggaaggggacattccaatctacaagggaattgtattgtattgtattgtaattttttttcatacaatatattctgattatggttagctctcctgtcctggctagttgacataagctagagggaacctcaattgagaaaatgcctccataagatctaactgtaaggcattttcttaatgggggagggcccagctcattgtaggtggactcacccctgagctggtagtcttgggttctataagaaagcaggctgagcaggtcatgggaagcaggccagtaagcagcacccctccatgaccagtgtatcagctcctgcctccaggttcctgccctgtttgagtcctatcatgacttccttcagtgatgaatatgggtatgaaagtctaagccaaataaacccagtcttctcccagttgctttggtcatggcggttcatcaaagcaatagtaagcctaactgaaacaccttccccaactcctcccagatcctccttacggttccacccacccaagcccatatccttccttcctctcagaaaataagcaagaatctgatagcagtagtaataagaaaataaaaacatgccgggcggtggtggcgcacgcctttaatcccagcacttgggaggcagaggcaggtggatttctgagctcgaggccagcctggtctacagagtgagttccaggacagccagggctacacagagaaaccctgtctcaaacaaacaaacaaaaaaacaaaaaataaaaaataaaaacaaaccagaacaggacaaatgggtgtggggggggcacacatacagacacaaagagacacacattatgcacacagaaatctcataaaacataaaactggaaaccataatatataagcagaagagttgtaaggttaaaataaaatgcccatataaagcatgagacgaaaacctccaaaaatacattgagttcattttgtgttagccatctaccagggggcatggggcctgcttttaagtgtggcaagtatacgcagcgagactccattggaaataactaatttttccattttgagcagttatcaattagtgttagattataggttaggggtgggttatgggttgggtaggtatcatggttaaatgtaaagtaatgtgtagcattattttattagttgctacattgagatctccaagttaaaagcttcatatagggaccagtgtgacagcttggtaggtaaaggcacttgtcatgtgaacctggcaacctgagtgtggttcccagagcctgcagtggaaagaaagaatcgactccttctgactttcctggatgtgcaatgatgcatgatatcctaagcgtgcctctatgcatgcagtacacgtgtacaagaagtacatactttttgtaagtttcatttaaccatactgactactggaacaactagttccagttgagtgtaatttacccagggtactaaatacttgcaaagctttttagtgttctttctccctactccaggtttctcttctttcttccaagactatgtgccatatgaagttaagagtggcactgtgctgagcactgaactaattcccatttgaagcaattatctcaatgagactctaatcaactcgaagaagtacttctgaaacaaccatttaattaaccccagcagaaataagaatggagaatacaaagaaactgataaacaaggactaagctagacatgggctccagactgtggcacaggaaaattccctcttccacaggaatcgctcaaaatgcctggttgccaaggagcaaaaaaataagatttgaaactgggtagcttcacttgtgtactgaatgtacaatgggttggacagaaaataaataaagggtccttattctttgaaaaatgctagaagcaacagccaggcttgtaatttcagaaataattgagtgctgtaagtacatttgtcagcattatctcaaatctctattttccggcctaaaaatatttaaaaagcatttttcctgtatctccaattaccaccacttacaccccgttttaactgttttctcttctgcatttgctgcccctgaatcacttcttagagatcttccccctctgatcccagcctcatgctgtgactcacttcctggctcaggtgaactcattcaagaaagcttaaggcaaaactgggacccaagtcttctctgtcttccatctcccttcctcctccctcctccccttactgctccagccctgagtaacatccctgataatgttctctgctctctaaccgcgttgaaccctcttgacttggctcaccacaccactctaagaacttagattctctcagcttaaatgttacaaatacgtagagtggacagtgtaaatcacaattactccaaaatgcattagcacatgatgtgacaaaatttaaccaaaatgtatcttttattcaattataaaaagttttttagctaattaataatagattgacaaataaaaatattatcgtatgttacatataatgtaaatgtttatatgttacatatattgtaatatttcacataaaacatatgagttggcaaaaggcagtttctttttgcactgtatcttattgagtgtgtaagcatgtgtgtgtgtgagtgtgtatgtgtgtgagtgtatttatgcaacaatgtgccacatgtgctctgggtactcttggttcacaagatccctaaaagttcacaccaaggtgtatgagctgtctgatatggatgctagaaacataacttgggttcattggaggtgaagcaagaacccatgagccatctctccagccccaggggtggttcctcgaagcaatggcaatattgttcttgttttcgtttacagacttggagcatctgtagttattaataaagtaaggctacatttttacatagtgcttgattattatggctttcattatatccaatccatcatgtctcacagtcttactaagtatgagacatcctggttttgtttgttgaagctgagtctttctatagagcccaagctggcctccaactttcagccctccttcctgtctcatcttccaagtttccacatgctgggcttccagctcgttgtattatttatttgtttgcttgtttgtttgagttggtatttcactagatggccttagctgggacttgctatgctaaggctgggtttgaacgcacagagatccacctggtcctgcctccagagtgtttgataaaggggtgcattaccactctcagccttgctgattgttttatttgtaatctaatgtctcatacatttttggtgcctccagctttctggaatcaaacaaagataaagtaaacattttaattaagtaaaatttatttatttttgtttttgaggcagggtctctctatgtagtcctggctgtcctggaactcgatctgtaggagttgttcaagctggcttcaaactcaatagagagtcctcacctgcctctctctatcaagtgccattaaaggtttatgccaccacacccagataagtaaatattttatttttaaaaatcattagtaaataccactgaacaatcattaaaaaaaaagattatattgtttggggagtcaatttgttttcagttaaaaactagtttgcctgattccataccaccaactgcaaatctaatgatagactaaaattattgtttgaaaagccacaagtttttttttttaattttccatgaaacattttttgttgtgtcaaatatatctacagttgttgaggtgtttggagctgcccaagcaacttaagacaaaggaaagttgtttatttatttttatgtgtatatacgtacttatgtggtatgtgtacatatacatgcgtatgtggcatgtgtatatggatgttcacatgcatggacatgtgcacaagtgtgtggcatggatgtgaaggtgtgatattgacatcagagtcctcatagctttccagttgaaccagagcacacagatatggctagcctagtcagccagcttggctttggatccctgtggatatcatctgagtattgggaattacaggtggctgccatgcctacttgacagttatatggtgttttatttagggtttccactgctgtgaagagacaccatggccaaggcaagtcttataaaggcaaacatttaattggggctggcttatagtttcagcggtttaatccattatcatcatagctggaagcatcataacatgcaggcagacacggtgctggagaaggagctcagagttctgcatcttgatttgaaggcaattaggagacactcttccacaggcagtcatgaggggaatctcctctgcactaggtgaagcttgaacatagactctcaaagcccccctacacagtgacccatttcctccaacaaaccatacgtcctaatagtgccacttccatgggacaagcatattcaaaccaccacatatgggttgtggggatccaaattccagttctaacccttgcacaccaagtgctttacccactaagtcattgggtcagtgcaaaaagtgtttaaaaagtaacagttttattacattgcatgtcttgtgtagaggttcctgacatttgcacccatggaaaggagatgataacttgtgggaacttgttctccaccgtgagtcctgggaattgaactcaggctatcaggcttggtggcatgcatctttactcatcaaagcatctcaccagcaccaaaactagtaattggctttgggcgtgaaactaacacgtggagatttcagttagattctccctcctctcaccaccaaaagaaatgagtaatgaggaaaataaaactgccctctgagagttaaactttaagattgcatacagtgagcaccagtagagataagtaaacttgcctttaaagcacacactgacctgactccactgtgatttgatttttattgaaagaacattgctaagaggtagctatggaaacagaggaaggaacacacaggggcacttcagggcaggtagccatccaagtgctgtcaaggagaaacgaagcctgaatcaaaatcacagcaggatgtccctgctatattggcaatcaatgtagaaaactgcaaccactagaaactcaatatttatttcaacttttgaaacaaaaccatcctcttgtggaaccagataagtcaagaaatgtcctcgtatataacacttgttctgaacctctgctcaccaagcatcttctgacccctttggtttcttatagtaaatgctgtatctagccaggagcggatcccgtgccttgaatcccagtattcaggaggaaaaaataggtagataactggcttatcctgggcaatggtccatgcctttaatcttggatcaagatcaacctggtctacctggtctacttagtgagtttcaggacagccagagctacatagtgagaccatgtcgggggtgggggggggtgtctctcaccagctctgcagttttgagcatggatgtatacaagtcacagtttgtgatggctattctgggttatcaacttgactactatctggaattaactaaaacccacaaatgtggaggggcttgcctgtgaggatttgtttgtttgcttgcttaatttgaagtggcaagatccacttctttcttttttctttttcgagacaggatttttctgtgtagccccaactgtcctggaactcactctgtagaccaggctagcctggaattcagaaatcctcctgcctctgcctcccaagcgctgggattaaaggcgtgtgccaccactgcccagtggaagatccacttctaaactgtatctttgagtttagaaaaaaaagttaggagtgccgactgtcctgagttcaaatcccagcaaccacatggtggctcacaaccatccgtaatgagatctgatgccctcttctggagtgtcgggaagacagctacagtgtacttacatataataaataaataaatacataaatacataaatattagaaaacatacctttaatcaggatcttttaaggtgggaagactcacctctaatctgggctatgccttcagctggaagcctatcctatatataaggacattgaagaaggtagcttttgctatttgtcttctagctctttcctcactaacaagagtccatttcttcactggtattaaagtcttctttgggattccagtatgtactgaaaaccaactgagaaatctagccttgtagactgaaaaacctattgaattcttggaccttctgttcattggcagccattgttggattagctataccagagtccataaatcattctaacaaaatctctttctatatatacatagagattcattctataaattctgttactctagagaaccctaatgcacaactcttagaaactcatgaattaatattctgtttgtacatgtcagtctcataaccaggtagatgtcagcatatttgattgttggagggatcctgcattgctcaagaaagatacttcaagtccaggatacagaagactggttctaatggattgtgggaaaataaccaaggtgttttcttggtgaaaagacaggcctctctctgtcctgttctatcaatcagcaaattatgtctcattttggaaggtctctgaaggggctaagggttatagttcagttggattagcacttgcctaacatgttgaaggcaagccccagattcgagccccagaaatgcaaagcaaacaaaatctaaaacaaatgatcacaaatgtcaattggggaagaagttacttgtggttactgcgctattattttatggttgttctaacgttgtggtatcaccccatgaatacatgccagttgcaagcggaggagtttactcagaccaggacaagaatctttggatttattatacactatagatatctcataaagtagagaaatatcacatactcgtggattaccttctttccgttggggaaaggaagaccaaacctagagacttgcatatatgtgacaagatactacgcggcactgaggtacatgctcagcccccaggtagaatattatcattttccttcctcacttcgggtactgccttgtctctactatacacttacctagtaaacatctgcatgaatgtctctttttttttttttttttttttttttggctttcgagacagggtttctctgtatagccatggctgtcctggaactcactttgtagaccaggctggccttgaactcagaaatccacctgcctctgcctcccaagtgctgggattaaaggcgtacaccaccacggcccggcctgcatgagtgactcttaactgttagttttctctgttaggtagttgttccaagaggtaaacattgccagaggagtcagaaataaacagtgccttattttacaccaaaattacaaatgccgaaggtggcctcagcaaagcacgccagtcgcttttgtccctaacacttggattatttttttcactccgaggtaacttcggtcttctcaaattgccaccacaccatggcccctcactttgccccccccccccccctaagaacattcggtcaaagcgcaggttgtaaacgtttatgttcctccatcagttgttgtcaatgcacggagacaaaccaagtcgtgattcctcacggagggctcaaggtttttggaatcttcccaggtggaaaagctttgtctccgaaatggctctgcttgacgaactccctccttccagtaggaggtagcgttgccctccgccgcagtcgagaagcggcggaggctgtcacgtgaccccgcagcctcaacccctccaccccccccggggcggtcttgcggagatttgccttacgtacgcaacgtcatgacgtagcacgtaggggctggctagccgccatcttgcttctttttctcgctcgctctcaccctctcaggaggtagcgaaagtgctttggcggtttgtacggcggtggctcgggctttcgggaccgagcggccctgcggacggtctctcgaggcaatctcccctcccctgaccctgatccgtccggggcgagccccttggaagcgcgcagacttggttctcaaccctggcgggtaaggagagcgagggcgtccggaccgtgaagaggcccgatggaggagggagggaaggcacgggcgctggagccaggcctgggggcccgcggcgtctctccctgggctcccggcgtcgtgctgtccgcggagatccggagcagggctcgtcgcccatgtgcgcggcgtgtgctgcggcggggcggccctgcgatggccgagggagcctccgcccgcgcggggcctgcgcgcgccgtttttccacggcgtggaggacggtgcccgtggcggctccgagcgctcttagtgcctgcggatgctcctgtggtgatggctggcgtttgcagccagcggtgtgtagtccagggcggtcgtagaggctctaccaggacccaggaccaacgaaccccacttccgctggggacaagctgaacaacttcttggaggatttgagtagtcttttcctccctctaggccgctccagcccggcatttgtgggaatacggctcggctgctgcctgattttcagagagagcgtttagtattactggttgctagagtagagaccctagttaagaccgaagaaaaatagcatgggagccagtgaggactcttgcttgattttgcatataaggaccgctctgatctctttaaaggggatgtatatttgtttgaagtgtgttcaagatctttggggtggggggatccaacttgcctagtaattcctgactcttaaaactacccggatttccgcattggctggtcttcaacctcggttcataaattcataccccagcaggatacttagaattgtacagtaggcggccctcctgttagggtttctctttgggaatgcaccagaagaatcggaagatgcttgcttcatcgagtgctcaggagtcaattcccgctaatagacgttacagagagggtggtatgaagcggccaccacgtctgacctctagcattttttaaaagtagatttaagcttccatgttggtcattaagatgctgctttggctggagccatttttaggtgtgtgtcacagatgcactgcagcatcttttctggctggctccaaatgcattgattctccaaaaattagaaatagattgagtttgcatatagaaaagaagtttttatatgatttttctgggatgaatttgtcataataagcttttgggtttttttggggggggtgtctgtaggtgtgtgtgaagaacatagaatgctggctgatctctcattacttaacctctaactgtatgctctcaagacctttatatacattatcctttttgatcctagtctttgaggaaggagctcttatacttggtttacagatgaggacaagatatttgagagatcgaagtaatttgatcaaggtcacaaatttgtagtggtgctgtagtcaaagccatactttctaaacccagaggggatgctctgaactatcaaagtgttcatttggtcttgtacatttataattgttgctaaaataaggcacatttttaactggtactttttctttagcttgcttgggtgtttgaacattgttacatgtgaaggttaaaatgctgccagatgtaaacgtagtgtctgtttggtgtcataggaagactaggggaagacagaaatgggcttgaggccagcctaggctgcgtagtgagagcttgtgaatgttcagttttgttttgtttttgagaagtgattgtgagcccatcccttcattataaactaaagatgatatcagtacctctcaggcttgctgtagaatttaagactgagtaatgctcttgttactgtggttagtgcatagtaagtaaaaggacagctaaagatgaagggaaagcaggagagtcctggaagaagaaactagtgttcaagcagtaaaatctgttctcagaatagcctaagtctttggatccgtaagtagtttctttttcctcttccactcctctttacatttacatactgcactttatttcataagactttctcctttgtgctctgtatagtaaataaccctggcatcagttctagctcagaatgaagtgcagaatttcttcaatgtctttgaatataatactgtttccttgagtctatgtgctacccccaaacccccacttccagttattagttagctaggtggtagctttttatgtaatttctgtcattctgatatctgatagtaagtaaaaggacagctaaagatgaagggaaagcaggagagtcctggaagaagaaactagtgtttctaagagttcatcattgataaaatgcaaaagaagtcaattacatacatgtttaggaaactgaatcctcttgttttgggggatgtttgttttgaggcaaaggctctcttacagagccctggctgttctggagttctgtatatcaggctctggcctcaaactcaagagatcctcctgtctcagactcctgggtgctgagattaaaggtgagtgctaccgtgcccagcagaaagcatcccacaaggaaagcagcctgcagttaatacccaagttctgaccaaaacactttgacttcagaaaagcaggatttatttgttgccttagagtggagtgacacagtatgtgttaattgttgctaagaattctgagttaatgttagtttcctgagtcacagcatttttaggtcagtgataccatagatgtatcaatcagagtttctttgtggctttaagaattctttagagtcacttgtgttgtgttttccttttagagctaactataaacttgtctttgtaccacttaccattttattctagagtttagtagcaggacagtcatgtttaggagcctgtgtctttgctagaagagccagtcaaatgaggttattactgaagttcaacaagcaacttttgtttcattggcagatattggcatatattacctaggatactaaaagtattactgccagtgtattggattcacccttagaggcactactggatgctgaatattaaaggaaggcccaactagcatatagagaaagcattactagtattttttaaaacttatccaggaagccatgtcatggtagctatctttaatcctaacactgaggcagaggcaggctgaactgtatgagttgaaggacggccagggctacagacacaaagaagccctgtctcacaaaactgctatctaggaatttttcccagttagtcttcctttcctgggcctttcccatggttctctcacttagcttatatggtgggtgtcatagtttatttacattgaatagttagaaataccaaagattgcatcctcaaataaggttaagtgagccaatactcattgtgaggctgatttgcatcacatttttctggttttatttgagactggttctaactggcttagaagtcattgtgtagactaggctgcccttgaactcacatattggcctactacctctgcctccccagagctggaattaaataaaggcttgtggccccatagctggcttaattttcagaggagtgtggctttgtttcttattaccaagatacttagtcttaaagaagaatggttagagttaccaagagcaggaggcagaactctcttgagttccaggcttccctggactgcattaataaggtgtgtgttagtggggggttaccatagaaccggagagagcttttgtgtggcacccatgaggcttaggtttagtccctaatactgcccttcacaccacagaaagctcccttataattttaggattaatacctgaggatgaaattaaagtcatgtgattaaactagagaaaagttggtgtagaaaaaaaaatccactcagaaaaatatatcatgtctggttaattacgataaaggaagacattatggctaggagataaaaattgtggggcagaaaaagtgattcagtgggttagagtgcttgctgtgaaagcaagagaacctgggttcaaatctccagcactcatgaacatccattgctacacgggcctgtaaccaagagtagtacacgcccagttcagtgagagactctcaaaaacaaggtagagagtcttagaagactcctgacagtttctggtctctgaatataggcacatccacacaaatatcaataattgtaattttcttactgtgtgtgtgtttgtgtgtgttcctaagtttcacgccatagctcagagcttggcctcaaactcctacctcagcctccctggtgctaacattacgggcattaacagtcatcctcggctgaggtttttgagtgttgtgtttgaggcagaggttcattataatccacatcctcctgcctcagctttccaagtactggggttacaggtgtgttccagaattagggttggtcggtcttgcacatgcttgacaactattctacctccaagctatagcctaattcctattcctttttaatatttgccgaggactctacccagccctagggtaagactgtttggggaggtggggcactacggtaaactttacaggaggattcttacattacaacactagaaaactttttctcttacgttgatagttatgattacctggctagtaagttttgactttgtcttcaacccatgtgttaatactttatttccccatttccacgccctgaccccacctgtgtctctttgtgtattcagatttgtcacccttttaaacctcaggcttcagactactggaattacaggtgaatttacttttaattaagtaaatttgaaattaaaatgtacatgattattatttggtgataagtttttttttaaccatctaatatctttaaaaataaacatgtaaactcttaaattctaatctgtgggccacttcaaattagcattccaccagtctgtctttccatccgttggaacataactgctataaaaaatgagtggtggataagatcaagcaacagttgaggtaatgaagaccaaaagtggttaaaagcttagaatggaatagattcatgaaacaggaagagacagcggtgcagaaaaggatgccaactagtcctaaataggtacttgacaattgtactaggatgtcaacaagagaattacgagagtgattaagcaaagctactacagatatgcgagaaggccataatataacatagtatgagtactaaagttcagtgtaagaaacatttcttaaatctgtggtaaacagcctctgactgaggtgacatatccttggtgaccccaaaagacttttaagtcaagtactggggggtggaaggttaagaggcaaggtggttagaaaaagtaatgaaaccttgagtttcaggtgtttcaatacttgaacgctgaactaactgtatttgaacttaggtttagttcttttcagttcgtatcagctgtcaagttcaggtctggtctcttgactttacaaagagaccattaaatgtgttctgtatcctttgaacttaatattctgtggtaccacatgtcatcaatcttgcctttatttatttgcctatttatttttgggatttggaggtgggtctctctgtagccatggctgtcctggaattcactgtgttgaccaggctggtctcagtctcacagagatcagcatgcctcttgtctgctgggatcaaaggtaggggctactgtgtctagctttagccatatttaaagtacaatcatgggagattagattaaaaaacatcactctggcagacaggcgggtggtattctgtgagtttaaggccagacaggtcttcagagagttccagttcaggtatggcatacatattgagatcccatctcaaacaagtcactaaattttgagtctgaagaaaagagatagtaattcagtcttccttcctctttccagctggtaatgtgtaagtacaggactgctgttgtggttctgtggtcagtgcactacacaaaggtactaggatgaaaaagataacaagaacttaagtgtagcccatcttccagttatgtgctcttttaaagataccagcttcttgctgatagaactctagttatttccagaaagatacattttcctatttattcagaggctttgtagaggcctttggaacaccagaaacaggctggaaaagtggatcagtggctaagaacacttgtgcttttaccaaggcgccaggtttggttctcagcatccacatggtggctcacaactgtctatacctccagttccatttttaatgcatattaaagatgtatattaaggccaggcagaggctggcctatgaatttgaggacaaccagggcacagagaaaccttgtctctaagaaaccaaaacatcccccactccaaaaaaaaaaaaagatggatattataacttactaaatacttttagtataaatgaaaaatggcagaggcaggcggatttctgagttcgaggccagcctggtctacagagtgagttccaggacagccagggctacacagagaaaccctgtctcaaaaaaaacaaacaacaacaaaaaaaaatgatgtgttaaatactatgtaagagcattttaagagttattatttagctaagcagtcatggcacatctttaatctcggcactcaagaggcagaggtaggcaaatttctgtttgaagccagccttgtctttcttagtgagttccaggacaatactgagaaaccttgtctgaaaaacaaaagcagaaagagtccttatttaatacaattttatcttcaaacattttgtttgaattcaagttttgattttttttcaaaatatggctattgtatggtagtctaattcgagtctgctttgagaatttaaattttttagatcaaatcaaagaagcatagtatgggaggtctagaatagctgttgaaagttaggaaagtggatcatacaaatattagtttaaaagtgggaaaagaaagctgaatgcttcttcatgcccgggagagagtgagtcactgctggcttcaggtcatcctgggctacttaataagtgactttctcttaaaacaaaaatcaaagagtatttctggtcaggttgtacaaagacaaaacatcttccaaggcaggaggagtattctgacactttgaagatgaaaaaggaaggtgtcgtgtaatatgtatggcaaatttgaacatggaaagaatgaaagttagaacgtgtaagggagggatgcacacgctcttttaaggtttgaagaccaacgtttcagtgatattggaaggatgctatccttaaaattccagcccctactgtaaccctttggttatgtggaagatggagaaggaagatgcgcattgtaaaataattcttttcctcatagcttttaacattttggccctccctttactgcggtcatctctcacagatctcatcagttcaatgtttgactggcccgaaagccccagggagcctcctgtctgtctcctcaactctggcatttgaggtgctccacctcacctccactgcatcccagtcctcatattctcattcaggtttgcaaagtccattttcccaccacgcgctctctctctccagctctaggacagggctttttaacctttccacatgtctgtctgtctctctctctctttgtctgtggtccaggtatatgaaatatacaaattaaatatttagtggtgattatgaatttattttaatacagttcttttggtattttactttttaaagataaaaactttacaggtgattgtttggttttttgcataaataagttttgtttaagtgtttgatttgctgaatgtaaaaatcttaaacatttttcaaagactgactggtacagtgcagagaatgacattttgcatatcagaagtatgttaaggaccgtcttagaaatttgtaggaattgtattgtagactggaatgagcttgacaaagccatcaacttgagaagcaattttaaaatcaagcagtatagcataatacagtctgaaagtaaactaattagatacatcctgaggaatattgttttccataattaaaccattttacatttctatacaagcaaaaaacgctatatatacagtaaaacactgaaattcatagcacacaggcttcaccagtattaaccgaggtgttacaggctgcattgttgcacggcatgaggttatacccggtgaagttgtccagacagcatggttgagtgcttccagaaatgctttggattcattgtaggattgcaaattcagaagccctttactgttagctacattttaggtcatgacccacataagaagctgattaatacagcagtggtttgtttgttggtttgtttggggtttttttgtacaaaagatttactagctagattgtttttctaattataaagggttttctctgtcctggaaacataattctcttgttctcataatccaggttgggtttcaacgcttgatacccctgcttccatcttataagtgctaggattataggcatgtaccaccatacccagcaatgttgtttccagttatgacctgacagttatttgtattacaccttggtttttaagaaatgatagtttttcatattttagaggccttcaacatatttgctttgcaattatagaaaaaatgtaatttaaaaccatttgatgttttctatacagagaaatgaacacttgagatggtagacagggcagttgctctgacctgatcactgcacactatgtgtgtatattttatatgtctctcacacattgagttgcgacatcatgcctcaagtatatacttgtgttaattaaaatgtgtaaaattgtaggatatcattttagacattcaaattactattgggtgcaatgggagtaagaccttagaaggtgggcaatataatagcttgcttttctacttggaagccacctgtggttgagaggtggtgattgaaggtcaccatagtcaatctttaaataagatgtatatggtaaggtactaccatatcccaaactgcaagtaccataataacattaaaactttattctacttccatcatttcttttcagagctctttattctaagaagctgatagattctttttatgtgagttatatatgtcactcctggataccccccacccctcacccccacagacacacaatgaagaaagtcaggggaaaaggaaaaggtgcccagcatataggcataggtagggagaattcattttgcttgtttcctagattcaccttcgtagaaacaagcacaatagcaaatgctgtgctttggcaaagtcatttcacagttcttgggttatctggttaattctgaaaatggagaatggcatgattttattttataataacttactttcagagttgagcatttacaaagtttatgattggcctaggttataagctggccagggtggaacctgcagtagaactagccaaactttgaatttagtatgataagttcagtagaatagttaaagtcccagatctgtacattaggtttttgtttgtttgtttgtttgttttattttggtttttcgagacagggtttctctgtcctggctgtcctggaactcactctgtagaccaggctggccttgaactaaaaaatccacctgcctgtgcctccctaagtgttgggattaaagacatgtgccacaacagcgcattagatttttattaatgcaacaatgtataaagaaattcatgtttgtggggagatagttttggaggctctctgcctgtgaaacccagtttggttacccttctcttggccataggcaatcctcctgccatagccacctgagtagctactacgattatagactcctgccacatgagaagaaattgtgtttttaaattgtggctatatagttattcttaaatactttaaaaggctgagatcttatcttatggaagcattaatatactgttgctctttcagatgtgtttatgatttcgtttgttgtgtctgctttccagctttatccaagttttaaacaagagacagaaaagaataagattaggacccaggagattcagataactcctgctcaaagcaaactccataaatggccaagtcctctaacataataaagtggctggtgtacataacgtgcctgtagtcccaacacttgggaaatagaaacaggaggattggaaggtcagaaacatcacctacataatgtgaaggtgagaccaacttaaactgcattagacccagtttcaaataaattagcatgatgtcacatataaccagtacacggctctcatatatcattagatgacttaccacatctaaactatgtaaatgctgcataaatagttacactgtattgatgttttttgtggctttttaagaaaggtatttatagtttttttttttaatatttcctatcaaaaaattggtttgtgggttctgtacttcattcatatcataaagtgggtttccacttttttgtatttagggggtattaagcctggcacttgagtaatgcttcacaaacagaagattgaagaattaaataactttctagaaggtttatattttgtgaataccttgaaactaggatggcttggggtgctgaatgtttggtcataattaaatttgacattttaattaaaattgtagtaataaaatactgtcttctagacttaatacaccagtcattccctgcccccaatataactaggtggcttaaacagcagaaatgtatttctcaaagcaatggagactggaagcctaagttgctagcatggtttgtctttgtcttgcttcccttcttacacatgagcgctttccattgttctcccacaacagagtgagctctcttgtcccttgaaatgctgacctgttcatgacttttatgtcatcatctgcgtttctaaataccatcacctctgggttagggcttcataatttcaggttacacaaattcctcttataatctgtggtgctttttatgttatttcacttgaaaatgacattttctgtgtaggtgcgcatgtttatttaatggaggctcactcagtgctcataatgatttggtgttctagattgtagtacattgtgaggaagaaagcatcagccatgtacagtctctttaactttaaataacgtgttacctcattttaaatgtttatctccttaatgaaaattgttgtaataaaattatcttggacacttcttttgaggcacacctgaattaatattgataccattgttttcaagctttatagggtttttttttgggcaattttcttaatttataaattttaatgatttagacttttaagtacttctgagacccagtctggtaattttatattttgcatgccaaaaccttagctttttgaaaggtgggtcccaaaatacattgctaaattagaatatagttcaataatgtttataagtgtgagaatctaataccaaagtttagtggtgtttaagactagagataagagaaaatactcttagaaattgggggagaagaacttatttgtggagaaggtgtcaccttttttaagtccttacaattttttaagagaggaataagcttttccaaaggccagcttcaacatctcaggtgctgaggctgggtgtgtactctgcaactcagtcttttctctgggggagcaagacttaattctctgtggccaatgaagagggggaaacatacacacacttggtggatgaagcaaggctctaacaactttgctttttctcttactcctttatatatcacctaagacaaaaattctcaacataagatcaccttatagctacaagttacatattctcaaaaaaaaaaaaaaaatcaccagaaaaacgtattcttcaaaaacagattaaaatcattacactgaggggaattgcatgatgactgactatatattcttttgaaacccaaaccttactgaacattttccatctatctttgcacaaattcatcttaacccaaagcaataattcttttgtcgttgattaacaattttaaacatgccagctctattgtagctaatttttctgttagctgacaacagtttcatttaccaagaaaccaattttttttacatattttttttgaagccttacatagctagactatcatctgttctaccttcccatggtgcacactaaaacctgtgaccacatccttagatcacaagattaacgaactcaacctagaacaagtgaatgttttctttgcgtattaacttgtctcaaacctctgttcctttctcaagtcccactctgcgctcgcagggcttgagaggtcacggggctccctttctagcctagacagccctcactgctctgcagagaagggcacagtctgtctactgttggttctttgattcatcttcctggcaaagcaactgaaaccatctcctgagtctttatcaaccacaccaaattcctaaaacgatttaaatcaagtcaggaattctgtaaaatcagttcatttaaacaccattattttatagacgttcatcttcatattgatctgcagaaaatttgctcagtagattgggctatcttcctgaagtggtcacatcagaccacaggcagtgagggtctccccgtgcccattaataccatgctaggtacaggatgattatagcaatgataagcaggagaaggcacagcagaagcaagaagcaatttggtgataccccccccccgggggggggtgctgctttgcctctctaaggtacacccatcacagttttgcaaaactggactatttccaggtccctcacttgctcaccactgctcctccagatggtgtccaccaacacttatttttctagaaagttaaaagatggtagagaatgtccatatttctttatccaggtgtcctgcctttaactgttttaccttattttctttgtcttctgtgtaaacatttacttctgcacacactgacacagtttttatgtgtttggtttttaatatctaggtctaaacactgtagtctctgaaaatcatattcttatgtcaataattttctgagagtagttcttgaatttgatttagtaaaaagcttgattctttgtacataactcagtattgttgctgacagacactctgggggtggttgctgaagtcaccagtctccttcgctttcctctctcattcctttctgttagtgctgttgtaacatgcctgagacaacctcccagttgtagtggctgctaagaaccagaggttctgcattcaaatgccacttgaacactgtcttcacttgaagtaatggtagaaagacaaaagatggtcactggttagttagctttctgacttcacatttgctttttatacctttgcaatctcaaatttctaagctcttatctctgcttagtgcatgaggacaatatatttcctggtcacaatttctttggtatatggtaagcactgagtaagtgtacgactgtagggttaaaacatttgctattgaagctctgtctagaaacttatatgatattttagtatatcagcaattaaaaactgtctcaaagattgtagtttgaaggaatttgggttttttgtttttttaatttatattttgacaaactgctccccaaatttcatttatatcttttggaaaccagctactttctttaaaaacatccgttccccctatataccccatcttttgccttataaaattttatgcaaaatgtttgtttatttttggccaaaatctgttagaaaataatatacagttgtacaaaatctagaaaatacatatgcaccatatctaatttcagtggaaaatgccatttttactgggttttctcagtcagaatctctcatttttcagacagaatgattatttcttaatgctaaaagcagggttggggtgggcggcagttattttaaaaatgtttttacaattgagttcttcaggtatttagggaccttagtgtgaatgatcgtgtattattcttaatattatacaactatagaggccttcttaaaaatatttgtattgccaggcagtgatggcgcatgtctttaatcccagcacttgggaggcagaggtaggcagatttctgagttcgaggccagcctggtctacaaaatgagttccaggacagccagggctatacagagaaaccctatctcgaaaagccaaaaaaaaaaaaattattttatgtgaattggtgttttgctagtgtgtatgtgtgtgagggtgttggatcccatgaagctggagttagaaacggttgtgaggtgccatgtgggtgctaggaatttaacccaggtcctctagaagagcagtcaatgcccttaaccattgagccacctctccagtccagaggctctttttattaatttttttaaatttcatatgtaagtactatatttacataatttcctctccctccaattcttactttcctccattcccttacaaattcatagcctcttgttctttaattattttttattagatattttctttatatacatttcaaattctatcctgaaagttccctattcctcccccacccactcctgcttcttggccctggcattcccctgtactggggcatataaagtttgcaagaccaaggggcctgtcttctcagtgatggccaactaggccatcttctgctacatatgcagctagagatacaagctctttgggtactggttagttcatattgttgttccacctagagagttgcagaccccttcagctccttgggtactttctttaactcctccattggggccccttgttccatcttatagatgactgtcagcatctacttctgtatttgccaggcactggcatagcctcatacgagacagctataacagggtcccttcagcaaaatctttctggcatatgcaagagtgttgttctttaattattattgttacacatatataattataaatagtgttgctcccatggacatgtgtttagcatttgactccttgggattggataacctatgagggtctttgtccctggagaggactgatttctccttctcttggcagctgctaatagcctggagctcttaccagcattccttctcattggagtgccaattggtgcaaattctatgcttttagaaattatctatgtataaggccaggcatggtggtacatacctttatcctttatcctgggcagaggcaggaggatctctgagatttcagtgttagcctcacacacgcacacatatactctctatatatacatatgtatatatatatatagagagaggcggagggggctttcttaaaaatatatnnnnnnnnnnnnnnnnnnnnttaatattcctttattcaggcttaggggctcagccactaaaggctatgcttacaaccaaaaatatgcctatattctatgtaagttgaaaatgtgctcagaagagaaatatagttaggcagtggggtgcaatcttaagtagtttaggatgatcagttactgttggatgtagctaatactaaaattttctttttcttttttcttgtatgcattacaaagactacttttaaggggtgtgtcaggaggttttggactagatgagtttccaccgaaatgtcggagaagtcaggccagagcacaaaagccaaggatgggaagaagtatgcaacactcagtttgtttaacacttacaaaggaaagtccttggaaacacagaagactacaggtgagtagatgcagtagcccacgttatctggtttgtgggtttgttgatgcaaagacactgtgtctaatgtgtatgattagaagctagggtgaacccgtttattttagcctttttgtatgtattcacattctttccagggaataagaattaaatattttacctttgaaaatttgttttaattttttaatgatacttagatgttgtagatgtgtgtgtttgtgtgtggatatggggaagtgagtgcaggtgcctgcagaggtcagagctatgatatatccctttggagctgaagttacatagagataggtgtgacttagaacttaacagctactgttcttaacctcacagaactttgtatatatacacttctctatacacttgtgtctataggaaagaaaccatataagagacgaagaggggagtgggtgggtgtgttcgtgctacagggggaaaaaagtcctgtctttttgacctgggtcccttgcaccaccagtacatacagtgaaaagtagagcatttgctgcagtattgtgaacattgtgggctttgtttgtggggttagggggtgatgagacaaggacttgttgctgtgtattttagttagggttttatttactgctatgaagagacaccatgaccaaggcaaggcaactcttctaaggaaaacatttaattggggctggcttacaggttcagaggttcagtccattgtcaacagggtgggatcatggcagcatccaggcaggcatggtgcaggaaagagctgagaattcttatatcttattctgaaggcagacaggagaagactggcttccaggcagctaggacaagggtattaaagcctgtatccacaatgataacacttcctccaacagggccacacctcttaatagtgccactccctggggccaagcatatacaagccatcacactgtgtaaccctaaagggcttagaacttaacagtggatcaggccagcctccaacatgaagctattttcccactttcaccttccaagttgtgtagtttgaactttcttctcttaacattttaagttttttacttaaaatagattgcctgaaaacatttcaaaactagcatttccccttcccatattcccagtatatagtgttccatatttagaagttaaggggttctggtgggtgggtttgttttgttttttgagacaaattttgctggggtcccaagatggcttaatattttgagtggattgtttactttttaccttcaattaatgttgtaggttataaactgagtttatagagctctactttaacattggggactagtcagagattgttaactcctgttcatgtatattatttgttgaataaaatgtataatagagtgatgaacagtagatgttctaaggaaattgatgttactgatcttttagttgcagctcgacatgggttacaaagtcttggaaaagttggtatttcacggcgaatgcccccacctgctaaccttccaagtctcaaagcagagaacaaaggcaatgatcctaatgtgaatattgtgcccaaagatgggacaggatgggcatcgaaacaagagcaacatgaagaagaaaagtgagtcagaatctgttaagaataaaacacttctctcattgtaggaaactgccaccgctgtgcactgttcagccaatagaaacactctatgacacttataattcagagagttcttcctcagatgaaaacacaagtcagcttactctttgatgcctactaactccaagaatagagtcttggacttctcttaacactattacttagcaaaaacatgaaaaatgaacttaacattctaagaacaaatctacaagccaaccaatatttactgcaaactattatctgagtgtggaacccagcattctgctttaataagtccttgataaatgaagagttaaaaagataatatagatattataactcttttgtggtgttatatttaaagtgtgaatagacacatttagtgtaaatatataataactgtgtatacacacttttagtcgttaggctctttgagttcagtagcattagccataagcacagatgacagagtggctaataaacaggtttacttacactgcatagcctgtaccatactgcctcctctcccaccctgttcaaaccaggccttcactttctaatgggaggaagaaattgagtcagaaagaaataatattaaaaaatgaaacaaaaataaggaattggttctgttgcctaaattccaagatgcctaagaattctgactccagctttgaaactgcttggtgtatcatgggtgtttgggcattatttataaagtaagtggaaaacaagaattagcactgtctgccccaatccttattcattcagtaaatattttgtcttctgtctgtcaaggtttgtaccagattattagctgggctaaatactaagtagttattggtcagttggtaggatttacattgtttgcatggatcttatcaaatctccatgttcctgcttaatttctatagtatattcgatctcctttgtagaaattttagtttgctggagaattattttatagtagaaagggagctagggctgtgtgtacaaaaaaataataccggcattctttagtttcttgaataaccttttcatttttaagtattgctatattgcaaggattgtataaaactatagactttttaatcctgttttattcatgagaatggattagacagattgctgttacatgtttgaaatgtaatgcaatgatgaatctatcatctgacatttggagtttgcatagcctttgcccctaattatcccagtgtaaactgaatgtctgcatatacttacagttctgttgataatgtagttctttaaaacattattggtagttactttcagtatcacgttgttttggtttctttttaaacaaaatggaaaacaggcagctgtcatctcagttatttaaagggagagatgattgggagaaaacagacataactttaaaggtaatgatacaaaggcaaaccacttataagagatgcctctgtgatttattcgtattaatccatttgtagccaaacttagcagacttaatttacatacatttaaacatttttttagtgtgtaatatctgaaataatggattaatatttttttaaagagcaccagaagtgtcaccagcacagcccaaacctggggttgcagctcccccagaagtagcacctgctcccaaatcatgggccagtaacaagcaaggtgggcaaggagatggtaagtggacatgagctggggggtctggtgagggtcagtggttactgaacagccgtgcaggaaggaaaggaagagagcattgcgagaggatatggtcgcatccttgaactctattaggctagttaaatttcactgacaaaagtcatatgtgatctaatctaaggagaatctctgagttatcttctgcattttaaagaacatctatgaattaaggaacaacagacatggcctgtacccttaacatttcaatgaatacaaaaacattgtatattgatactggattcctttccctaattatcccaaatgtcttttacagaaatcctcctaggatttctgggtagtgaaaattagagaatgatcataaagcacagtagctataatacttctaaaaaatggacacatatttcatgtatagtgagttgctatttagtggtaaatcaaagtagtaaatgaaatgaaaacatcttagccttgttcgggacttggtgtttagtcaaagtatatttcagtaatccaatctaaactagttgttaaaagattttagcagagaagttggtcttcagtagtaggagtcataatgaaagagaaacaaacactcctgcaacatgtctgaaaggtttctctcagggttttgtgtcctcatggctgttcaataacttttcaagggcttaggtacagtttatacgatttattgatataaacaattattataatgtagaataattaattcatcagaaaaaagcaagaactctatcctgggagggttacttgaattatcttcattataaaagttaacttaatgtgtttttgaaaaaatgtttaggaatccaagtgaatagtcaatttcagcaggaatttcccagtctgcaggcagctggagatcaggaaaaaaaagaaaaggaagcaaatgatgaaaactatggacctggacccagtttacgccctccaagtaagaatgctttctacatgttttgtcttacaatgtcacctcatgtgtgttcctgtgtatttgcctgctttgtagagactagtgttgtattcacttaaaacagatttttttttttgtgccaacaatagtactgctgtaactgtagagcttgttggaaatgtataattacatctgatttaatctgtaagtcaaaatttgtaaggtatccaggtatcttctttgtaaataataggtgatccttttgtccttatctttgccctgttcattccctattcccttccctcttctccatatgcatgtatctgcctcagcctcccatggcttgggattataggcatatgctactgtgcctagctgtccatatccatatacacacatactatctatctagagagattggtttgttttggttttaacatattttccccattgtgtaagatctacccatttttatttttatttttttaatatacttttgtttgtattccatgattctttgctttctggactcaaaatgaaatattttggataatgaaggttactttatgtgcattataaagcataaaataaaaaaagaaataaatttttgagacacatgtaaatgttttagcttcatgttgtcatcatgaaacatttcaacagactatatctatgagattcctctagcaaaattttataggtttatattttaatgttatatacattgcattttacattttaacctatttcttgtcaatattccttgtcaaacttacatatatcataaatttttgtttaacctttataacataatcaattactcattaaaattggatcagctccactatttcttcagttagttacattttgacccaaaagttatctattgtctcctaataaatgtggcagcttgagtcaacaaactgaacccaacacatgacctcccaccatttctgaaggaatccaaaagaggcctggttaaacgttgtgactaaaggattctctcaaagccccctttgctgttactgttcatgacgtgccttccccaaaatacgtgatggggagaggctaatatgaaagagtggactgttttctagaagggggatatttgtctcttaatagtctgttcaggatttccttaaaaccagagtggttttacttgattaaagatgtaaacaagataatgtcactgaatctgctcctctggtcccatgtaattagtaagagttgactaaagtaaatggatgtgaacatcccccatcagcttttctgagttgtatagaatttcacttatcttccttccttccctctagatgcctacctgacagtccaagtgagaatagtggtttttgaaccactacagaaacactgacaaagctttatacaagcgctgataaccctcctttcatgggttgtcatggctgcctgacatagagcctttctgcttcacaatctatgactctagtctgcattacaagacagcaaatccccactcttactgtacttggtggcattttcttaaaatatgctaagcttgctgttgctgttatgttactaatattttcttaatcctttttgtcctccatcccagatgttgcttgctggagagatggtggtaagtctgctgggtcaccttcctctgatcaggatgaaaagcaacttggccaggatgaaagcacggctataacatcagaacaaaatgatattctcaaagtggtagaaaagagaatagcttgtggtcctccacaggccaaactgaatggacagcaacctgcacttgcttctcagtatagagctatgatgcctccatatgtgagtattgctaaacatggcaatcagtcaaaagaatattctactctgggactcaagaaatggggaagatgtagatctttggtctcaatagcatctaactaaagtctgattgtgagaatagtgaggtaaacaagtcacatgcctcagtagcacaagtagctttatcatgttagaccacatatttttacagcatattaagtccctgctcttaggagccaaaagcaggttgaacactatgagtttgaggccagcaggactacgtagtgtgtgagaccttgtctcaaaagtaaacataagcacaaatgttaattgcagtatcacaacttttaattattgtggaaataaaattttagtttaccagttctttgtgttaatgagtattttatattacagatttaaaattttttttaagataagttcattgggtttgctaaattgcccaactgatagttcatggccaataacaaagagcctaaaggttaagaattgtttgaattctaattatgtttttaaatctacattttgcttttttgtgagacaaggtctcgtgagtagttcaagtaggcttcaagattagtcctgtcccaggctattgagtgctgaagttagggacatgcatgctctattatgcctacctcaattaagttttacagaagagtagtggtaaatgccattctccagtcctggatacagtatttcatttgtggatatttttggttgtgttttaaaaggagaaaacatgggaaaatacatagctccattaaggtggctaaaattaaaaaaaaatgaattcttaaatggtaggtcattgttaggatcgaggtaatgactgatatttcttaggggtctcattccttccctgtgtgtagacgcctctgtgcagttcttttctttctttcacttatttgtgtcaagttgcttgtgctttgttccttctctctgccatgtcttaactgtgccagaaaagcaaaggaaattaagtattttttaaaggtgggaggttatagttcattgtgtttgaggccatgaccttaactcccccacagtgctgaaggatgatatcctaagaagtatgagagcatgactttttttaaaaaaagtaaggaaaactttataaactgacccggtcagtttgggcctaattttcaaattgtgcttgtagatttttgagcttccaggtgtggatattggaaggcgcatcaaagcaaagggcagagaaggcttcagtaccagctgcttctatcaagccagtcacccagtctacaccacaagtagatactgagtggttagagatagtttctgcagttaatgttatggcaaactccgaattttaagctatacacctcatagaattaacatgtctgaataatttaaagggggagctaacgtaaactaaagactgcatccatttttactcctttcgctatagtgctgtagccaatgcccacagatttcctcaatacttgatagttgaccttgagctggtgtttaattcaacctagtttcagccctgtgtggtaggaatggcccctttagacattacagtcacacaaaaagtcctttctaagtgtgatttccttacctaaaaagatttttttgttgttttttattgtttttttgtttttgtaagacctttttcagcagaagcaaaattatttcaggcttatgtgtctgtaaatgaataaatgtgttgagactgtctccatccagatcatagctgagtccttcagttaccagggtttgcataatctgcccccacccacttttaggcttacctttttccttgactggattttttttagtacttaattcatgtcatctctagagaaacttgactaagagcacattttctatgccattcttaacatctgtctgttatctgaagtgatttcctctttatcattgtttttctagttggtttacggatttgtggtttttacagtttgtgtcattacataagttaattatattaatgtgatatggaggttcttcagtgtcttagttaggtttttgttagtatttctagaggtgggggtgtgaaaacatatgtctttaagacaggcagatcccctgagttcacaactagctgttttagagcaaactgtaggccagccaaggctacatagtgagatccctgccttaaaaacaaaaaaaagacttcctggaatcacttttctgtaaatggttttttagtgaggatgagtggtggtctatactagcagacaaagttgaatattcatattatttgcatcaaccattcatacctcattacattttaagagctactcaaactgaacttgtgtatcataagttactttttttatcatccagatgtttcagcagtacccaaggatggcatatcctcctctacatggtcccatgaggttcccaccttcattatcagaagcaaacaagtaagacttagacaaagcctacaggggatatgtgctttaagattttttttttaacattgagggttcgctctcaaaagtataattatttacctcttgtaagctaaaactaaaatagtagctaggcgagagggagggagggagggagggagagagagagagagagagagagagagagagagagagagagagatcgattctgtctcagaaatcaaaaacaaaacccgaaatagttgagtattttaaaaatgtaattggcataaatttttgaaaacaggaaatcatgattctaaaactagtgataattctttttcttactctcctcttactgtagaaattttaggatcctttttaatggttctaattacttattttgaaatgaaaagaattgaactatttaagctactaagtatattttaatgatttctttatactcatgtcattccagggtatattttgctatagaaaaaattaatatcaaattgaaatgaactaaattccaatgttttaatactctcaagtcaatataactaaaacctgtgcattttttcctctgctctcccgttgattagaagccttcgaggaagaggccctcctccttcttgggcttctgaacctgaacgcccatccatccttagtgcatccgaactgaaggagctcgataaatttgataacctagatgctgaagcagatgaaggttgggcaggtgaggaacagttcatgaaacacttgaaactgcctggggtttagtttgacacagttagtggtgtgtttatgaactcactccatctatgctttccttcatttaccaggtgctcagatggaagtagattacacagaacagctgaacttcagtgatgatgatgagcaaggaagtactagtcctaaagagagcagcaggtaaatttgtgacagtcttgctattgatagcgtgactttgttgatagaacatgagctgttggtacaaagatgcttcattcatacggtttttgttttttttgttttgttttttttttttactacagattttctttatttttcttagcttacttaattgcttcaggatcttgttttatttatttattcattatttgttattccctaaaagcttattggcaaacagcattagagatttgggaaatggagctttttaatctctgttacttattgaagggcatccaagtaaggaatatatgggctaatgtgtaagaaacattgggcttttacgtgcccaatttgtagttttctcaggcatggcattatagtatgctatagtttcatgattggtcggtcatctctgagatacctgatatgttgaggttattttatatctgtctatctatatacatacatacatacatatatacatacactaatatatcttttgaaccagagtaaattagaatatagtcaataatattttcttttttttttgtttttcatgacagggtttctctatgtagccctggctgtcctggaactcactttgtagaccaggctggcctcgaactcagaaatccacctgcctctgcctcccgagtgctggaataatattttcagtatcacttatttatatttaggtgacatcttgagaggacaggcaagaaaaaaaagtgtattagattcatttacatcacagatgagtatccaatttgagcagctgctatactgctattttagttattacactttgacagtgtgaactaaatactccccaaaacactacagaaacatctcagtattaacatcactgagtcacaaacctgtcagtgattgctttatacattttcttcccttgaaattatatggaaaactaccccccccccccagaggaaaagtcattcacttgttcacataatttctgtttctttgttcctttcctcttctccattttggttcttcagtgaggatcaaactgcaaaaacacctgaaagcacagaaaaccgaaaagaagtagatgaagcttccagcactaaatcatcttctcagatacctgctcagcctccagtcacaaaaagtccttatgggaagggaccaccatttaatcaggtttgttgggcctgtacaggtccttatcattaccaatagtttggatgagttgatcttagaaccaaaattggagtgacttgagaaaggggtttttgtgtgatttgcaggcaggcagtgggtgctggttgtagttttgagctggattcacacataagatcctcctgcctctcctctgggtgctgaactgtcaggcatgtgatgtatagtacttgactgaggctgtgtatttttttgctgcttttattgcctgttaaatgaaattactgatatggctactaaaattaattgtcaagccaaaactgaagattaaatcaggtcaaagtagaggaatattttctcaaaataaacaaggcgctttaccatctactgaatgtcttctacatcgtgctacttgcatgggaaagaatacactgtagagaaatcttaacatgaagaaaatggagacttacaatacctggttattgtggaaaagatagcaaaaggagagaaatatatggggagcatatattttgatctcatgagttgagatggtatagcagtagctacattacaaactgaaagaggctgtaattatctaggtggtttttgcgtttgtacaaaacagatggaagaacataactgttagtaagctatagggagcaaactggcagtctttgaaagggaaaggaaattttccactctttgtagtaggtttgcttgttaccatactgatatggctgtgtggttctgtaaaaagtgattttacagtcactgattaacttctaaaatgaagacaggcccaataggttgactttgaacaggtttgtgttctcgttgagaaaattagtacactgactgtggtcataaatgtgtggggtaaatttttaaatctcttggtcttcataggaacgtggcccatcttcacacttgccaccacctcccaagttgcttgcacaacaggtaaattttaaataagtgttgatgtatactctgtatttggctttgtgaagttttcttctgttggaatgatgcttttatgtttataactttcattaaccagttgtacattgttcagtgtggcttttgcatgtttttcttctagttcatccttcttacctaacaagcgcactgagtacctcactaaggaaggaagcacagagctgatgtcgggcactttcacacttgtagtcttccttccttgttccctgacggcaggcagtcctgccacttactgtctatagagtgcaataccctgctcttcattctttttcatcatctgctctatgtctttgttctccatcatagcaaaattcttttagtaagttgagcttagctggatgactcataaatttaccatcactcccaggagtgctgcatgaacacacgtacacatctattgcctcttctaataaatttgatttccaagtattaatctaacagagaacttgtactagactatgccaagaaaaaaaaaaacaatgataataataatagtatggcacctaactcagtaaaaaggatttttagcttcacaaagaaaatctgtgactgtggtctagggagatagcccagtaagaacctgcgatacaaacatgagcataagaatatccacatagacgagaatcacacatgtttgtggtgtgcacaataatgaacaacaatgacactttaacttaaacagtattgcctgacattttttaacctctgtacgcttatatatgtaatgaacacattcatttatataaaaaccatatatacacacattcacaaagaaaaatatgagtggccagtaagcacatgtgctatctaataaccatggtaatgcaaatttaaatcgcggtaatactctttctttgcatccatcattgccctatagtaataacatataggatagcgtgcatgcttgaacagtataggaaggcagcttggcagtttcctgttaaggaaacataattgagagggtcactatcacctgtttattcaagaggaatgaaaatatgcagatgtgtgcctttataccacaggatacatatctgtcattgttcttgtaccttggactactaaacggcagtgaaatggtgtaagccaccacaaaatagcctccacagtattgtagtgagccagagagaatagcacaagagattcgtctgcatcagcacaattctagcacaggaaaaacagtgttagggttgagatatgtgaaggtaaaaagagcaggagtgatgtgatgcagctgagcttggtgtgtatcccatcctcatgggaagtctttctatccgttgccatggtatacatttacttactggtatttgatttcactatgctgctatttttctttttttggaattctaactgggcaatataggaatctccatccttctttatcctggtgacttttcacttctctatgttgaaaatcttgtgttttgtttctttatgatttagcactttgtgtactttctctcttatttttggtgtttttagcagtgttgttaaactctgtcatcgtttgaaaatgttaatgaaaataatatcagttacatgaactaaaatcttcattgtgttctggatacagtgtaaatctctctttccagacgtagttttgaaatttccttcaaggccgtttctctagcagccatcttgtcccttgcttcttactctgcagcttccttgttcgtctccttggtacccatgagctgtcattttacatatttgggccttgatttttctccctgaggaattccccttctaaggcattctgtctgcaagctactactactaaaacatgcacttaaatttctattatctctaaactgatcttttatcttagtataactgagtgagcaataatgcctaacacagtgaatgggtatttcttcacttggtgtttgacgttccaattaatttttcccttcctaatttagtatattgtctagacttactatttaagagtctttatgcacataccagaggtcaaagttcaagtttgggaagtcagttctctacttctacagtgtgggacctggggttaaactcaggctgtctaaattgtcaacagattacttctatcctccatcaccatcttgctggccctttttcttttcattgtcttgtttatgctttaacagaatctcttccttctttctttttccttctttttgacccttcccatctctccatatttatggcacacaatatcagtcccagaaagtgatcagggtgatgatggctcaggtgttaggggtgcttgctgccaagcttgacaacctgagttcactctaatgagattccatataatggaatgataagagagctgactcctacaggttgttctctgattttcacatgtgcacacatgcacacacacatagacataaaaacaaattatttcgaataccaagttcttatcttcatctggtctcttactccttcagcatcccccacctccagatcgacaaatacctggaagacaaggcccctttccctccaagcctccagtacctgataacgatgaaatatggaagcaaagacgaaaacaacagtctgaaatatctgcagcagtagagcgtgctcgtaaacgccgtgaggaggaagagcgaaggatggaggaacagaggaaggcagcgtgcgcagagaaattgaagcagctggatgagaagctcgggatcatagaaaagcagccatctccagaggaacttagagaaagggagagagagaaggagcgggagagagaacttgaaaaagagaaagagcgggagcttgagaaagagcaggaaaagcagagggaaatggagagggcaagacagcaagagaaagagttagaacaacagagagaaaaggagcaggaactacaaaggctgagagaacaggaaaaggagggcgagccaaaggaacaggaaaaagaggaaaaagttgaaccccaagagcctgttgtagagcctgcgacagaaaaccaagaaagtgaaaacaactgcaagaaaggtatggtgccccacccacatttcatagttaattatgcattctccttagttgttaatggtggagaggtgaaggcagggccttgcatgtatacttgtgatgcatcatcctctaggacagatggacagatggaacaagttttcctcaggataaaaacagtaaacaggtccttgacatagccctgactggcctgaaattgcactgtagagcaggccggcctcaaactcagaaatctgactgcctctgcctcccgaggtgctggggttaaaggcgtgtgcagctacacttgattgtcctcttcccaggtatagatcatatcatgtaaatactgagtgttaacataaatatttattgaaataaatgagaagtattaggaccttgggtttttgtcaagtaaatacatatgtgtgtaagtgaaggatttggatctgtgttctccttagagtccaggtttataagaatctgttgatagtttagtgatatgttattgatgtttttcatattgggttacaaagtgatgatttggagtattatggagatcctttttcctctttaacagcatgtttgataggattattttttactgtttctttgagcagaagaagaaccaattttcactaggcaggacagcaatcgcagtgaaaaggagaccacacaagtggtacaagaagcagaacctgaatcgggggctcaacctcgacctggctatttcaaacagtttcagaaatcattgccaccacgatttcagcgtcagcaggtaatactactaaaaccaaaaatactttacctcatatatgggattggaaatagatatcttatctttcaggatctgataatataatataaaacaaaatacataaagcataggaacttaccttagttccttttttctttgtagtacacttgttgagaattggttgttgagaagttagttgactttctctatcatgtcttttttgtcttaagctttactcatagacacatcttctacttctaggaaatgatgagatgcttatgtgaattataagaaattactgtaacttatttggtcttttgccaactctgtgctgattgtttttatctttaaatttcccaaacacctttgttttcaaatacggttacactaattaattatagaatagaaatgtcagtaagtgtgattttggttttccaggagcagatgaaacagcaacagtggcagcagcagcagcagcagcagcagcaaggtgtgcttccacagactgtgccctcacagccgtctaatggttcagtccctcctccaccacacagacccctttaccagccaatgcaaccccaccctcaacatctggcttctatgggttttgacccaaggtggctcatgatgcagtcctatatggatcctcgaatgatatcaggaaggcctgctatggacattccacccattcatcctggtgagttgggagtgactgttactacttgcagtttttaatgttgccttgtcctgtccctcctttttgtcataattccctcagcattaatctagtaagaacttaaaatacgacccctaggtctttatcaggaagttaaaagcttttagtgtagacatttgtggcagctatttaactcgaccaaagtactagctcttttttgctttagaactttaaatttttgaaatggcaattattctagttaaaatctgttactagtattctcactttgccaaatatttcaacatttaaattttatcttcatatatttattctttttttatagttttcctattatttattattatcataataacttgattcttcataagttagccaaaaagtaaataagccagttcttttgggaatccatttagaattaagccagataatctgtcatcagaatgatactatggaagatttaggaatgattaaaaagctattcacaaattatagctcattcaaagcagtggcatgtgctcataatcccaggacccaggaggctcagaagtttagagccatcttgaaggttggttggttggttggtttgtaaatctcactatttgaatgcagagttaactattttaacagcaaagatgaataaaatttgctgtaagaaataatttttcccaaaacttagccttgttggtatgattctaatctcagtttttctgttagctgttttttctatgcacatttttttttcttttaaaataaagtgaactcctattgtatgtcccctcttaatttcttagcactcatttttgtatatgtttatcttggttttgtttctttcactttacctaattctcttgtgtgtgtgaacttttctttttcttacaggaatgattcctcctaagccgttaatcagaagagaccagatggaagggtcacctaatagctctgagtcatttgagcatatagctagatctgcaagagatcatggaatttcactttctgaacctcgaatgatgtgggggtcagatccctatcatgctgagcctcagcaggcagctactcccaagtctgctgaagaaactggggatgcaaggtaataaattacttacatcattgaaagataagtagaatattgcatccctaaagatcattctgggtgccaacagtatcactcatggacaaaggtgtttgccattaagccagatggccagaatttgatgtttggaacccatatggtggaaggagagaactaactcccaaaagttgtcctctgatctccacagatggttgataataacaaaagctcttcccactctatcaacacacacacacacattaacatttttaaaggattagattctgatttaataccaagccataaatgtgcttcattttatctttgtgcatattttttctttttcttgtataataattttaaatcaacgagggcaaattagtaaaaacaggaatttgcctttttttttttttatagtctagccaatgggctgataagaatctagtagtgatgagaaatgatactttcaatccttagagaaactatgtaaaccacactttaaagcaaagtgatagtttataatgggcagtggtgtaaactctcatcgatagccagatggctagtgtttcttttatggggatgtattttagtgattatgttgtatagttatttgtgattggcaaattgatagacttgctctagtatattagttatactaactaattggtgtattagaacttcagtatacaagtccatattactatctgcagttacagatacagagcttcatattgtgtgactgaaagtttaccccatcatttataacagcatctccacgtttctgactgccctaagccctctagtaatcttcattctatattctgcttgaatgaggttggttgttatatttgcaccctgatacaattggtgcccttgctaccagcaaaactcttatctgcattagtgtttcacagttatcttttcttattttccctgagtaacatcgtcataatttcttcattcactcaatgatatagatactctgtgttcttctctttgttaagatatttttaattggggaatgtcaatgttctttatacttaggattcattattttgtattcaggggtggggttgtaggggtaatgctgcagtgaaggggtatatgtacacatgggtaaggttgttatgttggtaatacctttgaattctcatcatcacaggcctgaaactgcaatggaccatgagcatatgactgctgcttatcctgtagaacatagtcagttggaaactcattcaaaaacggacgttgctagagactcaactgaaaccgaagaacaaaagtttttaagcagatcactggaagatgtaaaacctcgccatgttgatacaaatactcagtctgcttgttttgatgtaattgatcagaagagcttacctacttctgcagaagagcggatctcagcgctagaaagtcaacctgcccgaaaaagaagtgtttctcatggatctaaccatgctcagaatgcagaggaacaaagaaatgagccgtctgttagcatacctaaggttatcaacagatgtatggattccaaagaaactgtagaaaagccagaggagaagccaagaaaagatggctttctgcgatcttctgaagggcctaaaccagagaaagtctataaatctaaatcagaaactcggtggggtccaagaccaagctccaacagaagagaagaaggtaatgataggcctgtgagaaggtcgggtcccattaaaaaacctgtacttagagatatgaaagaggagcgagagcagaggaaggagaaagaaggtgagaagcttgagaaggtcactgaaaaagttgttaaagcagaaaagccagaaaagaaagatcttcctcttcctctcccccctccagcaccagctcaacctcagccacagccattggtttcaccaccagtacagccagaaccagagaaaccaccatcaacagaaacatcaactttgactcagaagccatctcaagatgagaaacctttggaacctgttggtagtgtccaggtagaacctgtagttaaaactgtaaaccagcaaagcgttgcagcaccgacagtcaaagaagaaaagccacctgagaaagtcattaacaaagatgttggaatagaaagatctcgcccagattctagactagcagttaagaaagactcatctttacccactaggacctattggaaagaagctagagatagggattggtttccagaccaaggatacagaggccgaggcagaggcgagtattactccagaggtcggagctatagaggctcttatgggggtcgtggcagaggtggtagagggcacactcgtgagtatcctcagtatagagacaataagccaagaacagaacatgtgccttcaggacctctcagacaacgagaagaaagcgaaacacgaagtgagagttctgattttgaggttgttcccaaaagaaggcgacagaggggttctgagacggacacggacagtgaggttcatgaaagtgcgagtgacaaagacagtgtaagcaaagggaaacttcccaaaagagaggaacggcctgagaacaaaaaacctgtcaagcctcagtcttcttttaaacctgaaaaccacgtccgaatagataatcggcctttagagaaaccttacataagagaggaggataaatctaaacctggtttccttcccaaaggggagcctacaaggcgtggcagaggaggaacattcagacgaggtggaagggatcctggaggccggccatcacgtcctgccaccttaagaagacctgcttatcgagacaatcagtggaacacaaggcaggcagaacctcctaaacctgaagatggagagccaccaagaagacatgagcagtttatgcctataccggcagataaacgacctccaaaatttgagcgaaaatttgacccggctagagagaggccccgaaggcagcgacctacccgaccaccaaggcaagataagccacctcgatttagacggctgagagagagagaggccgcttccaagacaagtgaggtgttggtaccctcaaatggcacagctaataatgttgttcaagaaccagttaatccacctgcggacatttctggaaataagacaccagatttgtctaatcagaattcttcagatcaggcaaatgaagagtgggaaacagcctctgaaagcagtgattttaatgagaggcgagagagggacgagaagaaaaatgctgataagagttcacaagcagttgtaaaggctggtgaaagtgttttgcctccaaaaagggaaatagcgaagagaagtttttctagtcagagacctggagttgatcgccagaatcgtcgtggcaacaatggcccacccaaatcaggaaggaatttttcaggtcctaggaatgaaagaagaaatggcccaccatcaaaaggtgggaagagagggtgagtactgtaatttagaacatgcctggaaagaaggtacacaggatgccaggctagataaaagaccctgtattgctgactgctgttaatctgttatgctaagacacttcttctaaaagggttttcttggaaattatgtatagagctttagaagtacttgtacatccagaaatgaacgtacagtttctgtagttgctttgtgctaatgagtagctctctgtccttagtttctccaggtgtgttttaagacttgatgtgttaaaaccacattactctggcactctgtgctgttatctcagaaatccttggtgaattgtcataaattgtattcccttctggagttataatagtcccagaaagacaatccctgcatgtctactatgctctagtggccaacatgagtcctctggcaatgggtattaattaatttttaaaacttcatgtctgagggtgtagtagcttcttagttggtagaagtgtttacgtagcactgcataaaactaggcatggtgcttacgtgtcatctcagcatgtgggaagatagcgggcagggcaatcagaagttcagggtttatccttgactagatggttcaaagacaacctgggagagaaagtgtgtgctaaggttgctcttttaatactaaaatgttgattatagcgttaatattggtttcagtattgattgggtccattcagatctttgacgtttattataaaagatggaagctttatataatatgaagagaaacaagagtatgggctattatagcacatagtataccataagcattcgtgggttgatggcttatgaggctaagagcactgatagctcttccagagcatctgggtttgattccctgtacccacatggtagctaactccagttctgggcatccaactctctcctcttgcttccctgggcagtgtacacacgagtacagacataaatgcaggcaaaacacctgtacacataaacataaatcttaaaagcattgtttaggaataataataatattgcacgtaatctcaatttcttagttgtataaaattagtattttcaaacaaaattttagagtaatggaccaagtttttttttctgaatacatgctcaatatagatttcactttgaatgttcaagagtcagggtaacaataaaagcaacacaataagtatttagccagaccaaattattagaatttcaagtactactaaaaaaatcttgatttgatttttgtgttgtgtagatagcaacaactctataaatttgtagaaactccagtgaatggttgtagttacaacagactttggaagggcccatatggaaagaatgaagtcatttcagactgttaggagtcatgtcagacacaaggcaatcttgagaaatcgtatagactgatacaaaaattaaacagtaaacccatttttatgttatattttcatctgggaatttattaaaatagacctggaattgctatgttgttatattaagggacaaaaactaaggatatatttatttgcctttgaagtgagttttcatgttaaaggtgtttttaatatggttccatcaggacataaatcggataaaacttaacgtgtatatatgctaaacaatgtaaacatttgcaatgctgttttaaatccttattttgtacgctgcccactttaggagccgatctagtactgacttgattacagaagttctttttgatatatccatattataactcatttataaaatgacaaacagacccagttacctcctggagataattagaattctagacttaaattgttggggagaacttcaaagaactggcctgctgtattggagctttagtttaatgaaggtcagaagctgctgagagtgactgggtctttttcagtgctgttgtttcttaggtatgactttgcaaactgccaggaaacacagctttgttttgttagagtatgtcaaaatcatctaaagttattttctttaggccatttgatgaccaggcctcaggcacagctggtgctgaccctgtcagtggtaactctgcacaccaccaagaaggtgtgcctaatggtgcaggacagaagaattccaaggatgctgctggaaaaaagagggaagataccaaaccgggtcctaagaagccaaaggagaaagtagatgctctgtcacagtttgacctcaataattacgcaagtatgtttcagattcttttgttttacttcttggtaaattgaagcaaatactgtgaaaacataaggaaggacaagttgtgcatttatgttagacaaaataacttgacttagactaaaagaacattattagcctttagcatgttatgaacattgggtataatttttgttaatgatactcaggaagatttcactgttctcattggaagaggcttgaaatggattaaaccagtaaaattgcaaaacatgtttgagaaagcacagaaaaacaaacataaagtgaagattttaagttagaactaaagcaattctgaacatttcttcttaaaaggaaaaaagtaatagtcaatacaagcagagaataacaacgggagactgactgtgattgtgggtaaactaaggaagctacaaatgaagacatcaaatatggataataagcaataaggaaatatttggtgaagaaattagtacaaattatctcaagttagatgattttacttgtaatagtgtatttgtcattcattcagatgaaaccaaagcatatctgagatttcttaatgaggtagtgataatggaaggttaggtgaggtaacagttatcccaatatgagatgtaggtgtcttttccttgcttctaattttgtgtggttttattggtatttgtttttattaaacccttacttgtttggactcagatctcagacattgtttctaggccagtggttctcaaaagtgtggttctcgatgatttgtctcagttggaaattgaaatgcaaattcttatctaccaaacatattgaatatgattttgagaacttttgtaattcaaatggggggaaatgaaaaagaaataactgatcttaattgcatgtttaggaatttttagctggattatttagaaatataagtgattatccactctgagatatttgacagtcagttgtcagaactggggtgaagtactgattatatctagtaaaatagaggaacagagatgccactaaaattctgtgtataaaacaaccagaccatagtgtgaagttacaaggatgttacctcttttctcagaataccttgtgttttctttacccttttgtgccgatatgagatggatgagtgatgaagtagagtgggtatgctgttagtgaaatgacacaggcagcctgcttctgcactctctcgcagaagttcctgtccctcctgctccttccaggccgctcagagagggccctgtctgacaccagaatatcactatcccgttttcatagaggcccgccttaccgactcacccctacccccacccccaaggagccatagatgccatcttgagaataaacaaaaagcctccaagttgctgaggctagcactctcactgataaatggctaagcccttcttcccaggtacagctggcacctgtccttgggaaagaagcacaaaaaacaaacatccttgggaagattagggtctcacatttagatcatgaaaggaaaataatcaggggtcacaggggactatgacagtggctagtcataaaacacactagttcctgatagcaccataaagttactccccaggtcaaaagagttcccctcctcccagttgagagattacaccttgctgcctaagcaaacgatatcatgtttgaaaactgacttgttgcctcccccatcgccataaaacccaaagaatctctgactgtgctgggtcacactcctgtcctgcaagtgggaaggtttacaatccgagtctgactggtgttaaaaagagactctttttgtatctttgcattgggcccagcagttcttagagctctcctgggggtcccatggagacacaacattagttactatacaagagttactagtagtggtagccctagttgatctggtaaacagctaccaggcagttcctgggcagctgttatcagtaagccgaacaaagaaatgcttcaggcaggatgacatattttcactggatgattgatgtcatggaatttaaaattaagcagtatagatttttacacttttccacttaatatttttggcccatagctgaagtagttcaggccctgttaagtgaaaggctgaagtgaatttaggattatgatgttagtcatgtgttagcacatacctataatgctaactttaaggtggagacatgaaaatcaagagttccaggttgcatagtgagttctatgtcagcctggcttacaaaataaaaagttatctcaaaacaacaataaatgatagaattgtgataagtttacttcatcaatctgaaataataggacatccccgaaagcccgttttagtgtttattttacatttttccttggtctgtacataaaattgtaattaaaaaaaatagaattttaggttctctgcaaattccttcagtattttatatctgtagccaaaagtcacgtctcttctgactttcaagcattatttaacaggtttagatttggtcttctgtctacagtatagtaactttaggcaaaattgtcatggtttgaaaatacatggcagtaataattcccacttcttagaatgatcatgtgtgtatgaagtaaagtactactgtttggtgagcatcactcatatctgaggttgggaagacataaaatacttttggtttatttttattttcaaaagaaactgtgttgcggggggggggggaagctcacacacctctatgtgttacacatcataagggaaaaataattctactggaactggtaccacatgtgtataatcctgacacttgacaggtaggggcaggatctggatagagttcaaggccagcctcggctacacaagtttgaggctggtatttgctacttgagaccctgtttcaaaaccaaaagggtctatcaatcaaaccatgccattttaggttttctaatctatgaaactttttcagaaagataaaatactttcttacagggtaggaaataagttatactctcaaattaaaaaatatttttctgtcgggcacagtctttaactccagcacttgggaagcagaggcaggtggatttctgagttcaaggccagcctggtctatggtgtgagttccaggacagccagggctatacagagggaaaaacaaaacaaaacaaaacaaaaaaatcttttccacatctgcaggtgttgttatcattgatgatcatcctgaagtaactgtaattgaagacccccagtcaaatctgaatgatgatggctttactgaagttgtatctaaaaaacagcaaaagcggttacaggatgaggaacgccgaaagaaggaagagcaagtcgtacaggtttgagctcagcattttattgctagctttgtctgttgatatccagaacttgttaacaaatggtcaggttactcaggtctgctcagtcttagaagatggctgagtagcttcacacctgaccttaagcaattaattttaaaatgagctacgactatagcttgctattgtccttataacagaccatagttaattcaacatatatttttactaatttgttctatggtagaattcaatttgttttaaattatgttggaaattgaatgaacacaagtgccctgatccagaagtaacttttgtctttctcatttgtttgtttgtttgtttgtttggtgaaggtgtcaaatgtacttcaaattttgttagtttatttcatattttagagggaagagtaacctaatatataaaattatattttgtctatattctccaaactatcttgacttctaatactttgtaaactcattactaccctaagggtgtccaacttagaaaaatgaaatagctaagttagcagtaggaagttctaaaatcactaggaagtacaaattacatgtatacactgtttctttgggtaaattagtgacaaaatgatctgtttgtttaaggtatggagcaaaaaaaatataggtgaaaaaggaagaagtcagacttctaagcttcctccaaggtttgccaaaaaacaagctactgggactcagcaaatccaagctccaccctccgcgccagttccagtgtcttcctcagctccaggcctaacagccccagcagctgcagctcctgcctccaccccagctccagttcccattttggcatcagccaccgctctagttccagtgtcaaccccagctccggttctaacttcatgcccagctccagttccaacctcagcctcggctcctgttccagcatccacttcatctccagtcacagcctcttcctcatcccaaccatcagttccagctccgactcctgtcttggcctcagcctcaactacagtctctgtccctattctcacctcggcttccattcctatccttgcttcagccctagcaccagctactgtttcttctccaaccccagtggtctcagctacagctgtgccatccatttcaacaccagccgtcccagcctcagccccaacagcctcagttccccttgccccagcctcagctgcatccactgtcccacccccggcctcgacagtgcagacccagacccagacccagacccacaaaccagtccagagtccacttccaccttcagcgccatcttcaaagcagccaccaccctcgattagattaccctcagctcagacgtctaatggcacagacttcgtagccgctgggaagtccatgcccacttcacagtcccatggctctctaacagctgagttatgggacagcaaagtggctgctccagctgtgctgaatgacatttctaaaaaacgtaagtatgcaacagggacgtgtgcggtgggaaaagacagaagtactaaaatttcttttatatcttaattaggaagtcttagcttcctttattttagtagcttagtttcctttcctttttatttctctaaaacagttaacaggatacttttctccattgaggtttcatatcaccctaactaggatagttatcgggaacaccaacaaatgccaattggggggggaaagagaaagaaacccttatatacaactggtaaattagctcagccaatgtgaaaatcagcaaggaagtttttcaacaacaacaaaaacccctagaattaccatagaatctacctagtccctttctggatgtatatccaaagggatttagattagcagagaaacttgtacattgatgataacagtggggacagtgaccaagataagtaatcatgatctagtagaacacagtggggtcctactcagccaggaagaatgattctgtcatctatagggaaatgaatggaagtggaaatcagcatgttaagccaaacaaagtagattcacaagaattttgtatttttcttcctgtgagctttaggttgagtctgggtagggttcatgtacaggtgaaaataaaggtgaatggggggaacttaggttaaaagtgtggttttctcaaatggaatctaatttgtataaggatagggaaggaaccatttaacataactagaaagaagggcaacgtactgcaataagtgtagagcgtgtgttttgtggactaaaaagtaataatagggatgtgtaaaacacctttcatttgggctgccttttggggtgcgggcatttaagaatctcttaggcagtagtggcgcacacccttaatccaggaggcaggggcagacaggtctacagagcaagttccaggacagctagggatgcataaagaaaccctatcttgagaaaaaaaaaataatttgtgatatgctgaattgttttattgtgtgcccaccattgtaaaagggttgaatgtactagacttcagcatctaaattttaatggtcacatttcctctggcttctttttagtaggtcctattagtccaccacagccaccttcagtcagtgcgtggaataagcccttaacatcatttggatcagcaacttcatcagaggtaagaatagacttactggcatagatgggaagttaatgacatagtttttaaaataatttccaaaacttcattgtacctaattattaccttggggccactaaaacagattaaattcatgcccagaatttctgccctattgggtgtgggttgggttttgagtacatttctatcaggtacccagataatgctaatactgctagtcctccatattttataggctgctaaaggttaaacatttgtttcattctaatgtccagaaaggacctggtagaaaccaatacagtcactattttccaggcctacctcatattcctatctaataggataattacaaaatttcacagcttactattctatcatttcttaaccatctgtaatattggtgaatgaacatttatgaagtgaatgaacatttatgaagtagttttgatgtgccagtttagtctcctttttgagtttacaaagctggcacagataatagaagcaaaaggcctcatgggagaaatcagcagtatacttgtttagtcaagatgacagcaaagaattttcccaaagtatatggaggtaagcttaaatgaccaagataatttaaggccaggagatcctacttgtgtgtcatttgattgaagatttggagaatataaagaaagtagtttattcagatacctgagaaaaagtcaattcccagttcagggaatagtagttatcaaagccgtgaggcaagagcaagcctgatgggagctggagagttgactcagctggtaaaagagttactgagttcaattcccagcaaccacacagtggctcacaaccatctataatggaatctgatgccctcataggtctgaagacaactatagtgtagtcatgtatataaaatgaataaatctaaaaaaaaatttttagcaaagacaggtctggtgtgttcgaagtagttcagggaagtccaggtgagtggaatgaactaagagaaagaaacaacagagtgtggggaggttttaggggcttggagacatggagacatggagaaccattggagggtgtgatgcaaaggagtggcagggtgtgaatatataggttgtttgtcttatggatgagggagtaaggatgacattagtcaaatgattaatgtgggatgtcatgagaaggtgggccataaacccacaactgacttggtgtgaacagcaagaaagaaaaagtttttcgttagtttaaaatgagtagatccgaatggatcgtgattaggtgtgaggataaaaaggccatagagttacatttaagatgctatgcctgggttcaagtgcttactgcttttgcaaaggacccaagtttggtcccagcactcacagcaggtggatcaagatacctaaggggtctgatgtctctggcacccattggtactggtactctcgggtatacattccttcctacacatgctaacacaaccaaaacttaagtggacatgtcaattagtagttagctatcagagtgtgtaaatcaaagaatgtctgatttgaagattttacttgctaagtcatcaatatatcatggggttggatgaaattaccaaggtaagatgaattataaagatgcaaaagtgggaaatctaaactaagtattgaggctttccagctcagagaaatgtgggagatgttgggtgccagctgctaaaagaagtatctgagagaaaagaaaggggatggatcgttatatccagtagtgctgatagagcaagtggtacatctactgaattggcagtaaaaattaatgctgtaggcccattactgacatgaaaacacattagcataaaattgagaaaatatgaggcgaataaagagagcttcagggtacagttgttcactatgtggaattttggttggaatgtcactcggaggccacaaatgccatggtgtacacataaagtatcatctggtgacatcgtagtcgtcttagttttagtatgctgtaatatgtgcagaacaaaataattcccttgtgatgtatttctcattttagaagtcttccttattaatctaccatcccagtattctcacatagcaggtctggaataggcttcatcatttattttgttattaaaagttctctggggaactcagagtcactgtgcttcctgtttgagagcctttatttgatatttattgttgatattggctttgttgttgttgttgttgctgttaattttgtgtatgaatacactgtcactgctttcagacgcgacagaagtgggcattggatcccattacagatggttgtgagccaccatgtggttgctagaaattgaactcagagtagtcagtgctcttaagcactgagccatctctccaacccctgatattggcattttttaaagattcatcatagagtgcatttcttgcaaagtcagatgattcatgctgatttgaaggagatagtgtagaaattttgttttgtttcttggctgcagtagttgtcctgtaggcattctaaaaccatatgttttggtagtgtcttaattatctgtcataatttgttcatcatcctcatgttctttgcaatttccagctttttaagtttgcaaaattgacatttcagacaatggcaagaattctctaatgatttcccatttccttttctgtgagtacacatgtgtacatgtatcacacatgtgtgcacgtagagattagtggtcattctgagtatctgtcattctttggaattcacagaaaaatcagaaagctatttattgtagaagttaacagcacaaatggccactgaggccagagcacagcagttcctgagcagtgatggaaggcagcatggaagaggctaggtgcatggagcagttaatgaaaaagaaagctggacacaaaatccagatttgctatggtctaacaagttgctatttccttttatttctggcattactttctattagtatttattcctttccagtatgttttgctcaggaatttcctccatctagaattcttctatcttagcttttcttacattccctaaggaactttttcgttctttcactttatctaataaaaccaaagtgagattgcctagcacaaagaatgtgttcagaaaattcgctttttaattggtgacttgactctacctgtatgtatattaccttcccagtcacacagtgctgctttgttgaggtttttatttacgttactatcagagcagacttacttaagccgaagtctccgttactatgtcgaattgcattaaacatgcttctgttgtgctttttatttgtggcactgcatacatttttttttcagtcaagtctgaatttgtttactgtgatataccaagtgttaaaacattattttattagggaacaagaaatggtcaagagagtggtgttgaaattggaattgacacaattcagtttggtgctccggcctcaaacgggaatgaaaatgaggtggttcctgtgctttcagagaaagcaactgataaagttcctgaacctaaagagcagcggcagaagcagcctcgggcagggcccattaaagctcagaaggtaggtgctgttcgttagggtgatgtgattctagaatggacatactgttctaaaatttaacttcgtttttaataaatctttcattatattttgttataacattggctttagcttccagacttgagtctggtagaaaacaaagaacataaacctggtcccattggaaaggaacgatcattaaaaaatagaaaagtgaaagatgcccagcaggtcgagccagaaggacaagagaaacccagcccagctgtggtcagaagcactgatcctgaaacagcaaaagaaaccaaagcagtctccgaaatgtctgctgaaattggggcgatgatctcagtctcctctgcagagtatggctctgatgcaaaggtaagtacacactgactgcttatttatgagtgacaggaacattaatcatggacttcttatgcggagcatttgattataatggtggttgtatcgagccctttttggtgacttttgttgttgtttggttttgggtttttgagccaagatgtagccccagctggctggctgccgtggacctctctctctgtagaccaggctggtctctaactcagatccacctgcctccgcctcctgagggctggggttaccaccacctggcatacagcaaacttactttgtgatgttctatcatacaatgtaaatgtctctgcaaaaggttacatttttacagaagtatatctgtattttgctgaatggcttaaatagaaaactgtaaaagatcagaattgtctcccttaagtttgtaagcattcaaagttgtctttgtctggtagaactttattttgccttctactataattcaaacttaaggtgagacacacttggaacacatcactgtttctgaggttgaacactaaaagtattgacttgtttttggttgctacattgaacgaaagatatgtatcttttaaaatacagtcagctcccttatatctgtgagttcaggatccatgaattcaaatctggataaaaaatattctctctcaaaaattggaggtgttttgttttgggtttgtcttcattaaactataacatccagtggcagaacatttcactgtattccaggttattagttatttagagaaaatgccataaacctaagcatctgcatctctgcaggcccggtatgtaacaaggtgcgcctcgaaggcacgttctgttaggtgactagaggtagatagacacttgtagtcattaggggacataactcatagaaagaaatatttagttttgctgatagccttctacctcatgctatgaaaatagattttaaatatgtgtaaaagtctagcagcaactgagatgttgtctcttgaaggcaggcgggttgatgctctttcagcctactgttagttggtggattcaagttttagggcatagtggtttattatctctctccttctaaaatagctttacttctattagactgtcaaaaatggccgataaattcagctttgttttcttttactcctccacaggagtctgtaacagactacaccacaccttcctcttctctgcctaacactgtggctactaataatgcaaagatggaggatactttagttaataatgtaagtaaaccataagatttagcaggtttggataggaacctaactcatccatcactgtatcttaagcacactgttgtgaacaatgtttgacttgagaaatgagttgatggtcattttgtattttgagcaatatataagtatacctacttttaaaatcaaagtttaggcctccctctcctctcttcccctcccgtcctcttcttcctacaacctgttgaagttgtcagctttcaaaggcttgtgctgggacttgatttttattagcactcatcctattaacctagtttggtaaaaagttttggtttcacccttacatactatagttaattttatttggttgggtaattttgtccacaaataagactttatgattcaatggagccatactcgttagaagaataaaagaaaataaaatagaaaatagaaaataaaatataaaaccccagtttctcgtcagtagaataaaagaaactggggttttattttgttttttaaaaacaagtattttcaaattgaagtacatagatctggccttgcttttgtggaaactgagctgtaatatgaaaatatgtattccacagtttcttaaattatctaagattaggtgatgttaagttgtgtgggagataaagccctagttttaaggcttgaatgttttaagtcagtacagtttatcattttgcctacttcagtatagatgaaaaaaactagtctaaaaagtaagttgctctggcctcatgcacagcacatttaaaatttcttgtatagttcttgcttttgagaataaataggaaaaattttggttacctgatctcccctttgaatataaactaatataatcaaaagctatcatattcaaatgatgattgttttttccaaaaatatttttatatctatctataaagagttcttcaaaagaactttatcattttcaatataaaaatcctgattgtcattttatatttttttcctcatgctgtctgtccatccctctagcatcaagtatgtgggattttagaaaggtgagctacattaggggtcagttcatcaaattatagtcaaatggaaagactcctacagagctgtaggaaaggggtggaaaggaggcagttgtacttgatatttataagactgcttcatgaacctaagcctgtaataatctactcacaccatcaccccctttatgaggagagtttcctatataataggaaacttagaagaaaggacacttgttgagtttaaatgctggttccactgctagcttatctgtaatgttacagtaaagtatatgcttaaattgtgctatcttttctcatttaaaaaatataaaatgtcactttttcattctctaagcttgtagcattttgtcattgaaaaatatatatgctgatgagcacttctctgtgtgctcctaaggctgattagcatatgactttgttcactgacagatacggggaagaagacatgcagtctcatctataggggaatatagtctttatttgcttattaggagtaagatatctaaggcacctatgaatggaaaaaaaaaaatttaggttaaagagtattgtaaagtcagtgtagatgacattaatgttgtttccttgggccaggtgtggtagtgattctgtggtgactataaagtcttccacggaaaaaaattgtaaggactttggagatgtcttttcattagtctgttggaggcctccattttaaaatgcagaactttggtctttaaaaatacacatctggccgggcattggtggcacactcctttaatcccagcacttgggaggcagaggcaggtggatttctgagttcaaggccagcctggtctacaaagtgagttccaggacagccagggctacacagaaaccctgtctcgaaaaaaaccaaaacaaacaaaaccatatctgttgaaactccatataggcttcttttttaaaaaaaaaaatgtttatgtgtatatgtatgagcttgaatgatgcacagcttgtatgcatgagacaaagaaaacgttttagacaacacttgaactataatgtgatgaatcaccaggaactctgaaccactgaggcatctccagctccaggagaggcttttaaaatcaatatcttaacttgtgtggtagttacagttgtccagcactaaaattattgtgtattttgaatgtcccacaaagttaagtacaggcgacaatttttgttaccatggtatagctggtgtcaagatttactttaaaatcttaggtagaatatgttttgacagatctctatttgatatgtagtccaaagtatctcagagtgaccttcttagtatctgaaagaatgccagccattattttctgaataattgagtaagtcatcaaaagcaaacataaagcactgcacagagtaagggtacgacatccagggaatagtgcaccacctccaagtttctaaaactgtttgctcccgtcatctagagtagaacagtttgctgtgatgaggtaagggtatattcgatactttgccccagaggttactctggttttttaatctagggaagagctttgcactgtgtgttaaatactcaagataggaacgtgtacatacttcatatatgctgaaagctgcatttcttagaactttagtgcacagagtatggctcttggatcagtagtagtatcaccaccccaccgccctgaggaagatttcacttctagtataaagagtgctaccttgagtaatatatactttacaactgacaagttattttttcctgataatttgtatatatccaagtggatagtgtttctcttaagaagtttaacataattatcaccctctgtaagcattgtaacttaagtaatcagatattcctttttggactgatggggcttttgtagcctacttagattgtgatatgttgcctgccttttcaggtgcccctgcccaacacccttcccctccctaagagggagactatacaacaaagctccagcctaacttcagttcctcccactactttcagcctcacctttaaggtatgtacaacatccatccttaaggctccttaattgctgcatgcaaagaacgcaggttcacaattatagtatctctctctctctttctctctctctctctctctctctctctctctctctctctttaatgacatcaaattataccttaaaaatcatgttagtgctgggcagtgggtggcgcacgcctttaatcccagcactgtggagggagaggcaggtggattgctgagttggaggccagccagggctacacagagaagccctgtctcaaaaaaagaaaaaaaaagaaatcatgttagcttttaacactgcttggcaatgagaggtcctgttgtgcttatacatcttgtcataaaaaatagacttaatagcttatgatttgtactcaaatacaaagtgctaattataataatgttcttttttcttataagtcatttgtaaattgaatggatataggaatatgtcatgaaaaggctataacataggcatactttataagcaaaactgagaatttttggtttgaaatactaaagattgaacttgggacctcacatttgaggcaagcaccttaccaccacatcccagtcctttgtttacttagacacagccactttaagtagcccaggctggcttttaacttgatggtcctgcctaccttagatagcaagggttacagtctgtcctatatcactagctggcactatttgctttgtttttctagcatcttattgtcctgatttttgatctatattaattctttatagaaaagctacttgagattattgtaagtctctgattcaccttggcattagtaaattaatggttaaggggtgggggagtggaattgggtttgtgtgtgtatgtctttgttcataatcctattcagcatggtatttaatgtataaaggcaggctttcctgattagattatagtaaaccttttgatgttatacactagaggaagaagctaagttgttttagtcatttggccaatgatcatttctaaactctttctatataacctcatgactagctctttgtgagaactatgtcgggtcccagtccttactgttcagcaccaattcttgtttggccttgctgctaattttctactcagaggactgtctcagtcttggccttgttttataattcagatgattttgatgattatattgatcaaaatatcacacaaaatatcttgtatacttattgttgagccagttattaattctttagaatatctattgggtttgcctttttgactcatttttaacattccaaaactattatacacaaaattaaaattaaataagcttaacctgtcatttctttacttttgtgtctacacatacacacatacccttttatcttggaaaaatatttagttgtggaaaagttctatatgtgcattattgccagcatataaaatacatacttagctaatatacttgaatttccaaaaacaaactgtttccttgctggctaagaagtgaaatcaagccaatatggtcaattatatggtcaataatatgtcatataatgttagttttagtatacttttcaaaatacttaacatacttttattatgttcccaacaaaatgttttgatttacagttattatcaacagattttagtgaagattaaaagtgaacatttcctagataggtagattatttacttttatctcagaagaaatctcctaattaatcaaaaatgatgtcttcagacttttctcctcattgtattatatatggagagtccaggtataacgtaagacttggatgcacatgagcaaagccagtcttccatcagaagccaggcagaaacatcagctattccttactggatggaggtgataccacaaacctctggctgtgggttccatccttcagaacagctaatgaaaaactcagctaaaataccagagtacataccctgaataagagctaaaaaatagagggcagtgcaggagcagagaaagaggtctctgtgtgggtgctagtctagacttaggaaggatcttacaaaatgggggatgaagttggggttccagtcccaccctactctccacagcttttactttaaaataaaatacacttgaaaggcatagtgaatgtgagaaatatatttgttcttaaacatagaagagtcatgcaatttgagtgtttaactgtggtggtctgcatagataaattgatgagttgtgtgatttttaaaaggtttctaaaaggtttattaaggtaggttaaaagcttagaaattaacaggcggggctggtgagatggctcagtgggtaagagcacctgactgctcttccgaaggtccggagttcaaatcccagcaaccacatggtgactcacaaccatccgtaacgagatctgactccctcagctacagtgtacttacatataaataaataaatctttaaaaaaaaaaaaaaaaaaagaattcatgccaggacagccagggctacacagagaaaccctgtctggaaaaaacaaaaaaacaaaaacaaaaaaaaaaaaaacaaaacagaaattaacaggcgatgatggtaatgggcagatctctgagtttgaggccagcttggtctacagagtgagttccaggacagccaagactatacagagaaaccctatctttaacacacacacacaaaaaccactttaaaaaacaaatttagaaattggtatttaaagggttaaacttgtttgttagtggtattaaagatgctacgtaggaaacgcaccgccttacaaatcatcttaaagattatcttgggtttacctttcatcacagtattttttctggtaatacaaagaacctttttgcctccatatgtggtagaatcttgctctgctcttcaattcagaaatcactagacacataaaattactcaacatttgaacaatgggtagtctaaattgaattgtgatctaaattgaagagaaaatgagagagatctacatctgaaattttaatattaaaaggggaaattaagaaataggtggcatttgtgtaaatctcagggcttcagagatcaggagtcaagtgttcaaagtcatctttcagtgcacagtgagtttaaggcctggccatgctatgccacagtgaaacagtgaaagcaaataagaggaaacatgggttgttatatcaattactatttcagttataaatacattgtttcaaattatcttttaatcaatttaatattgcctttttgtttttagcttgtaaaacatagtgggtagaaaaatttagtttcgtgtatgtggcaggcattattgttatctgaaagttagtaggcactgctgctccattttaaagatctcattctgtcctttaaaacatgaaaatccgtgtgaaccagggccacaaatatatatgtccaagacagtacttgccctgttacatcaccatgtgcctttgaaaagtgttgatttaaaaagaaggaacaggggaccgtgttatataaggccttttctgacaacaggcagaatattaagtctctcccatggaagacccattcttctttattacactggtgggaggtagggccatttgttttttgataagtgctttaactatggttcaatgtgtatctcccaaagctttcaataagctctgttaaataaataaataaataaataaataaataaataaataaataaaaccctttgggtagaaagtttgaaaactctcgtgctgacactatttagaatctccgtactagggtatagagggtgttgtctattggtttttcttgtttttttaccttgtttgctttaatagacgtcaattttattgcagatggagtctgcacggaaggcatgggagaattctccaaatctacgagaaaaggggtccccagtaacttctacagcacctcccattgtgagcggagtcagcagcagtgccagtggaccaagcactgctaattacagctccttttccagtgcatcaatgccgcagatcccagttgcgtcagtcactcctacagcatcactatcaggtagaaatgtgtcacagttttcctgtatacctttttgtttgattgcctaatggcaattcctagacaagcactgtaccactgaagcacacccctagcctaaatgatgtgctgctcccaagcagacgaaatactttatgaaaacagcttctcttacttgcccttttacttctgtctcagaattttaatgtgactattttattgattgcttagtaggaaagattttaccaaattctccctcattgcataaaatcctgtcttccaaattttgcttttgttttcagttttactatacccaagtaattaaacacagagttcagaaaaaaaattcctaccacttttaaaagatttttttttagtatatctgatttaaaggtattaatggaataaattatattttctaatgaaaagttaggtgggtagtgttactactgtttgatgcctgggaaaactttgtcaggctggagttagaatgaactgttgttccttacttacagtttgtgttctaaagaatggccagtgtttgcggatgcttatttgtagggaagttcatcccgttccctagccatgctgcttctgtttcaaagcagactttatcccaggcttctacagtgtccctgatgttcccaaagcagtggatgagaagtatgcccgcacagggtgtgcttgctgtggtttttacttggtgatttatttggtgttttttatttggttgcttttgcctattctgccattgtactgatttgaagaatccaccccactctaccattggggtctgtctgggctgtcctatagcagtttttctaatatctgtaataagtatatttagacaatcccaaagtggctgtggtagtatacgcctgtgatctcagcacttggtggattgaagcaggaagacaactatgaaggcactgtctcaaaaacgaaaatgaaagaaaagaccttggagatgattcctgcattgtaatgtcatgccaaatagtgccctaatgacattttttttttctttctttaaaatttgtctagtcattccccactgcccattttttagactaccttgaactcctctactttaatgggaattggtattaaacaaacaggaacttggtaggatgagttgaaaaggtcttcagtctttctttggaatccagtggcctattttcaggtcaagctaattgtctctggtatattgttgaacaaacagtgacaaggataaaaggctgtccatccttcatactgacatgatttttcccccttcttcccttttcaagacaaggtcacctgtattcctagaactctgtaggtgagaataagattgtgcctgtacctcctgagtatggagactacagtaccatggctaggattgcaggcttgtgctgcctggtctgcagtgcactgctagcccctgagacactccaaccccctcaaggatttttgttctgtggttgcttgaagacttactgtagataaaacccatgggacccatagaatcagaagagtgaacatgctacatttttctcctttcttcaaatacaggagctggtacttacactacctcttcattgagtacaaaatctacaaccacttcggaccctccgaatatttgtaaagtaaaaccccaacaattacagaccagcagcctaccttctgcaagtcacttttcacagttgagctgtatgccttccctcattgcacagcagcagcagagcccgcaggtttatgtgtctcagtctgcagcaggtaaggtttctaggggtggttatagaaatttagaaaatggacgctgtatgctcttttcgtctcgtgactcttgctgcttagatttatttattttccaggtgtacttctaggtttgagtcccttccatccatgacaagaattctggaacttttagaagtggtgtgggtgtatgtgggtgtgtgtgtgtgggggggggtgtcggtctgtctgtctccacttttgtcttctacatttatgacaagttagtgtcttataatttgcaacataattgatccatgttctgcagtttcactacaatcaccaaacttcattacttgaaaaataatacataatgaagttcttggtagagagaacatacgtataccaaacaagaataacactgtatggtgactgttcccgttgtcaccctgcactatcagtaccgtctgttaatgcctggtgtctgaagatgctgtattaccagtagtgcataaagcacctacagccgaaggtcttctaagaagctgctaagacttatactaaagcatgtactgactgtgttatagataggagtcctaattcctacctgcatcacaattgcttgttgaaaacatggaaagataataatcactaaatgctaattgttttcaatattgccctattctactctgtagtttaatattggagtagatttgctggttcagtggtcaggttcgtttcttgtgtgaaatattaccagtacgtagctaattgagaacaaatgagagcatttattttgtatggccaagtagcaccaaatttacaatgttttatttacatgcacttttctactagaagtttgatatctttttacatttatgctttttcagtgacttttcagaatgctcacatttgaaattggccagaaaaaaaaatttttttaactgctataagtaatttggtttactacttggaaaatcctgaaatttagataatagtgattgttttttctgatggtctagctcaaatcccagccttctatatggatacaagtcatttattcaatacgcagcatgcgcgattggctccaccatccctggctcagcagcagggcttccaacctggtctctcgcaggtaaacatcctggtcctgtagttcttcatgcttatggcttttctgtcttgggctttagtgttagattcacttaagttaaaatcggctttgaattaccttgaataggctattaacaaaacttggagacatttttgattcccacattaccagagtttagtataccagtgtaagtcacaggttaaaaacaaaattggttttaaggagttgctgatcaatcttacttttatgtctggagtactgttttattttcccagtcttgtattttgtgtatatgaaggttgtgtctatatattacatgtgcattttctttttattgcattgcagccgacatcagttcagcagattccaatccctatctatgccccactgcaagggcagcaccaagcccagctgagtttgggggctgggcctgctgtttcacaggctcaggaattattcagttcttcaattcaaccatacaggtaaattgccttaaaagttgtttctgtcatttttaataaaacaattgaaggttatgaagtatctagtgctaatttcttttccccaaaccctatttttataaactaaataattgtgtacattatattttcaagcctgtgcctggtgatttcaactatgtcttggtttcttttgttcttgtactttgttcatatagaattttcataacctgtgaactctcttagagtgattttttttttatctagtcatggtgactcacacttagattcccaattctcaggaggcagaagcaaaaggatcgttcagggccagcctgggtcataaagagtgattaaactgcagttagaaggggctgctgctttactttctcccatactggtctcaagactatgtgtaacgtcaccaaagagaaaactaagtttgactctcagttttgtacagaacatgtaaaatgtaaatcattattataattaaaaggtaacatgtaaactgttcgttgccaagagcagtcttttccctcaaacttttgtatttggagttctgttgcaaacaggagttaatcttgaaacaagtagtcaaagaccttctcttccctgcttaattactgatttgagagtacttggttatttgagacacaagattttcacaattctaaataaaattagtgtatagcatgaccttctcctgcttgatacttttcatagatcgcagccagcctttatgcagagcagtctttcccagccttccgtggtcctctctggtacagctatccacaacttcccagctgtccagcaccaggaacttgccaaggcacaatcaggtcttgcctttcagcagacttcaaatcctcagcccatccctatactgtatgaccatcagctgggccaggcatcaggactaggaagttctcagctgattgatacacatcttcttcaggtaagactgtgcctttaaacccagatcctttgggcctggatttaacttacaaagaaaaatatctgtacaagctaaatattctgtctcctgagtgctgggattaaaggtattcaccaccatgcctggctgtgatctttcctcttaagatgataatgttgatacaaattgcctgggacttcttctcagtttttcttctgttttttggtaaatttttctaggcaagagcaaatcttactcaagcctcaaatctttactctggacaagtacagcagcctggtcagacaaatttttataacactgcccaatcccccagtgctctccagcaggtaaactatggcatggtaaatttcctcacttttctatattattctttgtattgattgttttgttgttaatttgacatttatatagaaccaagatagaggaggtggttttcagatgtacaccggaatgtcgtgggaatcccattaggtctattggaagtggaaggcgcttccttgactcctgtaacagctcctcctcctcctcactgcattctaggttcacttggtttatttaagctgggtttataagaaaggaatccatgcatatggaattttgaaaatcatttattaaagaatatagtacattcagtgttataggtgaaagaagactctaagatagtgctttaatcctgcacaaacatcatgaccaagaagcaagttggggaggaaagggtttattcagcttacacttccatactgctgttcatcaccaaaggaagtcaggacaggaactcagaaagcaggagctgatgcagaagccatggagggatgttctttactggcttaatataatgtagcagagtagcactaagggcagcatcttaaatgccctagtataattggacttttcaatgggaagtgacattctggtagaaggctagaggagaaaagcaagccattaatcttttgcttgcttttgtaaggatgacagtaatatcaacttactgtcaagtaagagttgttttatataaactgaaaagaccttttacttataaacactcaatttggtgaaacctgtaaataatatagaaatattggtgaaaggaacttgagcgattttaagtgtatattttctggtatttgatttgtgctctgagtatattcaaagttaatacacggtttttttcactatagttaacatatacaaaactgtaaatcttgaccttggtgtgataatgaaagcaccaaatcccacatttctccagactagtaagacaacagattgtcccacctctcatacaagaacaggtatagttagggctgatgggctgggtgtgctgcttcatacctttaatcccatcacttggaagacagaggcacacgaatttctgtgagttcaaaccagtcaggactacatagtgagaccctgtcttaaaggggagaaagcagagctagttacttaacctaaaagatttgtatatactatatatatttgaaagtattttacttacatttttaatttgatgatctcttggttgttggtatttatttagacacaggcacacagtaattacaagcaaatggttacattttctttttgtttctttttctaggttacagtacctttaccagcatcccagctttccttgacgaattttggatctacaggacaacctctgattgctttacctcagacacttcagccccagttacagcacacgaccccacaagcacaggctcagagtttgagccgtcctgcccaagtaagccagcctttccgaggattaatccctgctggaacacagcatagcatgatggcgaccacaggaaaagtgagtgaagcttggttagtgcccatgaggctgtataactggtgggtgtcagagataatagatctgtgtgcttgttatatctgtgttgaaagggctgtaagattgctcattgggtaaagttgccactaccaagactcagttcaatgccacgaagccacatagaaggagagaactcataattcaaaaattggcctccgtattgagggtgattaagtgtgcacacaccaagtacataagtaagatctaatataaatcaaacatcagtttttacaaccccacagaaaacctcaagagaatgaatgtatgcttttatttttcctacattatttactacttttcttatacttcttagttttgtctaataacaaagaattcagttttttatggaagcattagacgttaaatttctcagacctatcaggctgcttggtcctttggctatagtaaggtttttgttttaaccactttatagtttaaccatcattaagcacaacacattgctcacagaattagagggaatgttaactttattgtgccttttttttcttcagatgtctgaaatggaactaaaagcctttgggagtggcattgatatcaaaccaggaacacctccaattggtggtcgaagcaccacgccaacatctagtccattcaggtaaggtggacatttaaatctgcttaggacactacataatattttgaaatttttaaaattcagttgttaaaatccttaaggtgttgccaatcctatgttaaacagaagttattaaaacatttattttactaattttatctaagatgttaacaccgttactttttttttcttttttctttattttgctccacatcccacatcccctgccctccccacccagtctccacgtggatgtcctcacccccaccccacctgacctctaaacttcctggggcctccagtctcttgagggttaggtgcatcatctctgagtgaacacagacctggctttcctccactgtatgtgtgtgaacaccatatttcaagaacattctgttgatacaagtataggaactctctcttacttttgctgtccttaatagtcttaccatgttcagccactaaatgtgatggaaatccaaacgtaaatgcctttaaaatgtagcagcagcattgtttacctggcactactgtactaaccatgacttcttttccaagggctacatcaacaagtccaaacagccagtctagcaaaatgaacagtgttgtgtatcagaaacagttccagtcagcccccgccacagtgcgcatggcacagccgtttcctgcacagtttgcaccccaggtaggcagaccccagggggtgagtacagtgcttgtaatgatggctggtttgactaagggtgtggctttacagtcaccatgtaggtgagcagttacggtgtgcacctgggaatgaaaacttgtctggttttaaaaatatgatactgaaaaatagatgcagtagtagtttagttttatagcagacatgagaaatgctcaagatccccacacggctctgacagtttcaatcctgtttcttttgtctttttggaagcagtttgattttcagtgcagggtccccgtgcttaggtttccagacccaccctcaggtggctttggtccttatgctacctgcacagttgaagaaagtttgcgggaaataatgtgcaggcctgagtttctcctcccctggctgaatcattggagactggttaagattagtaagtcacaaactaggattggttcccaaggaacacatttgttgagttactgtaactgtaccttcagattatgtttagtatagaagtgggcttttctgcaattgtccctttctctctaccccttagagtttccatctgaagtgccatagcatgctttgcctaatttttctgttaaacttgataagcatggcccatttattctttgtccttattaatggaatggcacgatccaaaaacttccactggcagaatgggcacagatttactctgggataagccagcctgatctagttggccttttttttcctttcctttttttttttttctttttttctttctttttttttttctttttttttttttttcccttttttcttttttttttttnnnnnnnnnnnnnnnnnnnncagcctaacctggtccctccattggtaagagccccacatactaacaccttccccagcgcctgtacagaggccaccaatggcactggccagtcagatgcctcctccgctgaccacaggcctcatgagccatgctcgtttgccacatgtagccaggggtccttgtggatcactgtctggagtcagaggtaatcaggcccaggctgcgttgaaggctgaacaagatctgaaggttagtacagtattgatggccagcagagcaagagtctgtctctgaaccctgtcggaaatgccctggcccatagccgtgtatccaggcattcgttgtctttaccagacttaaccaagctaactgctttttgttcatcccagccccctgtttgtttttgtttttgttttttttctcccttccatccttaccttttcctcctttttatgaccccttcctttgccactatagtcagaaaacaaattaacattttaaactatattcaaatggattgcttgtgaaataagtatctgagggaaatctgagtttggatacagtattttaaatattaaaaaaaagtaatatggattgttattaccagtcaccctgtattatttccttttttttttttttttcctaccttcctgccctccctccccatcccaacttaatacataatcatgattttgtgaactctggaatgggtaagacatgttagctaccttgattcttatcccttcagaaatcatttgagtaattttcatcttaaacattccacatcctttttttgcatgccacctgtggtggccatattccagaatgcaattatagatgaactcagaaaagcactttgggatccttcatggtaaaaggcacaaacagacatgggtttgctgaggccactaggagtctgtgtggggacagtttttagcataattctcacccgtcttcctatacagccaatttgagcttgtttttctaactacctagggctgactttaagattcaagagcggttttctcaccacgtagattaggctagagcagagatgagctttgtgcgtatgagcaggagtgtgcacagtaaggcttcactctgagttagaggcatgtttgtgataatactgctaaagaagtcagttaactgactaaagtcccttcgtgtttctaaagcttaggaatccaattaaaggttaccctctaggagactgcctaggacccattactcagttttgttaggctgtgtgcctagggtttccgtctgtctgttactactaaaaagtgcttgcaccaaaagcttagcagattgtgtagccttccactcccggctaattgccacttgatctttaaacattcttatgttaaaaaatgacattagaacataataatattagtggggtgggagagtataaatttcttataaactgttttagttagtataggtttaccagtagaacatgaaggagctcttgtggtttttggttttgttttgttttttattatatgcaaaaggagtagaaagttaagtttaattggatatagtatagcactataattacaggttaatgtaagtatattctttggggcacattgtcattgaaacggattatttaccagctcagaatgtggtaggagctatcagaacttagtgatcaagtgaagtcgtagttactaatttctgatgctcttcccctgcagaagagagctgtgggaagaggactcagccacaagacatttggtcctaggtgttggtaatgccacaatataagtgcttccttttcattctattgtagaccacatgttgataactagaagttttaagtgttacgttacatgtatgctttcagactgtgcaagcagcctccccaataaagtctggtattagtgagctgttcccaaaagagagagaatcggcagcaatgtgtattttattgtttataagagggcagacgctagaaagatggtggggggtggccttgtttcaggtgttttgttttttttaaatcacatagaatattttcagagctaggagaaacctatgcattaaaaactgaaagatcgatggggcacaaacttagggaaaactgatttttgtgattggtacaaaaatttgaactgagattgatttgacaggctttggtaatgttaggtaatgttgcagtgctttcagtttttgttttcttatttttaaaggcaaagcagagagcagaggttcttcagtccacgcagcggttcttctctgaacagcaacagaacaaacagataggaggcaaaacccagagagtggacagtgatacaagtaaccctgaaacgctgagtgaccctcctggcacctgtccggaaaaagtagaagaaaagccaccccctgcacccaccataaccaccaaacctgttagaactggaccaatcaaacctcaggccatcaaaaccgaagaaacaaaatcgtaaaggctgtggtttattggggatgggtgggtagggaaagtgaagtcaaataatgccagccagcagccacaggggtaaagtggtctgtgacatcatcctgtgagacacaaggggcatagagcatttacagtgacagagctgctgcacagtgaggctccacaggctcgcacctccggtgtaacatttgcatcttcagttggtttgtatacaagtacgtaaacagtctgtaagtgcatacagtttagtcctaaggagcatgaaacaccagaagtaggaggaggagagcgatagataccacagagtagctcagctggacactgggtggtcccatgaatccatcagctgtggctcttctgctcccttgtgttctttggatgtgtctatggctcttctaggcttgaaagtaaaatgatgctaactggtgctggatagaggagccttatcttttattacggcagcttgctatttttgtaacatggtgatttggttgaacacaataaagtacagtagtaactgatctcccctcttcctggatgagtgagcagatgattgaatattgatgtcagcatccttgaacacactcagatgagcaacatagagcttctgcttctatttaaaatgatgctgggtttgattgtggtccgaagctttgaagcactacttggcgtctccttccttggaggtctcaccatttaaacataacatttgataacgtgttggtaaggtgaggtctagcttgtctccactaggtcatcttcatatgaatccagtgggtatacggttttgttttagggatagttcattttttaatgacggtttttagctgacattcatggagagaatgaatccttagaactgtgccgctagtgaaaggaaatcctgtctaagagtgtttctttacagagcagtgtcacaccatcctttgggccctctgctggaaacatagaatcaagtctcaaataatgccttttaaattgtctcctctagtattatagatgtaggacagtactgtatcatacctctgtgaatgtaacatagcttgtacctgctttatgatacgtagtagtgaccgtgctttatcagagctgttttttaatgatgttgctcagaatgttttctttccagatgatgattgagaagctaattaaaaaaaaaaacagaaacaaaaaatggtgccaggtaccacaagagtaacagaactgtgctgttttctgggattttgttttttacttttttttttttttttttttttgataagagtgtgctggatgtctctacaattttgttcaaatgactgcagaacctggaaaagctgttgctgctattgatgcataacatactgctattattggtctttttatataaatataaatatatatacatatatataatttgaattttttggaaactttagctgtgctgtcaactttggaaaaacgtatcccagtttactgtgttgagttggcattgtacagaaattaacagccatattggtctagaaatgttgaacttaatttttttttccatttgtacaggggtaacgcactgtattaaatatgtaaggtcttatctacgtgggtttgattacaaaaactaataaagtattctctaaataatgagtcttggaacttctaatctattccaaagtcggaagcaaggcttgttagtgtaccaaaggtcctagccgttatccaaagagttagggactgccctgaggtcaagaagcttaaagctcactcagtcagaggtggtgttgagggtaatagttacagtttctgttcttgggatgatcaaactttgatggcaagatggcagcaggatgatcaggagttaaaggccattctcatctaggtagtaagtttgaggcccatctgtatgtgtgtgagaccttgtcttggagaaaacctagggagacacgtgtggtagtgcacggctgtaatcccagcactcgggaggcaggggcaggcagctctgtaatcccagcactcgggaggcagaggcaggcagctctcttgagttccaggccattcagtgaactccaggacagccaggcctacacacagaaatcggggtcgggggcagcctagaactggagagtcagataaaaaaaatctaagattgctcttggtttaaactgccaaatagaaaaaatgtcttaccattcttggataaaaatggaaggaccagaagtggacctgaatgtgtatttctcagtattttcattagcatgttcacagtcattaacgttaattactgagttggcaaagctgagggagattttaattgtttatccctatatgtggaacataaaggcttctagagaattttagcagaactaaccactgaataatatatgtatcactgagtcaatatattgtggtttctaaacattcaaggacattggctaagctttttaggtctgtggttttctgaatgttgtggcttattctagagaataatcaggagaaggtgatgacagggtcagaacccctgttaagagggttttgtcacattggccttcttactaagtcactgtcgcccaactgttttgtatattctaaccttaagttcctaagttttaggtcatagaagatgaaaagcctgtatagcttacagtgtgtgtctctgcatgcatgtacatactactacactgtgctaaaataaaacaccactgatacttctgccttgtctgcaatggaaaatggtaacaaaagcctgtccaatggaagtaaggaaatttataaattggcctgtgggtcaccacaggagtccactactactggaaattatgtatttacattacagttcataaccgtagcaaaattacagctataaagtagcgacaaagtacttttatggttggaggtcatcacaacatgaggaaatgtattaaaggttgtatcatcaggaaggttgagagccactggtgtgagtgccacttacggtccttaactgtaaaagggggtctggggcttttcactcaggtagtggtgaaagtggtggataaggcaagggtaggtacagtttttaaagttcttttcatgtcaatcctgggctagagatgagatctgaaaggctgagtgagactgtattgtatgcttgtgagttaggagcaccagaatggaacgtgtttaggtaggtgttctaatagttcagtcactggtttgttggggtttttcccacttgtgttgtcatcgtgcattatgtattcagttggtaaaaaatgtagtggttcaaaataacaagtatccaggttcttttgggtcaagaacgtgttgctttggtgtggtgcctttgacttgaggccctcaaggtgaattgtactgcaaagtttcagatgtggagaggtagcaactctcccacatctccatgaatgtgaatcagccaggtctgagagagagtcgagcacagtaaggcacaggcaaggaacataaatagtgggcaattggaagtgaagagtcactttcagggcttaaagcaaaggggaaaagataaaggagactcagctacacccaatcctgggcctctgctgaaatggaactaaagatgagttcgtctccctagctcactggtgccatcttagatgttgcagtctcacagtgttggatctgcacctttaatccagaccccataacctgagtcatgtaacaccacttggagctcttggtttaagcagtctactgtgacttcacagctaccatggtacctggcttaacattttgtcaagtacattatgtcacacatacatacatacatacatacatacatacatacatacataccatgtagaacaatgccgtccatcagaggtaataacaggtctttgttctgaggattgattgaccccagatttctcagggttgctcaaaagatggtcctttgttcctcctcccatcaccatcccttttcatgacagctgtctccttagctctcaaccgtgtcttgaaaaaacaaaagttaaaaaaaaaaaatgccatcatgttcagatatccatatgtcagcttccctttctgagcaagaacagaagcctcggcctttctatatcagtagactccaaagtccccaccttactctaaatccatctgtctaagggaatggcctccctggaagtcactgcagcaagatttgtgcttgcactgcagaagcagcattgtctacctgggaactgcagcccagcctctgaaatgaaccatgaacaccagagtggatgccagaggtgggctgtgacaggtaccagtcactcctagaacagtctgctttggactgctttctgcatataccctcagaggccctttagcacagcaacttccctggtatttcttacagacacatcatgttggcagagtgcatctctataaagggacacccaacttggttgtcagggctcagttgatgggagcagcttaagaggagttgagacactggcaagaattctgtccagcagccatcaaggtagcagagggctggaaagaggcaggactattccaagcaaccccttcttttctggttagtttgaatctagcggaggaaacaattgtttattcctccaacaagtaaacaaagcaaggataaatagaagcatctgtccatctcaacaaagaagggaataacttgctgacttgtgtatttgtcttgttctcctttgctttcatctttcttcctatatcctttccctcttttcctatctgctgttcttttcaagttcctagtctgtccaataactacttgagctcttttctctctttagtgtgggtatcattgtttgtatttaaatgtctggcttgctttttcagttcacatgttacagtggtccattctgaataataatgaaacctcaaaggaagatatgggatatgaaaatgccaaggatgggatatacatataaaaggcttaatgaggctgagacaatgaagggtccttttatttaaaagggtgggggggggctaggattgtgaaaagaggaggtacccagaagtacctacctcctcctggggaacttgtgctggaagggatgttacttcctctaggggggctaggtgggaggaagaggtttaaaaggaaagggagggtgtgccagactgcagtggggggagggggaatacaagcactacattgcatagttgtatgaaacaagggggaagctttagttaaaaagattccgtatgaaaccaaaaatgatatccaacccatttgaacaaattacaaggagacagtacatttgtaaagggaaaaagaaaaggcaaaaatcatccctccagaagttcaagatctgaatctaaatattgaatgagtgaaatgtcaactcaagaattcagcctgatttaggagctgatccatgactacaacaaggagacaaggagtcagtggctgtggcctagagagatgtgaatgagaaatatgtcagatttggggggtgggggggagattaatcatggaaatggaaggctcagaaaatcaagtttaaaagtcagtggatctcctggctggggtagtgtatgcctttaatcccagcatttctgaggcagaggcaaatggatcaaaagtctaaggctggcctgttctacaaagttagttctaggacagccagaggtatacacagagaaaccctgtctctaaaacaaaaaccctcaatggatcaagtaggagaaggacacgggtaaagtgtcattgtgctagcaataaaggaaaattataactgcaactttcaagaccatgactgagagagatcaagcctgagtctttggtatagaagaaaaacgtattcagcgaaatagtagcagaaaatccctcaaatctaggaaaagatgaatactaagaggcattaaaaccccaaatagggaccaatgagatggctcaacagttaacactggctactcttccagagatcctgagttcaattcccagcaaccacatggcggcttacaaacatctataaagggataagatgccttcttctgacatgtagatatacatgcagatagagcactcttacatttaaaagtatatatagactagggggctggagagatgtctcagtgtttaagagtactgtctgctctttgagaggtcctgagttcccagcaaccacatggtggctcacaaccatctgtaatgggatcttctggcatgcaggcatatatgcagatagagcctcatatataaaataaaaaaataaataaaatcttttaaaaatagactaaagaaatagactctccttgtcacacaattaaaattctgttgtagctctgataatagaatgctgcaaagagaagcaataagctaaaaaggcaaattcactagaattacatgagtggaaaccctaaaagtcaaggacatgtagaataattgattttaagctctaagaataaatagctgacaaacttattcaacaaaggtatcttggagtctttagaaaataaggaaattccaagagaaagacaaattaaagcagcccttgacactaaaacagcatacaggagaggcacttgctggaaacctatgcacagaggaggaattcgcgctcagaaaggaaagatctcatgagaagaatagccataagaattagaaaataatcaaacaacaaattggtaaagccagtattttagtcagggttctttaaatgaacagaactaagaaaatgaataagtaaatatatattcatgtatgtgggatttattagactggctcacagggtgtgtcaccatgcaaaggctaagaatttcataggtgttcagcctacaggcaggacatctcagccatcccaatctggctttggagtcctggaggagttctgaagagctcctgtcttcagtgtgttctggaatcctgaagctgggtttactactggcagcacccacatagacgaacttgccagcgaggatgggggcaagcacagtctggatggactccatgactttaacaggaaaacatgaagttgggaggtgggttgggtctgggaggagatggggggagtagtagagatgaataggatttttaaaaaatgtacatgtgtatgaaattctcaaaaaaataataaaaatgttttaaccaagagttgatctttgaaatggtgaacaatattagtaaactcttaactaaataaataaaagtcatcaatacaattaagaaataaacataaaagacatcaggataagaggggaggaaaggagactatttaaaagagcttcagaaacccacagcaaggaagaaggagaagaaaggaggaggaggaggaggaggaggagaagctgctgttgttgaaaacttgagagaaacatgagagagatgtaccagagagaagaaagtgaacagaacacagccccagccagcaggctcccagaatgcaggaagggaacagaaatctcatttaaagggtaagccgctcagccttgtgcagttcaccagagaggccatagctctaaatcctcctcaaacacagttgcagagtgctctgactggcagaataatcaacagtggaaagttcttgctccaaaggctgtggccaggggtcagcttgaaagacagcctattgcttcgaattgagctatcctaaggacttgagaccagagaacagtctgcgtgagacagctcgggaaacagctgggggtgaggggtgctgggcaatgacaaagtggggaagtagaagtcataggaagttaatccatttctgcaagcgcaatgtctaggtcccaccctcagtgcctgggataagacctcatccactgagaaaactgcagactgatcatccagagcctgacgttagcccgtggatcagcaactggcgccagagaactccgaagcgggtcatgtgacatccttaggcacatccctctagaagggttaattcgtgcttggtgggttttgaaactacaaagaaaagtgtgtccatccnnnnnnnnnnnnnnnnnnnnnnnnnnnnnnnnnnnnnnnnnnnnnnnnnnnnnnnnnnnnnnnnnnnnnnnnnnnnnnnnnnnnnnnnnnnnnnnnnnnnnnnnnnnnnnnnnnnnnnnnnnnnnnnnnnnnnnnnnnnnnnnnnnnnnnnnnnnnnnnnnnnnnnnnnnnnnnnnnnnnnnnnnnnnnnnnnnnnnnnnnnnnnnnnnnnnnnnnnnnnnnnnnnnnnnnnnnnnnnnnnnnnnnnnnnnnnnnnnnnnnnnnnnnnnnnnnnnnnnnnnnnnnnnnnnnnnnnnnnnnnnnnnnnnnnnnnnnnnnnnnnnnnnnnnnnnnnnnnnnnnnnnnnnnnnnnnnnnnnnnnnnnnnnnnnnnnnnnnnnnnnnnnnnnnnnnnnnnnnnnnnnnnnnnnnnnagggaggcccagcccagaccatacgctgcaaagctgtgtgaccagcagaggtcagtagtacataaagaagggaagctactaagggtgaagcctgtcgaggcctctgttgattatgtgtttacccaatataggcgaacgacagcatgaataccaaattcaactgaccctcttccccgccccaccaccatcaccttgaatccagaagtaatcccgacgtttcatctgttattctttttgtcccttgagtttaagatttatttttattctatgtgcatacaagcttgcctgcatgtatgtatgtgaatattgtgtctgcctggtgccccaagagagagatcctggaactggagttacaaatggctgtgtgcggctttgtgggttctgggaaccaaacattgatcccctggcaaaagcagcaagagctttaatcactgaacacccctcactctgtctctgtctgtctctctctgtctctgtctctctgtctgtgtctgtctgtcagtctatctgtctctgtgtgtgtgtgtgtttgaggaaggatttctctgtgtagccctagctgtcctgggacttgctaagtagacttgtgtggcttccaactcaaagatccacctgcctctacctcctcagagcagggattaaaagtgtgcactaccaacctggtgtgaaccgtctcttaagcaccctgttatcatcatcatcatcgccgccaccgccaccataatattttaaagactcttatgttttctttctattcatctttatacatttgtctactcgttagtaggcaaacgtttagttgttgttgtttggggggggggctttttggccttctgttttcacactttccctttatgcttttagtactattacagtcttgccccactctaggcttttaaaactttgtgggtttttccccccttcttacattcatgtaattggggttatggacttctctcattattggggattttacattcttttttgatgtcttgagctttttcctctccttcagagctttctgttctgtctcttctcacatgtttgcttcatttctttcccctctccctgccaggctcctttatgttgtccatgtgtgcttccatgtcatgtacactttgacgttgttgcttttgaagccagttgattcctctattctgctgcgggaggtttacccctcaagagtagagcaggctactccgtaagaaaaatacacaaagaaaattggaggggataaccagaccaacaaggaggaggaagggaaggaggggannnnnnnnnnnnnnnnnnnnnnnnnnnnnnnnnnnnnnnnnnnnnnnnnnnnnnnnnnnnnnnnnnnnnnnnnnnnnnnnnnnnnnnnnnnnnnnnnnnnnnnnnnnnnnnnnnnnnnnnnnnnnnnnnnnnnnnnnnnnnnnnnnnnnnnnnnnnnnnnnnnnnnnnnnnnnnnnnnnnnnnnnnnnnnnnnnnnnnnnnnnnnnnnnnnnnnnnnnnnnnnnnnnnnnnnnnnnnnnnnnnnnnnnnnnnnnnnnnnnnnnnnnnnnnnnnnnnnnnnnnnnnnnnnnnnnnnnnnnnnnnnnnnnnnnnnnnnnnnnnnnnnnnnnnnnnnnnnnnnnnnnnnnnnnnnnnnnnnnnnnnnnnnnnnnnnnnnnnnnnnnnnnnnnnnnnnnnnnnnnnnnnnnnnnnnnnnnnnnnnnnnnnnnnnnnnnnnnnnnnnnnnnnnnnnnnnnnnnnnnnnnnnnnnnnnnnnnnnnnnnnnttatggtgccaagcctcaaatcctttgcatgaccccttccagtcctgggccatcaactacagctgaggctataccttcaccagtggccttccatgacctctcaaagtgccaagcctcagctgttcttcatgacaccttcatgccttaaaaaccagtaccgcctgggtgattcttacacattaccaagtccagctgcaccacgaggtacaaccttggctatctctggaacacagcttctttgtgctcccagaaaacacttcccagaagattttacctcggtgatgctggtctcttcttaatcactgctaattccttagctccagctaaccagcatcaattgtcccaggagttccttccactcttaactctagagccagagccacatggctgaagctgccgagttctgctgcttacaggaactagaacatgatccccttgtactattacattatcactagctttatgttttctaaatccttcactgcctaaacttggctatcctagttcttgctctgtagattgaccttgaatgcagagatcagcatgcctgtctcctggggattaaaggtgtgtaccaccatgcctgaatctaaattcagctgggtaggctcttgccccaaggtcccactcccttaatctgttatttcctaggacacaggattttgctccatttcacttcctggtatgcctttactactcagaccatatattttatattttgcctttctaagcttgttcaaacttctccttgtgagatttaaccagagaacagtctctgctgggcttttttgaaacttcctttgtcaatgcaattaatgcaattaatccaagtctcttcaccttagcctcaggcagacttttcagacaagagcaaaaagtagccacattcttcaccaaaataccacaaaaacagtctttatgccacatactgaaatgcttctcctttgaaatctcttgggccaggtcaacacagttcaaattactcccataaacaaagtcttccatattcctactaggatgacccattaagccccattcaaagcattccactgagttccaaatccaaagtccaaaaatccacattctttcaaataaaagcatggtcaggcccatcacagcaataccccactcccagtaccaacttctgtattgggttttactgctgtgaacagacaccatgaccaaggcaagtcttataaaaaacaacatttaattggggctggcttacaggttcagaggttcagtccattatcatcaaggtgggagcatggcagtatccaggcaggcatggcacaggcagaactgagagttctatgtcttcatccaaaggctgctagtggaagactgacttccaggcaactagggtgaggatcttatgcccacaccctcagtgacatacccattccaccaggtcacacctattccaacaaggccacacctccagatgatgccactccctggtccaaggatatacaaaccatcactatatatatataaatatatatatatatatatatatatatatatatacacacacatatatcttttaaaaa

SEQ ID NO: 626 - DNA, 8675 bp, Mus musculus
tctcgctcgctctcaccctctcaggaggtagcgaaagtgctttggcggtttgtacggcggtggctcgggctttcgggaccgagcggccctgcggacggtctctcgaggcaatctcccctcccctgaccctgatccgtccggggcgagccccttggaagcgcgcagacttggttctcaaccctggcggagtgatgaacagtagatgttctaaggaaattgatgttactgatcttttagttgcagctcgacatgggttacaaagtcttggaaaagttggtatttcacggcgaatgcccccacctgctaaccttccaagtctcaaagcagagaacaaaggcaatgatcctaatgtgaatattgtgcccaaagatgggacaggatgggcatcgaaacaagagcaacatgaagaagaaaaagcaccagaagtgtcaccagcacagcccaaacctggggttgcagctcccccagaagtagcacctgctcccaaatcatgggccagtaacaagcaaggtgggcaaggagatggaatccaagtgaatagtcaatttcagcaggaatttcccagtctgcaggcagctggagatcaggaaaaaaaagaaaaggaagcaaatgatgaaaactatggacctggacccagtttacgccctccaaatgttgcttgctggagagatggtggtaagtctgctgggtcaccttcctctgatcaggatgaaaagcaacttggccaggatgaaagcacggctataacatcagaacaaaatgatattctcaaagtggtagaaaagagaatagcttgtggtcctccacaggccaaactgaatggacagcaacctgcacttgcttctcagtatagagctatgatgcctccatatatgtttcagcagtacccaaggatggcatatcctcctctacatggtcccatgaggttcccaccttcattatcagaagcaaacaaaagccttcgaggaagaggccctcctccttcttgggcttctgaacctgaacgcccatccatccttagtgcatccgaactgaaggagctcgataaatttgataacctagatgctgaagcagatgaaggttgggcaggtgctcagatggaagtagattacacagaacagctgaacttcagtgatgatgatgagcaaggaagtactagtcctaaagagagcagcagtgaggatcaaactgcaaaaacacctgaaagcacagaaaaccgaaaagaagtagatgaagcttccagcactaaatcatcttctcagatacctgctcagcctccagtcacaaaaagtccttatgggaagggaccaccatttaatcaggaacgtggcccatcttcacacttgccaccacctcccaagttgcttgcacaacagcatcccccacctccagatcgacaaatacctggaagacaaggcccctttccctccaagcctccagtacctgataacgatgaaatatggaagcaaagacgaaaacaacagtctgaaatatctgcagcagtagagcgtgctcgtaaacgccgtgaggaggaagagcgaaggatggaggaacagaggaaggcagcgcaggacagcaatcgcagtgaaaaggagaccacacaagtggtacaagaagcagaacctgaatcgggggctcaacctcgacctggctatttcaaacagtttcagaaatcattgccaccacgatttcagcgtcagcagactgtgccctcacagccgtctaatggttcagtccctcctccaccacacagacccctttaccagccaatgcaaccccaccctcaacatctggcttctatgggttttgacccaaggtggctcatgatgcagtcctatatggatcctcgaatgatatcaggaaggcctgctatggacattccacccattcatcctggaatgattcctcctaagccgttaatcagaagagaccagatggaagggtcacctaatagctctgagtcatttgagcatatagctagatctgcaagagatcatggaatttcactttctgaacctcgaatgatgtgggggtcagatccctatcatgctgagcctcagcaggcagctactcccaagtctgctgaagaaactggggatgcaaggcctgaaactgcaatggaccatgagcatatgactgctgcttatcctgtagaacatagtcagttggaaactcattcaaaaacggacgttgctagagactcaactgaaaccgaagaacaaaagtttttaagcagatcactggaagatgtaaaacctcgccatgttgatacaaatactcagtctgcttgttttgatgtaattgatcagaagagcttacctacttctgcagaagagcggatctcagcgctagaaagtcaacctgcccgaaaaagaagtgtttctcatggatctaaccatgctcagaatgcagaggaacaaagaaatgagccgtctgttagcatacctaaggttatcaacagatgtatggattccaaagaaactgtagaaaagccagaggagaagccaagaaaagatggctttctgcgatcttctgaagggcctaaaccagagaaagtctataaatctaaatcagaaactcggtggggtccaagaccaagctccaacagaagagaagaaggtaatgataggcctgtgagaaggtcgggtcccattaaaaaacctgtacttagagatatgaaagaggagcgagagcagaggaaggagaaagaaggtgagaagcttgagaaggtcactgaaaaagttgttaaagcagaaaagccagaaaagaaagatcttcctcttcctctcccccctccagcaccagctcaacctcagccacagccattggtttcaccaccagtacagccagaaccagagaaaccaccatcaacagaaacatcaactttgactcagaagccatctcaagatgagaaacctttggaacctgttggtagtgtccaggtagaacctgtagttaaaactgtaaaccagcaaagcgttgcagcaccgacagtcaaagaagaaaagccacctgagaaagtcattaacaaagatgttggaatagaaagatctcgcccagattctagactagcagttaagaaagactcatctttacccactaggacctattggaaagaagctagagatagggattggtttccagaccaaggatacagaggccgaggcagaggcgagtattactccagaggtcggagctatagaggctcttatgggggtcgtggcagaggtggtagagggcacactcgtgagtatcctcagtatagagacaataagccaagaacagaacatgtgccttcaggacctctcagacaacgagaagaaagcgaaacacgaagtgagagttctgattttgaggttgttcccaaaagaaggcgacagaggggttctgagacggacacggacagtgaggttcatgaaagtgcgagtgacaaagacagtgtaagcaaagggaaacttcccaaaagagaggaacggcctgagaacaaaaaacctgtcaagcctcagtcttcttttaaacctgaaaaccacgtccgaatagataatcggcctttagagaaaccttacataagagaggaggataaatctaaacctggtttccttcccaaaggggagcctacaaggcgtggcagaggaggaacattcagacgaggtggaagggatcctggaggccggccatcacgtcctgccaccttaagaagacctgcttatcgagacaatcagtggaacacaaggcaggcagaacctcctaaacctgaagatggagagccaccaagaagacatgagcagtttatgcctataccggcagataaacgacctccaaaatttgagcgaaaatttgacccggctagagagaggccccgaaggcagcgacctacccgaccaccaaggcaagataagccacctcgatttagacggctgagagagagagaggccgcttccaagacaagtgaggtgttggtaccctcaaatggcacagctaataatgttgttcaagaaccagttaatccacctgcggacatttctggaaataagacaccagatttgtctaatcagaattcttcagatcaggcaaatgaagagtgggaaacagcctctgaaagcagtgattttaatgagaggcgagagagggacgagaagaaaaatgctgataagagttcacaagcagttgtaaaggctggtgaaagtgttttgcctccaaaaagggaaatagcgaagagaagtttttctagtcagagacctggagttgatcgccagaatcgtcgtggcaacaatggcccacccaaatcaggaaggaatttttcaggtcctaggaatgaaagaagaaatggcccaccatcaaaaggtgggaagagagggccatttgatgaccaggcctcaggcacagctggtgctgaccctgtcagtggtaactctgcacaccaccaagaaggtgtgcctaatggtgcaggacagaagaattccaaggatgctgctggaaaaaagagggaagataccaaaccgggtcctaagaagccaaaggagaaagtagatgctctgtcacagtttgacctcaataattacgcaagtgttgttatcattgatgatcatcctgaagtaactgtaattgaagacccccagtcaaatctgaatgatgatggctttactgaagttgtatctaaaaaacagcaaaagcggttacaggatgaggaacgccgaaagaaggaagagcaagtcgtacagacgtctaatggcacagacttcgtagccgctgggaagtccatgcccacttcacagtcccatggctctctaacagctgagttatgggacagcaaagtggctgctccagctgtgctgaatgacatttctaaaaaactaggtcctattagtccaccacagccaccttcagtcagtgcgtggaataagcccttaacatcatttggatcagcaacttcatcagagggaacaagaaatggtcaagagagtggtgttgaaattggaattgacacaattcagtttggtgctccggcctcaaacgggaatgaaaatgaggtggttcctgtgctttcagagaaagcaactgataaagttcctgaacctaaagagcagcggcagaagcagcctcgggcagggcccattaaagctcagaagcttccagacttgagtctggtagaaaacaaagaacataaacctggtcccattggaaaggaacgatcattaaaaaatagaaaagtgaaagatgcccagcaggtcgagccagaaggacaagagaaacccagcccagctgtggtcagaagcactgatcctgaaacagcaaaagaaaccaaagcagtctccgaaatgtctgctgaaattggggcgatgatctcagtctcctctgcagagtatggctctgatgcaaaggagtctgtaacagactacaccacaccttcctcttctctgcctaacactgtggctactaataatgcaaagatggaggatactttagttaataatatggagtctgcacggaaggcatgggagaattctccaaatctacgagaaaaggggtccccagtaacttctacagcacctcccattgtgagcggagtcagcagcagtgccagtggaccaagcactgctaattacagctccttttccagtgcatcaatgccgcagatcccagttgcgtcagtcactcctacagcatcactatcaggagctggtacttacactacctcttcattgagtacaaaatctacaaccacttcggaccctccgaatatttgtaaagtaaaaccccaacaattacagaccagcagcctaccttctgcaagtcacttttcacagttgagctgtatgccttccctcattgcacagcagcagcagagcccgcaggtttatgtgtctcagtctgcagcagctcaaatcccagccttctatatggatacaagtcatttattcaatacgcagcatgcgcgattggctccaccatccctggctcagcagcagggcttccaacctggtctctcgcagccgacatcagttcagcagattccaatccctatctatgccccactgcaagggcagcaccaagcccagctgagtttgggggctgggcctgctgtttcacaggctcaggaattattcagttcttcaattcaaccatacagatcgcagccagcctttatgcagagcagtctttcccagccttccgtggtcctctctggtacagctatccacaacttcccagctgtccagcaccaggaacttgccaaggcacaatcaggtcttgcctttcagcagacttcaaatcctcagcccatccctatactgtatgaccatcagctgggccaggcatcaggactaggaagttctcagctgattgatacacatcttcttcaggttacagtacctttaccagcatcccagctttccttgacgaattttggatctacaggacaacctctgattgctttacctcagacacttcagccccagttacagcacacgaccccacaagcacaggctcagagtttgagccgtcctgcccaagtaagccagcctttccgaggattaatccctgctggaacacagcatagcatgatggcgaccacaggaaaaatgtctgaaatggaactaaaagcctttgggagtggcattgatatcaaaccaggaacacctccaattggtggtcgaagcaccacgccaacatctagtccattcagggctacatcaacaagtccaaacagccagtctagcaaaatgaacagtgttgtgtatcagaaacagttccagtcagcccccgccacagtgcgcatggcacagccgtttcctgcacagtttgcaccccaggcaaagcagagagcagaggttcttcagtccacgcagcggttcttctctgaacagcaacagaacaaacagataggaggcaaaacccagagagtggacagtgatacaagtaaccctgaaacgctgagtgaccctcctggcacctgtccggaaaaagtagaagaaaagccaccccctgcacccaccataaccaccaaacctgttagaactggaccaatcaaacctcaggccatcaaaaccgaagaaacaaaatcgtaaaggctgtggtttattggggatgggtgggtagggaaagtgaagtcaaataatgccagccagcagccacaggggtaaagtggtctgtgacatcatcctgtgagacacaaggggcatagagcatttacagtgacagagctgctgcacagtgaggctccacaggctcgcacctccggtgtaacatttgcatcttcagttggtttgtatacaagtacgtaaacagtctgtaagtgcatacagtttagtcctaaggagcatgaaacaccagaagtaggaggaggagagcgatagataccacagagtagctcagctggacactgggtggtcccatgaatccatcagctgtggctcttctgctcccttgtgttctttggatgtgtctatggctcttctaggcttgaaagtaaaatgatgctaactggtgctggatagaggagccttatcttttattacggcagcttgctatttttgtaacatggtgatttggttgaacacaataaagtacagtagtaactgatctcccctcttcctggatgagtgagcagatgattgaatattgatgtcagcatccttgaacacactcagatgagcaacatagagcttctgcttctatttaaaatgatgctgggtttgattgtggtccgaagctttgaagcactacttggcgtctccttccttggaggtctcaccatttaaacataacatttgataacgtgttggtaaggtgaggtctagcttgtctccactaggtcatcttcatatgaatccagtgggtatacggttttgttttagggatagttcattttttaatgacggtttttagctgacattcatggagagaatgaatccttagaactgtgccgctagtgaaaggaaatcctgtctaagagtgtttctttacagagcagtgtcacaccatcctttgggccctctgctggaaacatagaatcaagtctcaaataatgccttttaaattgtctcctctagtattatagatgtaggacagtactgtatcatacctctgtgaatgtaacatagcttgtacctgctttatgatacgtagtagtgaccgtgctttatcagagctgttttttaatgatgttgctcagaatgttttctttccagatgatgattgagaagctaattaaaaaaaaaaacagaaacaaaaaatggtgccaggtaccacaagagtaacagaactgtgctgttttctgggattttgttttttacttttttttttttttttttttttgataagagtgtgctggatgtctctacaattttgttcaaatgactgcagaacctggaaaagctgttgctgctattgatgcataacatactgctattattggtctttttatataaatataaatatatatacatatatataatttgaattttttggaaactttagctgtgctgtcaactttggaaaaacgtatcccagtttactgtgttgagttggcattgtacagaaattaacagccatattggtctagaaatgttgaacttaatttttttttccatttgtacaggggtaacgcactgtattaaatatgtaaggtcttatctacgtgggtttgattacaaaaactaataaagtattctcta

SEQ ID NO: 627 - protein, 2344 aa, Mus musculus
SLALTLSGGSESAVCTAVARAFGTERPCGRSLEAISPPLTLIRPGRAPWKRADLVLNPGGVMNSRCSKEIDVTDLLVAARHGLQSLGKVGISRRMPPPANLPSLKAENKGNDPNVNIVPKDGTGWASKQEQHEEEKAPEVSPAQPKPGVAAPPEVAPAPKSWNKQGGQGDGIQVNSQFQQEFPSLQAAGDQEKKEKEANDENYGPGPSLRPPNVACWRDGGKSAGSPSSDQDEKQLGQDESTAITSEQNDILKVVEKRIACGPPQAKLNGQQPASQYRAMMPPYMFQQYPRMAYPPLHGPMRFPPSLSEANKSLRGRGPPPSWASEPERPSILSASELKELDKFDNLDAEADEGWAGAQMEVDYTEQLNFSDDDEQGSTSPKESSSEDQTAKTPESTENRKEVDEASSTKSSSQIPAQPPVTKSPYGKGPPFNQERGPSSHLPPPPKLLAQQHPPPPDRQIPGRQGPFPSKPPVPDNDEIWKQRRKQQSEISAAVERARKRREEEERRMEEQRKAAQDSNRSEKETTQVVQEAEPESGAQPRPGYFKQFQKSLPPRFQRQQTVPSQPSNGSVPPPPHRPLYQPMQPHPQHLASMGFDPRWLMMQSYMDPRMISGRPAMDIPPIHPGMIPPKPLIRRDQMEGSPNSSESFEHIARSARDHGISLSEPRMMWGSDPYHAEPQQAATPKSAEETGDARPETAMDHEHMTAAYPVEHSQLETHSKTDVARDSTETEEQKFLSRSLEDVKPRHVDTNTQSACFDVIDQKSLPTSAEERISALESQPARKRSVSHGSNHAQNAEEQRNEPSVSIPKVINRCMDSKETVEKPEEKPRKDGFLRSSEGPKPEKVYKSKSETRWGPRPSSNRREEGNDRPVRRSGPIKKPVLRDMKEEREQRKEKEGEKLEKVTEKVVKAEKPEKKDLPLPLPPPAPAQPQPQPLVSPPVQPEPEKPPSTETSTLTQKPSQDEKPLEPVGSVQVEPVVKTVNQQSVAAPTVKEEKPPEKVINKDVGIERSRPDSRLAVKKDSSLPTRTYWKEARDRDWFPDQGYRGRGRGEYYSRGRSYRGSYGGRGRGGRGHTREYPQYRDNKPRTEHVPSGPLRQREESETRSESSDFEVVPKRRRQRGSETDTDSEVHESASDKDSVSKGKLPKREERPENKKPVKPQSSFKPENHVRIDNRPLEKPYIREEDKSKPGFLPKGEPTRRGRGGTFRRGGRDPGGRPSRPATLRRPAYRDNQWNTRQAEPPKPEDGEPPRRHEQFMPIPADKRPPKFERKFDPARERPRRQRPWPRQDKPPRFRRLREREAASKTSEVLVPSNGTANNVVQEPVNPPADISGNKTPDLSNQNSSDQANEEWETASESSDFNERRERDEKKNADKSSQAVVKAGESVLPPKREIAKRSFSSQRPGVDRQNRRGNNGPPKSGRNFSGPRNERRNGPPSKGGKRGPFDDQASGTAGADPVSGNSAHHQEGVPNGAGQKNSKDAAGKKREDTKPGPKKPKEKVDALSQFDLNNYASVVIIDDHPEVTVIEDPQSNLNDDGFTEVVSKKQQKRLQDEERRKKEEQVVQTSNGTDFVAAGKSMPTSQSHGSLTAELWDSKVAAPAVLNDISKKLGPISPPQPPSVSAWNKPLTSFGSATSSEGTRNGQESGVEIGIDTIQFGAPNGNENEVVPVLSEKATDKVPEPKEQRQKQPRAGPIKAQKLPDLSLVENKEHKPGPIGKERSLKNRKVKDAQQVEPEGQEKPSPAVVRSTDPETAKETKAVSEMSAEIGAMISVSSAEYGSDAKESVTDYTTPSSSLPNTVATNNAKMEDTLVNNMESARKAWENSPNLREKGSPVTSTAPPIVSGVSSSASGPSTANYSSFSSASMPQIPVASVTPTASLSGAGTYTTSSLSTKSTTTSDPPNICKVKPQQLQTSSLPSASHFSQLSCMPSLIAQQQQSPQVYVSQSAAAQIPAFYMDTSHLFNTQHARLAPPSLAQQQGFQPGLSQPTSVQQIPIPIYAPLQGQHQAQLSLGAGPAVSQAQELFSSSIQPYRSQPAFMQSSLSQPSVVLSGTAIHNFPAVQHQELAKAQSGLAFQQTSNPQPIPILYDHQLGQASGLGSSQLIDTHLLQVTVPLPASQLSLTNFGSTGQPLIALPQTLQPQLQHTTPQAQAQSLSRPAQVSQPFRGLIPAGTQHSMMATTGKMSEMELKAFGSGIDIKPGTPPIGGRSTTPTSSPFRATSTSPNSQSSKMNSVVYQKQFQSAPATVRMAQPFPAQFAPQAKQRAEVLQSTQRFFSEQQQNKQIGGKTQRVDSDTSNPETLSDPPGTCPEKVEEKPPPAPTITTKPVRTGPIKPQAIKTEETKS

SEQ ID NO: 628 - DNA, 127943 bp, Homo sapiens
cagtcatttagatggtggatgcctctgaaaagagttgtgaccttgggcaaggcagttctcattagctgaggcaatctcaaaagaaggtttagtctcaaagagggctattctcacccagcactcccaagaactctaaaatcagtcattccttccccaggagggactgggcagcacatctcagtgtccaccacaggtggtggttctctcactgagacacagaacccttacctcaaatggataacaactttacatattacaaaaacacaagggaggcgtggtggctcacgcctgtaatcccagcactttgggaggccgtggcgggaagatcacttgaggccaggagttcaaaacaagcctggccaatatggcaaaaccccatctctactaaaaatacaaaaattagctgggtatggtggtgcattcctgtaatcctagctacttgggaggctgaggcaggagaatcaattgagcccaggaagttgcagtgaaccaagattgtgctactgcactccagcgtggacaacagagccagaccttgtctcaaaataaaataaaataaaaaactcaaacaaacaaacaaacaaaaaaacacaaccatcagtcaagtgctatactagcttgttaataaaattttaaatttgcagctagacatatgcctgtaatcccagcactctgggaggtcaaggcaggaggatcccttgagctcaggagtttgagaccagcctaagcagcatagtgagaccctcatctctacaaaaaaaaaaaaaaaagaaaagaaaagaaggaaaggaaagaaaaagaaagaaagaaagaaagaaaaggaaagaaaaagaaagaaagaaagaaagaaagaaagaaagaaagaaagaagaaagaaagaaagaaagaaagattgattagctgggcaaggtggtacacacctgtagtcccagctacttgggaggctgaggcaggagaatcacatgagccttggcagttgaagctgcagtgagctgtgatcagcctctgcactctagcctgggtggcaaaataaatacattctgcatttaatggtcacaaatgggttttagaatgcttgccttctgaaatcacaccattgcaagagtaactccctagtttcttaagagaataatgatggagtttctgtggaagtaaaaacaatctgaggaaacaatccagccctgcctacttctctcaacccctactgcaggattcaagcctcctctcactactccttggattatcattacagcccctgaaacagctgctcttgtgccaggcaaaccattcttcacatttcagctaaagaaaagcttcagacattaaccatttacagctccagcagctagcacaatcactggtacatagtttatactcaattaatacttgttgaaagaaaaagtcactaaggaataaaatatattaagctgtctttcctatgtgatatcataaaacttacacattttatctagattacgtaatatcccagtttaaatctaatcattggctcctattgccctcagtcatacaaagtcagtttacatgactttttgcaatctggtctctgatcatctctgaagttttgcttttttgccccttttttcacctttctcccccctccacctcttcccttttactttatgaacaacagagctatcaagatgctttttaaaatcctcaaacatgccatgctccatttggcttttgggatctttccatacgctggtctctctgcctgaaacattcttcacccttcactatatgcaagttaactgcctccctttccccaaaacttgccccatcacttcctgtcatatctgcacacacacacatacagacacacaccctcactcataacatatattcacatgagtatctaattcctataaactgttggggcttaattctgggcagaaatgtagttataagcattaatcaggctgcgctatgacccacttccttgtaagtgaaagtcgcataacagtagatactgaccatttgcgtcttgattttccctatagataggatttctaacattaaaatcattaggcttttaagaaccgcttaaagtcgggcacggctgctcatgcctgtaatcccagcactttgggaggctaaggtgggcagatcacctaagttcaggagttcaagactagcctggccaacatggtgaaacactgtctctgctaaaaatacgaaaattagccaggtgtggtggtgggcatctgtaatcccagctacttgggaggcagaggcacaagaatcacttgaacccaggaggcagaggttgcagtgagctgggatctcaccattacactccagcctgggtgacaagagcgagactctgtctcaaaaaacaaacaaaaaaaaactgcttaaacagatcctgaattccagacagaacagctgacaccaactagtttaaagatctccacagagcagcctagtcagcatgagaatatggtttcttcatctcctgccccatgactttactctgcactcttcaaccaatcaactatctctacacttctgcccactctgaaacccttaaaaacccaagccctaaactcctcacggcccaatgattaaatctttctctgctgcaaccctgcatattgacttgcaatagatctattatggctacattccctgacccccaccatccctgcaaatgtgggttaggtgccttcctttggactcacaaggcacttttaattctctcatcagagaatttatcacctgtgatggttatttttctgtgtcaacttggctgggctactatgtcaatatttggtcaaacattatcctgaatgtttctataaaagaggtgttttttgtttgtttgtttatttgttttttgagacagagtctcgctttgtcgcccagggtagagtgtggtggcccaatctcggctcactgcaaccaccacctcccaggttcaatcaattctcctgcgtcagcctcccaagtaggtgggattacaggcacgtgccatcacacctggctaagttttgtatttttagtagagctgaggtttcaccatgttggccagtgtggtctcaaactcctaacctcaagtgatccacctgccttggccttccaaagtgctgggattacaggcatgagctgcttcatccggcctataaaagtgtttttgttttgtgggagggggtgggggggtgattatattaactgtaaatggatgtattttgaccttcataatgtgagtgggcctcatacaatcaagtgaaggcctaatggaaaaaagactgatctcccccaaaggaattcttaagtgtggcagccttttgacttaaactacaactttgtctcttccctgggtctccagcctgttggtctacgtatcctattggttctgtttctctgaaggaccctgactaatatgtcacttttaatcataattacttataatttcaccccactctcatcccacttgaatagaatctcctgagaacaggaatttaaactgttttattcatttttatgtcttccttagcctgatatatcatgactttttttttttttttttttttttagacagagttttgctctgttttccaggctggaaagcagtggcaagatcatagctcactgcagcctcaaacgcctggggtcaagagatcctccagcctcagcctctcaagtagctgagattataggcacacacctggctaatacataggtaatatggaatattgttcttttgttttttatggaatattgaaatgaagagtttcatttcactgcaattccccaaggctgttaaatactttgagatgctttctctcaattctctttcaatcactattcccctttctctcttctatcaagaccatgccctatgaagttaacaatggtccaacctctagagaattgcactaattcccatttgaagcaattattcactaagactctcagcagctcatagaaatatttctgaaacaatcatttaattaaccccagcagaaaaaagaatagagaagagcctgtagtcccagctactctggaggctgaggcaggagaatggcgtgaacccaggaggtggagcttgcagtgagccgagattgcgccactgcactccagtctgggtgacagagcgagggtccatctcaaaaaaaaaaaaaaatagagaagagaaagagaaacaaaccaaaaaaccaaactaggtacaagctactggtggcattgtaacatatgaaattctctcttccaccacaagcctaaaaattattcaaaatacctagtcccaatggtaaccaaaaaaagtactatcaatcttacttctcttaattactatgaagcaataaaatatttgacatcagatagttttatttatacatatacccaattggttgggcagcagatacataaaaagtctcgtatactttaagaaatgctacaagcgacagccagagttacaattttaatttattgggcactgtattcatattcattagtaatatctcacggatctgctttttggcctaaaaacttaagaaattacaattttctgtatcttcagttaccacctggctattttccttttttaagcttttcctgttctgcctttgttgtggcccctttccctttgtgatcttccccttcagatcagtgccttttatcgctactcatttgctgactcaggtgaatttacagcctaaggcaaaaatgggagccagcaaagtttgttttctcagtctctcccctctttccctcccttcttcctgcagctctgtgagggactaaatcttccagatattctgtgcttattaacaacacagcaccctcttgacttggaatccatagctgtaagaacttagtttctcctgtcagctaagaaaactctgggaaaatttttggtggacagtaaatgccaggtaatccaaacttcattaatttatgacgtaacaaataaatacaacttttagccaaactgtcccctttattcaattataaaaagtgtttgctaagtcaataaacagactggtaattaaaatatttatcggctgggcgcagtggctcacgcctgtaatcctagcactttgggaggccgaggcgggtggatcacctgagtttaggagttcgagaccagcctggccaacatgatgaaacaccctctgtactaaaaatgcaaaaattagctgggtgtggtggcgggcacttgtaatcccagctactcgggaggctgaagtaggagaattgcttgaacccaggagacggaagttgcagtgagccaagattgtgccactgcactccagcctgggtgacaagaacaagactccatctcaaaaaataataataaaataaaataaaataaagtatttatcctacttggccaggcgcggtggctcacgcctgtaatcctagcactttgggatgctgaggcaggtggattgcctgagctcaggagttcgaaaccagcctggggaacacggtaaagccccatctctaaaaaaaaaaaaaaaaaattacgcgggtgtggcagcaggcgcctgtagtcccagctactccagaggctaaggcaggagaatggcttgaacctgagaggcggaggttgcagtgagccaggatcacaccactacactccacactccagtctgggtgagagagtgagactccgtctccaaaagaataaataaataaataaataatttatcgtactttatatataatgtaaaattttacatataacatataatataaacattataatgtactcaacagatagcctctcacaagttggccaaaggttttttttttgcgggggcggggaaggagtcttgctctgtcacccaggctggagtgcagtggcaggatctcagctcactgcaacctcggcctcctgggttccagcaattctcctgcctcagcctcctgagtagctgggactacaggcgcccaccaccacactcggctaatttttcgtatttttagtagagacggggtttcactgtgttagccaggattgtctcgatctcctgacctcaggtgatctgcccgcctcggcctcccaaagtgctgggattacaggtgtgagcctccatgcttggcccatttttttcttagtttttgttttttctggaccccccgcaaaggtgatttgttgaagaactatcaacatttttcttatctttattagcaaatgtacaacatctgttgatgtttataaaccgagattacattttcatgcagtatttgggtattctggttttctttacaccaggcttatcatgtttcatagtttttaactaaatatgatttgctggatcattcataaaaagaaaacaaaattgtcaaatgcacctaaacacttaagaaacacaactgctgatccttttgtagttcataagtgtgatgattcagtgttcacatgaatctatgagatgcgccaacctcaaaccttgttatgacgtggtccattacccatctgatgtgaaaatttaaaatttttaaacaaagaagagagaaaaaaggaacattactgctaataaagtatgatactttcactgatcattttgtttttaactactctaccgtaaaatttcagtgcctacaggattatggaatcaatcacaatgagaagggtagaaactcattaaatcattagcaaataaggctggacaatcacaaagaaaatacgtcatattgtttggagagtgaatttgttttcagtaagaaactagtttgcctgattccacaccacccaattggaaatttgataatgttattctaaaattattgtttaaatagaagtgttgtaaattaaatgaaaagttttcattcaatctgtcatgaagacatttttgttataacaaatttgtctacaatggtggagtgtcaggagaagtgcaatccaagtcaaggagacttcagtcacattttccccaataaattggaaacaaaggcagtaagactgctctctaaaagttagactttaagatcacatacatagctaggagcagaaataagcaaagtcacctttaaaacacaaactggtttgatttaactgtaacttgatttttattgaaataatattgcaaagaggtttgggtagccatggaaacagagaaagtaacgtacagggggcactttagggtcagtggccatccaagtgctgctaaggagacaaggagcacaaatcagcagctcagcaggatgtcaccactatattggagatcaatgcgggcaactgcagccattggaaattgagaacttctattttcgggacaaaattctcctgttgagaagatagatgactcaagaaaagtctatacatataactccacttgttcagaatatgtgctcatcaagcaaccttctgataatgccttggtttcctgagtaggtttggctacacagaaaatgcactcagcggggccaggcacagtggctcacacctgtaatcccagcacgttgggaggctgaggcaggcgaatcacatgcggtcaggagtttgagaccagcctggccaacatggcgaaaccccatctcaaccaaaaatacaaaaattagctgggcgtggtggcgcctttgtgtaatcccaactactcgggaggctgaggcaggagaaccgctcgaacctgggaggtgaaggttgcagtaagctgagattacgccacctggacaacagagtgagactccatggggaaaaaaaaaaagaaagaaggaaggaaggaaggaagaaaaggcaggcaggcaaggaaggaaggaagggagggagggaggggaggggaagggagggagggagggaggggaggggagaaggagggagggaggggaggggaggggagggaaatgagaaaatgtactcaagaaaagatagcaccttgggtccatgctggcataccggaggctttctgtttctggcaaaaattaaaagaaaaaaagaaaaaaaaagtattggctttgcagttgttgagtgttcaggtgtataaattaaagctcttagaaattaataatttaatacatgtctttttttttttttttttttttttgagacagagtctcgctctctcgctctgttgcccaggctggagtgcagtggcaggatctgtgctcactgcaagctccgcctcctgggttcacgccattctcctgcttcagcctcctgagtagctgggactacaggcgcccgccaccacgcccggctaatttttttttgtattttttagtagagactgggtttcaccgtgttagccaggatggtctcgatctcctgaccttgtgatccgcccgcctcggcctcccaaagtgctgggattacaggcgtgagccaccgcgcccggccatacgtgtcagtcttatgaccttggttaatgtaatttcatctgattgctgaagttgttctccattgctcaagacagatgatttggctgggcgtggtggctcatgccggtaattccggcactttgggaggccaatgcgggaggcttgcttgagctcaggagttcgaaaccagcccagtcaacatagcaagacctcgtctctactggcaaaaaaaaaaaaaaaaaaaaaaaaaagccaggttttgtggcaagcacctgtagtcccacctacctgggaggctgagacaggtggattgcttgagcctgggaggttgaggcttcagtgacctgtgattatgccactacactccagcctgggcagcaaagtgagaccctgcctccaaaaaaacaaagaaagatgtttctgtgaccaggacactatagaccagatcctagaaggttgtagaaattcactaaagtaatgcttccttgtcctcttgtggatgatcagtaggctttcccctggcaatgaccctatatcaataaaaaaactttttcttttcttcttttctattttttcgagaaagagtctcgctgcagcctcaacctcctgtgctcaagtgatccttttgcctccagcctcccaagtagctaggactataagcatgtgccactatgcctagctagctttttttctttttaatttttttgcagaggtagggtctcactatgttgcccagattggtcttgaactcctggtctcaagcaatccttttgccttgacctaccaaagtattagtattacaggcatgagccaccaagcaagtccagacttttctacttcaaattaatattagtggggagggaggtgttcataatttacctctctttattatttcatttattctaacattgctacagtgacaattccatggacatacaccagctactggcggggaagatcgttcagaccagaagtggtaagaaatccttgaattttaaatatgtcataggtagttcacaaagaggacaaaagataccatttactaaacattcgccatctgttctgacataatattatcatcattgtagtctcccacttccagatacactcatctgcctatgttacacttgcctagtaaaagccagcatgggtgaatcttactattcaacggagctgaacactgtgatggagagatcatataaataaactgaatggcttatctcacatccataattagaaacttaaaaagtgctctcagcagcccatgctactctgttcctcacactagttttactttcactctctgtgataacttttcaatacaccaagacttctcagcttgccccaaattcactgagacatactggcgaactgctggttcaaccatttacacatccacccaccagacataagagtgctcatttcactgaggcttattatcaacttgtaaacgtggtcaattcaagacttcttagaaaggtctcaggtccaagctttgtcctgaaaagataattctgattgcagaaactccctccgtccagcaggaagcgccagcaccctctgtcggggttgggccgccacggaggcttcacgtgatccggccgtctctgcgcaggagtgtggtcttgcggagatttgacctacgtacttagcgtcatgacgtagtacgtaggggctggctagccgccatcttgcttctttttctcgctcgctcgctccccctcggaaagctgcgaaagtgctttggcggtttgtccatccgcagcttcggcttttccagtctggtggcccttccggccacccctttaaccccagctttccctcccccttctttcgatcagagatcggcggagaccctcgaagtgcgcaaacttgacactcaccctgaccggtaaggaaagcgagggtgtgggggccgcgatcaaagagggccccatcgggaacggccagagtgcggcctggggcgtgggagcgcacccagaccctggcgcccggaggctagggggccgcgtggagagggccttgggtccgggcatttcccttctgtttggttaccatcatctctgtgtctggggaagtcggcctccagcttggggagcgggaaaccggagtcagacccgccccatgtggtctgcagcgggagttctggaccggtctgtcttgctcccacctagaccccagtcctggccctgcgaggggattacgcatgttgccgggtaagcgaagggggtttccgtcttcctggactggcggacgtgaagtcttttttttttttttttttttttagtgtcgggtatgcgtttccccaaacaactgaaggactcagccggggctttcactgtctacctcttcctgtgtagtgagggtgggacttgcaatgagcaatgtatgggagggtctggtttaaagacctggttagatgagaggctcttcggggaatcaagaccaaccctacttccgctagggaagtgctgcccaactccggaggaggatttgggtagtcttttcacactctaggccgctccatcctctaacttgcgtggtgaatctcggtagctccctgtctttgagatagcgttgatattggtggtgtcagggtaaaggccccgttttaggactgaagaaaagggcatggggccactatagagacattgatagagtcttccttcctttgcatgagaggagtacctttaatttaaagggatgtatgtgtgttttgacattatttgggatcttttgagggtctgacatgcctgatgtttgctggcttataaagctacctggatttccgcattggctggttttcagcctgggttcatagattcatacctcgttagagtacttagaattgtacagtaggcggctctgctgtaagattttcatttggaatgcaccagaagaatcggaggattttttgattgttgagtacttaatagcttactcctgcaaataaaaataatagggagatactaagcacctaccaagcctaaccccaccatttttcaaaactagatttcacctcccatattggtaattaagatgctgctttgactggagccatttttaggtgtgtgtcacagatgcactgcagcatcttttctggctcaccccaaatgcattgatcccctaaaaaattaggaataaattgaacttgaattttgtctttagcatgtagtcaaatagtaattctctccttttctgtaagtggattttcagaatatagcctttttaagtgattgtgtttgctctgcttagcttatgtgtggctgttctccattaggtgaccttttgctatacactgagcacagtaataagtccttttcatacattttttttttaatctccacaacagacctttgagaaaagtgctattaagatcatccccattttacagatgaggaaatgaaatctgagagagtagtctgaccaaggtcacatagcagttattggtggtattgtgtaggttcaattccatactgtctgaacccaaaggggatgctctaaaccttcaacctgctttttaaattataaactacagtaactaaataagataaagcattattaactagtagtttttctttagcttgactagtatatgaatattgttgcatgctaaggttaaagttttgaaagttgtaaaaatggaatatatccactttggacttggggtagaggctaatttttttgcgtccttttctatttgagtgcttagagataacttaaaactaactctaccatgtcgtagatataatttttaaatttaggcgtctgatctatattattggtagaatactccctcatctgtaaaatggtgatgataataggacttccctcagaggcttttataggagtaaaaaaagataatggataatgtatgtaaagggcttattactatgcttagtgcatagtaaaaggtcaactaatagtggagggagaatggtaggatattggtagaagaaaatactctcttccaagcaataaataatctgtaaattctcagggtgatgtatatatttctttaggtacataagaaaatttcacctccccttatccctgatatgtctacttatatgcaggattttgcttcttagcgatttctttatgctctacagtaaatatccctgggatgagtatcttgttcatagctgaaaatgcagaagttctggctcattccataaaatgtctttgaagattatattatatccctgtctgcctccaagtgccacccctaaacactacttcagtttgttagttaggtaacttgtgttttggatgctatttatgtcatatttgtaaatgacaagaattgatcattggtaaaatgttacataagttagtacagaattgtattcttacagtgaaggacatacaaaaattgtgtctgagttatgacacactttcatttcggtaaatcgtgattttgtcaccttatgaataggacaacacaatgaaagcttatctcagtctatgttaattgttgcttacaagtctgagagttactgtgttagttttatgagtaataacattttaaattcctcgctaatctcatcgatgcatgagccagaacacctttgtggataaaagcgttctatagagagggtaactttagtaaattttctatttaagagacagacctaactctgttgccctggctggcctccaactcctgggctcaagagattctcctgcctcagcctcccaggtagctgggactagaagtgcctaccattgctcccagcattgccagttacatttctagtccttattttcctccagattatcagaaagcatgttttggggcctgtgactacatgtatttgctggcaaatccagtcaaacaaggactgttacttagtttcaaccggaaatttttatctgattggcagacatgattaactagactcttagactgttaactaagagtctgaacacaagattgtaatgaaattattatgtgaattatagtcagtgtgatatactcatccctgtgtggtgctgctatgtgctcaacattaagggaagatggaatatcatttgaggagcacgtctagtattaaaaaaactattgggtattatgtatgtagcatactacatagcaatatgtactacatactatctggtaatttttctgttttctgtgttctaatactagtttgttttcctctactagactgtttccatgtcctcatcaccttgtatggtggttggcgtatacctagagtttatatgttattgaatgaatgagggtgagaaacacaaaagaatagacccacaagattaactgataagtatattattggagcaaaagaaaatgctgtcaggttttttttcctttacctctaagaatagtatcacaggtaaccttcgaagagtttgtgttaaataatatgcattgtgagatttatttacatctgatttttaaaatttttagcttattcaacaaagattgaagattcttttaattttgtaaggcccagtgaatcagagcaatatggcatttggtccactcccaaggtgttcacagccttaaggattaatgttaaaagttatcttgtagtctttggattcatgccagaagataaaaaggtgtataagaaggtaagggaaatttggtacagaaaattacagatagtacagattgagttcctagttgattataagtgaagctgtgatgtctaagaaaaatcaagaataattgtgattattaatatttcttgagcacttactatgccatgttactaaactaagactattttttgaatgatctatttaaatccatattgcagaaagcctaaaaggaagagatttaagtaatttgctcaaagttacttagcttttaagtggtagaaatggcatttgaattattgatccagagcctgagtgcctaactcaactacatgggtttcctagtggccagtattttccaaacttaaatcattcacaatttctgcttcgtcccaaaccatctgcctgttacttaatatttttcttcaattcaacttgctgtcttttaattaaatgaatttaaacgaattttttttttctttttttagatggagtctcactccgttgcccaggctggagtgcagtggcgctatcttggctcactgcaacctctccctcccgggttcaagtgattctcctacctcagcttcctgagtagctgggattacaggtgcctgccatcacgcctggctaatttttgtatttttagtagagatggggtttcaccatgttgtcagactggtctcgaactcctgacctcgtgatccgcccaccttggcctcccaaagtgctgggattacaggcgtgagccactgcatcctgccgtttaaaaggaaatttttatgattatttggcattagcttccccccaacatgttttaaaataaacatgattttacataattttctgtggatcacttaaaatcatccagtatactaccagtctttgtattccaccctttgggacattactgctataagaaatgaatactggataggatcaggccacaggtacagttaatgaaggtcgaaagcctagaatggaatagattgataaaataggaaatggcagcattacaggaatagagatatgaattagtcttaactacatacttgagacaaccactttcatgataaaccgcaaaggagtaggtttatttagatagagaaatgtaataggatgtctaggacagtctatggcaagggaagaacaagacaaaataagaaggaagtcactatagaaatcagggcagaagaggataatctaaaaacaggattattagagctaaatgtagcagagttcagaaaaatatgtgacaagtagtctttggatttggctgtgatatccttggtgaccttaaaataatctaggtcaagttacaaaagtggaaggttaaagggggaagagggaaaatctcttgatttttagatatattgaatactcaaagtggactctagactaattgttttaaaacctaggtttagtcctttttgtcactttgtgccagctgttaattttggggcaagttaacctggcttaagttttaaatatattgatttgtgatacaaggataatatccatttcccctatctcagaggactattgcaaagagtacatttatgtatttctatatatcttctgaatttaatattctttgatattacacaatatcaagacatgagtcttgaccatatttaaagcagaaaagagaaccacgaaaagggaaaattaaagataaaggggaagatacgttccctataaggttggaagatcccttctgaataaatcttgagtctgaaggataagagatggatacatgtatgtggttggagaatgggtatctagataagttaataattcattttttcttccctgtttgccagtgaacaatctgaaggtacagggctgctatatatggttatgcagcttgtatactgcccaaagatgctggactgaaggaagcaacaagtcagcctgtgttctgcttacagagtcctgtgccccagcttaggcctcgcagagggaactgtgcctccacttctctctccaaggcatcagctccttgccaaaagtgtctgtatttccccagaaggatgtatttttcctagttacataaaggccctatggagagcaatggatgctctgaaagactccttaaggagacatattaaggatacatttagaacaacatcaaaaacaattgggaaattggagaaatggtcactaaggaacaaaaagctttgaactttttgctgagatgggttaggtggttgggcaagtacagaattctcatttatccagtgtactttaaagatctgtattgtagcttattaaatatttttattaatcaagaaactatattaaatatcatagtttatcatatttcaaagaagagtgataagagtaaaacaatacttaacacaatttaatcttacccaaaaactttgtaattttggggtttaaattaaaatttagatttttggtcatgtggctggtagttttatatataagtaactttttaatgttaggttttataattaaagctatataaattttatagctcttaattgaagaagcacaatagggaaggtacacagttacttctgaaggttaggaaaatggaacagtggcattttattttgaaaacagaggacattgaaaacaaaggaggctttagacaggtgaattttaagtttatatttggaaatttgatttgtggtgtacagttctttaagttttagtacgtatggatttttgtagcccccacaactaggatacagaatgtagaaagataaaacatctcccaactgtagaactagagtcttctggcattttggagacagggaaattctcttgaagaaataactattaaagagggatggaaaaagccaagaatggcctacccatgctgaatgatttgttttctgattagaaagaaaaaatattttgattatactgttatatttatgacaaacttgaacatagaaagaatgaaagtaggagaaagaaaaagaaggagttgggtgttgtggcatgtgcctgtggtcttagctacttggaaggctgaggtggaaggatctcttgagcccaggagttgtggagggtagcgcactgtgttctacatatggactgagtgtctgcactaaattcagcatcaatagggtgtcctgggagtgggggactaacaggttgcctgaggaggggtgaactggtccaggttggcaacagagcaggttaaaactcccatgctgatcaatagtgggatagccattgcactccggcctggacaacattaaggtgaccctgtttcttattaaaagcaagagggtaggggaatttttttaattttatttatttatttatttatttatttatttatttatttagagacagagtctctctctgtcgcccaggctggaggcagtggtgcgatcttggctcactgcaacctctgcctcccaggttcaagcaattcttctgcctcagcagcccgagtagctgggattacaggtgtgtaccagcacacctggctaatctttgtatttttagtagagatggggtttcaccgtgttggccaggctggtcctgaactgacctcaaatgatccacctgcctcgccctcccaaagtgctgggattacaaggcgtgagccactgcgcctggccggggaatttaaataaaataaaataaaataataaaagaagagaaggaaggaaataggtttacatgtcttaagactggatatttcagtggtagaagaagagggccaatgatacggagggatgttaaccaattctctacacttaataaatttaaaattaatattctgacttttaaaggcaaccctttggtcctccaaaagattaaccataattcataatgctagatgagcatcttggagcaagtacttctctttcactctcataacattcaacatactttggccttgcaaaaaacaaagttcaattaactggatggggtggcatgtacttgtagtcctagctcctcagaagggtgaggtaggaggatcacttgagctcaagttcagggttgcaaagtgatggcactgctgcactccagcatgggtgacagagtaaaactgttgaaaaggaaaataataaataaaggttgactaagaaattatctatgctttgggcctgaagcgatggctcaccctgtaatcccagcactttgggaggccaaggtgggtggattacttgaggtcaggaatttgacaccagcctggccaacatggtgaaaccccatctctactaaaaatacaaaaattagtcagttgtggtggcaggcgcctgtaaccccagctactcaggaggctgaggctggagaattgcttgagcctgggaggcggagatcctaccactgcactctagcctgggcaacagagcaagactctgtctcaaaaaaaaagagaagaaattatctatgcttgggtttttctttttaatatattagttttgcaaatattgattaccacttaataagtttttgttacaggctttacactattctaagagctttatacacactttgttaattaaatcttataatagtattggagtagatattatagcccacccaggtgaggaagtaaaaaatttgagattaagtaatttgcctgtggtcacctagctactaaatattagagctagaatttaaacaaaaacagttttaagagaaacagttgtgtaattttaacaattttaaaatacataagttgttaaaaagaatgccctggcaatcacctcattaagtaatcggtagacagaacagctgtactttttaaggacagcagtttttagtacagaaaatttgatagctacatttctgttctgattgttaaggctttatcctactccggaaacttaattcacatgtttcagtttccaggaacagcctgagcccttccactatcctgattagaactccagcagatttatttatattacactttgttttttaaaaaatgaccattttggatgtttttgccgaactgctatttgtagtaaaagaattcaacatatggtggtattcttagctttactattatagtggcaaatgtactcttaaaatatttgaccttagaattactagttcattttaactactagaaatggaagagaccttgtaagtggccaattcaacttcttactcaaagcaagaattatctttataatatttctgacaggcttaccttgcttttgcttggatccatctgatgattagtaggttactacagtcaccccttaacattcacaaagcatatgtcctaagatcttacaaatttccgtatttagcattcaaacctcttcactttcgccttccgtgatctacactaggatttggcctcctcttcactgctcttccccaccctgcccccctccctcaagaaagaaacagatttctctttgtaagagttattgtatcccctaaaagaaaacaaagctctgggcctggggtctcagcattaggagtggtgagggatatccaagcttattttctagatgcatacctcatggcatgttagttacattttgtgctttagcaaaattacacgtcatttcacagctctttgggttatttggcaaattgttaaagtaatgctataagttttagtttaatgtaacttactcacttatggataaactgaacagtttttcctttgcattcagtcgtttgttaatgtttgtcttcatgaagcctggagttgagcataatactctaaacatactgtgacaaacataaaattcagtggaactgttatgactccaaatctgtgcattagatttctattaaaattttataaagcagtattgtcacactactagctgtcacagctagaacctttttcacatgacagtctgggtctgtattctgcatttatgaaatccagtttctgaactgttaatatgactgtataactaattgtttaattctgcctagcattctaagacctttaaaaatcttggtcatggaatacattggtactccttcagatgtatatattatttcatatgccatgtttactttccaagtctttattcaagttattgacatggaaaaggacagggtccaacatatccaggccaaattatttcatattgaccacattcttttaaatataaaatgattttctacttcaaacattgtgtgattctcatttgtattaagtttatttaaggagaagtatgtaaatgactagtactttcagtagtcttaaaaaatcaagtggattgagggaaggaagtgactaaatttttttaaggtttatattttgtggatgctgattcacttggaactaggagtgtggtgaatatttgggcttttttattttaaatgggcaatttagttaaaatttgagtgataaaattctggtttttgaagttaatgcatcagtctcccctcatcatagttcaggctgccataacaaaatagtatagactggatggcttaaaaaacagaaatttatttctgacagttttggaggctggaagtctgagatcagggtgccagcatagtagttctggtgagggctcttcctagcttgcacacagccaccttctgactgtattctctaatggagaagagagcaagctctggtatctctttttataaggacactaatcccctcatggcccgtacaacctcatctaaatctaattacctcaccaaggccccatctccaaatatcagcccaggggatttagggattcaacatatgaatgtcaggggggcacccatcagtccatcagcacccctgccccctttacgatttttagagctttgatttttgtgccttttttttttttttttttttttttgcagggtctccccctgttgccctggctggagtacagtggtgctatcttggctcactacagcctctgcctcccgggtgcaagcgattctcttgcctcagcctccctagtagctgagactacaggtgcacgccaccacacccagctaatttttgtatttttagtagagatggtattttgccatgttggccaggctggtctggaagtcctgacctcaagtgatccacctgccttggcctcccagagtgctaggattacagatgtgagccactgcgcctggcctgattcttgttttttacaagttacaaaaataatacaaagaattaccatattccttcattcagattccccacttgttaatattttaccatatttactttattattttctgtatagtatgcacataggcacacacatgcactctgtgcttggtttttaatggctgctgtctaaaccctgtcatcaccagaaactttaaatttatttcacaagctcttattccttacttgtattacaaaatgacatttctagcagcaaatcgatacatttggggcgtgtgtgtgtgtgtgtgtgtgtgtgtgtgtgtgtgtgttttgttttgacaaggtctcactctgttacccaggctagagtgcagtggtgcaatcattggctcactgtagcctcaacctcccaggctcaagcgatcctcctgcttcaatctcctggttgggaccacacgcatgtgccaccacacctggctatttttttggtagagacaaggtctctccatgttgctcaggctggtctcaaactccattgctcaagctatcctcccacctctgcctcccagagtgctgggattacaagcatgagccaccatgccccaccagtacatttgttaatagagatgttgctatgttttgttgctattgtgttttatctttgatatcttattctatattgtaatgcagtatgtttgataatgaaaacatgaatcatttagggtctcttaagtgacatttattgttttatatttcagtttgttaatttctcaaaatgaaagttcaatcctgattttttaaataatgagattatgttgggcactggctttgaagtcagcctggatttaatcttgactctaccactttccagctctgtgtgttttgagcaaattactttacttctctaagattgcttcttcattggtaattttcagtgatttaggctttaagcccttcttagtcctaatctggtttttatttttatttttatttatttattttgagacagggtcttactctgtctattgccgaggctgtaatacagtggcacagtcatggctcactgtagcctcaacctcctaggctcaagcgatccttctgtctcagtctcctgagcatctgggagacaggcatgtgccaccaggcctggctaaattttattttttgtagagatgaggtctcaccatgttacccagattggtcttgaactcctgggctcaagtggtcctcccaccttcgcctttcaaagtgctggtattacaggtgtaagccactgcgcgtggccctaatcgggtatttttacgttatactatatctttggagctcagattttggtggggcagtggggggatacaaggtctccttttgtcccccaggctggagtgcagtggcacaatcatggctcactgtagcctcaacctcctaggctccagtgagcctcccatcttggcctgccaagtagctgggactacaggcatgagccaccatacccagctaatttttttttttttttttttttttaagaaaagacaaagtcttgctgtgttgcccaggctggtcttgaactcctgagctcaagccatccttccgcctcggcttccgaaattcctggaattacaggcatgagccactatgccctgccaataattactattttattgctagagcttttagtcaaccttaactgaaatcaccagtcctttctgctctcctcctcattctcttctgacttcctctcttagtccattcatgctgctgtaacaaaatgcctgagactgggtaacttataaataacagaaattaatttctgttggtactgaaggctggaaagtccaagatcaagttatcgacaggcaggatctccgcctccaagatggcaccttgttcatgtcctcagatgacagaagtgcatagctagttccctccagccctttcataaggcacacatcacatctgtgagggcagagcccacatggcccaatcacctcctaaagaccccacctcttaaaagtgttgcattgggggttaagtttcagcatgaaatttggaagaaacataggcattcaaaccattttctttcactgtctggattagacttcagtaaaacattactccagaaattctggcagtatcttcatccaccttgcttttctttactagtttactgattactggtgcaactctaatctctgattcagtccatctgcttttgtgcttcctaccactcccaactccctggatgtcctactggacattgaagagaatcgtaactgcacaaacttggaaattctgtatacccttgctctccagcttctactgggctttcttttttttgtttttggaggggagactgggtcttgctttgttgcccagcagttgcgatcatcgctcactgcagcctggaactcctgggttcaaatggcccttccacctcagcctcctgagtagctgggacggggactataaacatactctaccatacctggccaattgttcattttgtttagagaccaagatctctcactaagttgcacaggctgatctggagctcctgggctcaagcattcctccctccttggcttcccaaagtgctgggattataggcttgagccatgacactcagccctactaagctttcagtgcttcttcccaatgtcttggctgtctttcacattctcccatttgcttttcaaaccttttccagcctcctcaaatttctaaattctgcctccactcagtggatgaggaaagcacgtctcttgttcatctgttcctagcagtgcctggtatatggtagacactgggtaaatatttgtacgagtgaataggggaactaatcattttgagtttgaagttccaacaggaaatgtaagtgatgttttgtagatcattaaaactgtgtatctaaagattgtagcttgaaggaaagttttggaattgtccttactgataatatttgaagcagtgaacagcagatgagatggccaaaggagaaagcacttattaatagaaaagggagagatgggccgggcacggtggctcacgcctgtaatctcagcactttgggattactactcaggaggccgaggcaggtggatcacttgaggtcgggagttcgagaccagcctggccaacatggtgaaaccctgtctctactaaaaatacaaaaattagccgggcatggtggcagacacctgtaatcccagctactctggaggctgaggcaggagaatcgcttgaacctgggaggcagaaatttcagtgagccaagatcgtgccactgcactccagcctgggcgacaaagtgggactcaaaaaaagacgaaacagaaaagggagcaatggcaagaagagacagaaaaaaagtaacgaggctgaaagctgtcatagtcatggaaaccaaagaaaatggtttacacagatgctatttaacttttatatttatatgtgatacttgactattatcaattagttaatacacattatttcctgatttacaaatgttctgtaaaacacttgtagagtatacttctctggaaattgttgtcgttcatttttaatgttaactatttaaatctgggggacactgtattttccaggggaactgaactctcatcatgagaataatgaggaaagaacggtaaacagagcttggatatttagaaacccattgtggccagaaagaaagttatgtcattcagttgaatttagcaaattgcaatttgccgaagtatgggggttatttttccaaatatactaaattttcagtattgcttaaaataaggttttcagtattaaaactagaatcttatagttttgagtaccaaaggaatttgagagaccatagctaatctctttaacaaatgtggaaaccacttagacttttttcttccagattttctcttctttttaattgtaatttttttcatttttagagacaatcttgctgtgtcacccaggcttgagtggactggtgcaatcatagctcactgcagccctgaacttctgctgaggctgtcctcctgcctcagcctcttaagtagcttgaactaccggtacacgccaccatgcctggctactttttagttgttttgttagagacagtctcactatgttgcccaggttgtctccagagagtttcaatctaggatagctatcctttcatgaaaaacgtccttttgttatcactgttcagtgtcattctttgattttaaaaggttaatgtatatattaaactgctgccttccaaatttcttttagaccttttggaaacaatctgctttaaaatccctggcttcctttttttcctcctaaacttcttctttcatttctttttttcctccccccaaaaacaaaactgttacaaggtaatatttgctgtacaaaatatggaaaatgcagatgcacatgtcttgttttgttttgttttttgagacagggtcttactctcttggcctagggtagagtgcagtggcgccatcatggctcactgcagcctcgacttcctgtgctccagcagtcctcccacctcagcctcctgagtagctgggactgcaggcgtgtgccaccatacccagctaatttatttatttttgtagagacagggtctcactaccggttcagtctggtcttgaactcctgggctcaagtgatcctcctgacttggcctcccaaggtgctggggttactactcatgagctactgtgtgaacagggttcactacagctttgacctcctggactcaaagcagtcctccgtgcctcagcctcctgagtagctgggactgcaggtgcccgccacaatgccctgttaatttttgtattttttgtagaaacagagttttgtcatgttgcccaggctggtctcaaactcctgagctcaagtgatctgcatgctttggcctcccaaagtgctggcattacagatgtgagccaccactcccagctgaggtgtacctgttttgatacatctaattacaatgaaaaatgctagtttcttaccagcattgctcagtcagtcatagaaccttgaacttaaaataatgattttctcttccttaaacagagaaagaaaggtgtgttattcagaaggttttgtttttacaggctgatcctctgcccttaatgattgagatttttagatacatggctagtaggacagtaatataaaaagtactaacattgtaaaagtaataaaaaagcttttcaaaattaaaattgatataggtagagggtatacttattttgatatcctctataactgtgtggatgggttttgaaatcagagctggcaagctgaaggcaaatgctactgagcatgctgtttcaagggttttgggattactaattatgtaaattgtaccattttgttacttaaatgtggttatgctgagtgcatctgtgcctactcagcaattgagatttttttactagctttttcctccagtggcttttcttgccattaaaaccttttttgtttttttattgcaaatgagagatgggggtcttgctggtattgcccaggctgggcttggactcaaataatcatcccacccctgccttctcagtagctgggactccaggtatacaccaccacacccagctttttttgtggcatttagaataaactcaaggataacacttctaatccaaggctctgcaaaatgtgacttttgcctactctgatttcatctcctgcctgtctccctgagacatgacttttacacttgaacgttcttagattgaaattggtttgcttttcagtggttctcaactgtgggtacagtttagagacacttggggaacttttcaaaaaatactattgccaggcctggcccaagaaattctgatttaattgcctggcatggggccttgacatacaatttttttttaaaactttggataactgtgcagcctaagttgaaaaccactgattggttttccttaactcctgtccccttttcagagaggtcttctggacctttgctatcctatccaaagtcccctttacctctttgctgcccctttttacccagttgagtttttcattcctacatttttatttacttgtttattgttttgttaaaagttccatgaaggcaggggcatcatctgtattttcataacatatcctaatatctgaaacaccaaaaaaggcttgtttctgtgtaacctgtagagaattgttttgctaaattatattttagagaacataccaactactctagtaggccttaaaaggacgttgattgttgttattgagatggagttttgctccgtacacaggctggagtgcaaaggctcgatcttggctcactgcaacctccacttcctgggttcaagcgattcttctgcctcagcctcctgactacctgggattacaggcatgcaccacacacccggctagtttttatacttttagtagagatgaggtttcaccatgttggcagaactggtctcaaactcctgacctcaaatgattcgcctgccttggcctcccaaagtgctgggattacagcatgagccaccgcgccaagccgactttggttttgttatctaaggttttaatgtccaatggcaaaggcatataagagagaagtaaatactttatcccttggaaacagtgttacaggtgtgggttaggttcccatgcaggtgcacaaaaactagaggcattaccataaacacctttggtggtagaaggaggcttattgataatgatagagtgctcagtgaatgttcatataaatgtgtttgtaggccgggtgtggtggctcacacctgtaatctcagcactttaggaggatgaggcaggtggatcatctgaggtcaggagttcgagactagcctagccaacatgacaaaaccccatctttactaaaagtacaaaaattagctgggcgtggtggcacgtgcctgtagtcccagctacttgggaggctgaggcaggagaatcacttgaacccgggaggcggaggttgctgtgagccaggatcgcgccactgcactccagcttgagcaacagagtgagactccatctcaaaaaaaaaaaaagaaactgccaaattgtttttcaaagtgatggtgctattttcatttccggttctttaatattcttgccaaaacctgatataatcattctataattttagcaattgtattggatgtgtggaggtattttatttcggtttaaatttgcatttcccaaatacaaatgatgctgagtgtattagtttgttctcacatggctaaagacatacccaagactgggcaatttataaagtaaagaggtttaattgactcacagttccacatggctggggaggcctcacaatcatggcagaaggcaaagaggagcaaagctgcgtcttacatggcagcagacaaagagagagaacttgtacagggaaacttccctttataaaaccatcagatctctttagaattattcactatcacaagaacagcacaggaaaaacccgtccccatgattcagttaccttccaccgagtccctcccatgacatgtgggaattgagggaggtacaattcaagatgaaatttggttggggacagagccaaaccatatcactgagtatcttcatatgcttacttaccatttgtatatgtctggtgaagtgtctcttcaaatctcctgccgatttttaaaaactgggttggttgttatgagagttttgtatgtattcttgataaaagttctttctcagatctatgatttgacaattttttttccagactctagtttgtcctttagttctcaacattatctttcaaaaagcaaaagtccagtttataaatttcattttttatagattgtgcttttggtgttatatctaagaagtccttatctaaacccagtgtcacaaagattttctatgttttctctggaagttttacagtttcaggttttacattttgtctatggttcatttttgagttgagtttcatatatggtgtaaggtatgaatcagtgttaagtttttaatattatgtacacataattgctccagtatcatttttgggaagactgtcctttatccactgaatttctttgcatttgtcaaaaatcaaatgcttatgtgtatttatatttctagactctattctgctccactgaactatttgtcttatttttacaccagtaccacactgtcttcattgctgtgccttaagtcttgaaagcaagtagtattcaccttccaatttcattcttttcaaagctggcggggtggagggtagggggtgggtggtgctgttctagagccagtccatttctttataaattttagaatcagcttgacaacttttgtcctccaataaatttcttctgaggttttgttggggattgctttgaatctgtagataaacttgaaaataattgacatcttaatattgggtcttgtgatccatgaacatggcataagttcttatgccatgtttgtgtagctttttaaataacgttttgtagtgttcaatgtgtaggtcttacgtatcttttgtcagatgtatccctaagtatttcaattttttttttttttttttgaggcagagtttcactcttgttgcccaggctggagtgcaatggcacgatctctgctcatggcaaactccgcctcctgggttcaagtgattctcctgcctcagcctcccgagtagctgggattacaggcatgtgccaccacacccggctaatttttgtatttttagtagagacagagtttctccatgttggtcaggctagtttcgaactcccaaccttaggtgatccacctgcctcggcctcccaaagtgctgggattacaggcatgagccaccgtgtccggctgtatttcattttttattgctattacaaatggcactatatgtaatttctgtttctgattgtttagtgctgtatagaaatacaattgaattttgtgtattgatcttatatgctcttgtaaactcccatctagtaggttttttaagatatcagattttctacatatgtgatcatataatgctaactattacagacaattttactttatcccttccaatttgaatttttttttgttgtttctttcttattttgctgggtggaacttttagtatagtgttgaacagaaagaagtgttaagagagagtggatatccttacctcatttctcttcattgaagggaacagaagggcaagcatacaaacttttgactgttcccttctattcctatttattgaggtttttgttttgtttctgtttttcaaatcaggaatgggttgatttttgtcagatagtttttctgcatccacatcatgcactgcataacgatgtttcagtcaacagtgggccgcatatatgacagtggcctcataagattataataccatatttttactgtacgctttctatgtttagacatgtttcgatatacaaatatttcagcttttgttaccgttgtgtacagtattcagtacagtaacatgctgtgcaggtttgaagcctaggagcaatagactataccatatagccttggtgttcagtaggctatgccatctacatttgtaagtacacactatgatgacacagtggtgaaaagtagagccagggtttcaccattttggctagactggtctcgaactcctgactttaagtgatctgtccaccttagcctcccaaagtgctgggaatacaggcatgagccaccgtgcccagccaattttgcctttatttttggaagatgttttgctgcatgtagaattctgtttttattttttctttcagtactttaagcatgtagctctactgcttgcagcatttcccatgaggattctgctgttattctgtttctctgtatgtaaagcaacattttctcttgttacttttaagattttctctttatcattggttttaaatactttgattatgatgggctttggtgtgggttcttcacgtttcttagacttgggctttgttgagtcttttggatctgggtttgcagttttcatcaaatttgtaccattttggccattgttttttcactttctcaagcccctctatgtgtaacaccaattacacatagattaggctgtttgaagttgtcttaaggttcacttaaggtctttttttttttttttaagctttttccactttatctttcccattggatagcttctattgatggcttcagattcactattttttttctttgtgtgtgtgtgtgtgtgtgtgtgtgtgtgtgttttaattggaaaggggagttttctttttcataaagggttgcagcctgcagtattgtttcctttggcagtgtgtctaaaatgctagtaataccaattggtgtatttttttctctatgttttgatgttttcatgtcttttgtgtctctatttgtattcaatctttagcttgttgaacatatagaatacagttataaagtagctttttcttagacaaggtgacataagaaaaataacttctaacatttttgtccactaattctaacatcaatagtcaagactaggttggtttcacttgcttgattcccctccccaccccccttgattctgggattcagttaagttactgggaaactgtttgatcttttcaagtgtagctttaaggtctgttagacaagccagatgtggtgacacatgcctgtaatcccacctactgggaagaaccgaggtgggaggatcacttgagaccagcttgggcaacatagtgagactccatctcatttatttaacataaaaagaagaaaagatttgttagacaagatcagagcagtatttacattagggtaattttcacccactgctggaggcaaggctttgctcagtactctacctgggttgggtgcagtggctcacgtctgtaatcgcagcactttgggaggccgaggacggtggatcacctgagatcaggagttcaagaccaccctgaccaacatggtgaaaccccttctttactaaaaatacaaaaattagccgggcatggtggcagacgcccgtagtcccaactacttgggaggcagaagcaggaggatcacttgaacccaagaggcagaggtttcagtgagctgagattgcattactgtacttaagtagcctgggcaacagagttagactctgtctcaaaaaaaaaatctctacctaatgcctggtgaagcatgtcatgtcatctttttagtcttggttgtgaaacaggtactattcccagccctttatgaacttcaggcactgttcccctctgatcctctcaggtctttctttgctggcttgttaacaatattaattcttccaatctgtgaatgtgggctatctttctatttatttcgatttcttgtatcaatattttatagttttcagtgtatgggtattttgctcccttggttagattactcctaagaactttattctttttgatgctctagtaaatgggattgttttcttgatttccttttcatctaggttgttatttgtgaaaagaaatgcaactgattttttgtatgttgattttgtatcctgttgctttactgagttcatttattagtttcaacagtttttgtgaaattttagagttttctacttaaaagatcatgtcatctgcaaacagggatagttttacttcccttctgatttgtgataccttttattcctttttttggtctgattgttgttgctagtccttccagcactgtgttgaatagaaatggtaaaagtggacattctagctgtgtactagatttcaggaaaaagccttcaggtttttcccattgattttgatgttagctgtgggatttttgtaaatgacctttattatgttgaggaattttcctctgtacctgttttgttgagagtttttatcatgaaaggatgttaaactttgtcacgtggttttctgcatttattgagatgatcatttggtttttacttttcattctgttaaactgtggtatatcacattgatttgcatatattaaaccaatcttgcattctagggataaatcaaacttggtttaatgtgttattgagaaggattggtattgtcttgattttaagtagggaagttaaggttcattttatgattcttttaagcttgagtgttctgcgatggctagagttaaatcggatgttctataaccctgtggttaaattgtgtattactactttgtgttccttcataagaatatggagaagctgaacttgacattttattttgatttttgtttagttgtaacgttggacattttaatacgcttgcttactaacatttctctagtgaattgtctgttcaaagctttactctttgggctgctttgatttgttgagttcttataacatatttacattttgtcaagtgttgattattttcttcactgaccatcaatttaattttttttttctttttctttttccttttttttgagacagagtcttgctctgtcgcccaggctggagtgcagtggcatgatctctgctcaccgcaagctccgccttccaggttgaagccattctcctgcctcagcctcccgagtagctgggactacaggcacctgccaccatgcctggctaattttttgtatttttagtagagacgggtttcaccgtgttagccaggatggtctcgatctcctgacctcacgatccacctgcctcagccccccaaagtgctgggattacaggccaaagccaccgtgcccggcccaatttgattttttaaccattatttttctcttatgctggacagaatgtttagtaggcttgcttcttaaagttttgccatgaaatagatgcctctgttctagttaaaagtgaaacttcattcaaaacaaagaaatgtaaacaggcagtgtggggatatattcctcaggagtactgagctgaaggtaatcagttagtagttgaagccaaaggagctaatgagatttcctagacaagagtttagataagaagggaagtggggataggatgaagagcactagaggaaagattgaccttaaatggaatgagaagaaagataaactttctgtattgcagtgattctcaaactactttcagttagaatcacctgaagaatttttttttttaaaaaagagttgatgcccagtttcccccctgcccccagatttgtatacagcaagagttgagaatcactgcttagaatatatctgcttataataagtcggtaggtcttaacatttttgtaagtcttagtcaatctggaagacttgctatagagtgctgggccccttcctcagagtttgattcagtaggtctgggttgggacctgagaattttcatttttatcctatttctagagaaacatggtttctctagaatcacatgtctcagaaacattgtttctttttttttttttttttttttttttgagacggagtcttggtctgtcacccaggctgtagtacagtggcatgatctcggctcactgcaacctccaccttccgggttcaagtgattctcctgcctcagcctcccgagtagctgggattacaggtgcctgccaccatgcctggctaatttttgtatttttagtagagacggggtttcaccatgttggccaggctggtcttgaactcctgacctcaggtgatcgcctgcctcagtctcccaaagtgctgggattacaggtgtgagccatcgtgcccggccagaaacatggttctgcgaaccgcagtagcagtaggtgtaggaaggaaagtttggatgttagatacaggttggtttggagatttgctcctaggaagtttaaggagttcttttctcatgatgttgctttctctctaatatacagaaagggtcttcaccaagagtgctgcttgagtaataatggtgttcagaaaagtccaagatttcaggattcttagttaaataacttaagcaagttgactgtttttcttgatacatcagttcctttttttttcacctgatgaaaaagctctttgaattttaattttgtcaggtagtgaatatttactgtcctcttttgtcactgtagatgaatattctttctatatctttgtacatgttactggtaaatttgccaataggatagattttggtagtacattctcttttcacaacatcatcatcattagcggtcttggggtaaaattaattgtatacattcttctacatatagtagcaaattgtattagtgtagtcctattggttgtaggtcagtcttttttcaggttgtcggttgtctcaaggaaagatggtttattgtaaacgtatacgtgaaaagcgaaatggttatctacactgttatgtgggaggaggcagcatagtgtaatggattgaacccgacaccctagtttcaaattcaatctgatttagtctttatgtgtaaaaatcaagacagtaactacattgtaaagttgtttgactgaaatgagataatagaggtgagaatgcctgataaattttatggaactatacaaacgttgggtggcattttacatgcatataaaatgacatctctgctgattctgtaattgacaaatataaaactaacggatgaaacgaaatttataaaagtaaagtggatataggctttactttgatgctttttgcttggtatacctattctatactatctttggctcctgtgtttcagttctcaatgttttcagctattgatcgtttctatggtagaattagccatcttctaccctactgctacaataacccctcaaaaacaaaaacaaaaacaaaaacaaccgttaggttgatatgtatctacaacttaattaaattgaagggaaatagcatgagacataatttttcttttttgcctatctattaatagactaagttagggtgcatcaccaagatgagggtacattagctctaaagatgaggattctctttgtatttgaatgcttatgaaaatgttatttatttctaacaacttctcatatgtaagggaactttatatatgctttgaaaaaaatggatactattttttgaatatttagtcctcagtgatgaaataggttatttttatataccttgtgtttgtgagatgttttaccttttacgaaatgaagagaacatagaacgttgtttctgttctaaactgttaaagttaatagagctttgttgggcacatactgcctgatgatgatacagggatgtaatatgtaggggaatgaagatgttgtcctgtcatttggattccatgtgcataggttgatgtgtcagtcatttcaagcatattaaattggataatatatctttttaaaatagacagtctcagtgggttcactgtgttttaactattcacgacagcatggaattataacccttattctctatgatagagttaagcagttataaccatatataactgatatgtttcacaagtgcatgatagcttattgtgatcaattttgttgtgtattggttattggaatttgacagttaaaaagttctatgaaattatcattgatatgggaagttttttcagaatttctgtgaacatttgaatttactgagtttttcatccttatttttctttcttatgtacatcttaaggactggggttttaaggggtgtggcaggaggttttggactcgatgagtttccaccgaaatgtcggagaagtcaggccagagcacaaaagcaaaggatgggaaaaagtatgcaacactcagtttatttaatacttacaaggggaaatcattagaaacacagaaaaccacaggtgagtaaaatcaagtgacacttatgtttttcatggtttgttttgttactataagtgatacacctgctgctatgagaagctaggatgtacccaagttaatacaatgctatttacatttgcgtttttatgcatgcacacatttttcagaggatatgtgataaacatcttataattgaaaatttatactttcatagagccctttaaaaatatttttgtttttctctgttgtcagcagaaaaaaggtagaactgtgtggctctaaaggggaaactcagtcaatgagattgataggcacagacctatatattagtgggaatttagtatctttttaattatagactagagaaagtcttatgtttcgtgtgtgggggtgtgtgtgtgtgtgtgttagatactgtgacctagtgaatatagtgaaaactgaaaatcatgcatggcatattaacagtattctttatgaacatacagtcaatacatttattctctaacattctaagttttgagtttgaaatagattctctgaaaaaatatcagtattatcaatgttttctgtagtgtgttgaattgcattgttaaattttttaaggaatctgttaaatgctgttaaatggcttgatttctacactgaaatgtgttgcaggtgtgtagcttagttttaaaattattattttaaaatacatgaatgaaaatcattcagggattgcattaattcctattgtttttctatattgtttgaggaataaaatgggtaataaaatagatgttctaagaaagttgatgttattgatctttagttgcagctcgacatggattacagagtcttggaaaagtcggtatttcacggcgtatgcctccacctgctaacctcccaagtcttaaagcagaaaacaaaggcaatgatcctaatgtaaacattgtacctaaagatggcacagggtgggcatcaaaacaagagcaacatgaagaagaaaagtgagtcaaagtctgttaaagaatgaagcccttcccctttctttgtagggaacttatgtttgagtacctgctatttgctaagtgttatgctgtctgtattacatattacatattttatactctttaaagtcttttgactatagtaacttttggttaattttccctattaaaagtatttcaatttgtcagggtagaacagatgacagaattgggaatcacaaccttgcttatgtcatagcctttattaggctccccgctttcatactaccaccaactcaggtattccctttccaatatgattaagagttgactccgatacctaaattccatgatactaaggatgtctgtctgccaatttactgtgtatctccagcattgaaactgcctgatgtttcataggtgctcaagtaataatttgtatatactgtagcaagaaagttaggatagaattaatagtgtccatcttagtcatccttctttcaacaactatttagacttctgtatgtcaaggattttgccagactcttagctaattgaatgaccaagcctaaatagtggtaatttaaaaaaaataagacaagccattggatacttgatgttttcttgcctatctcttatcaaaattctatactcctgcctggggagatttatatagtaaatttgactacttctgtagtaatgtatcaaatacgtaaatgcttgttagctgtagtaaaattattttatagtaatgagtcagttataggtatgagtgtcccagaaacacattgcattttgtgagcctcttaactactttcttatttttaagcattacctcattacaagaattgaataaaactgtacaccctttcaaaacaccttttactcatgtgaatgcattaggcaggttgctgttacctctttgaataacagtagtaagtacagtggtgatcctgttgactgccaagtggggagtttgcttagctttagccctcaactaatttcaccagtccagactgtatgtatgtttatactgctatttttaattataagtgttcacttcttcaaaacagatatttggtaactgtgtttaattaaaagtgtgtgtgtatgtgtgtgtgtgtgtgtgtgtgtgtgtgttttaaacaaaatggaaaacaagcaaaactcatctcattgggttattcaaaggtagagatgaaagacgataaaaatagccataattcatttaaaggaatgttgcagagagaaaacatttattggagatttaccaatgaataaacatatagccaaaataatttgtacacaggtttaccttaaatataatattgattttatttaaacatacagtatctgaaataatggattcatatttttttttaagaacaccagaagtgccaccagcacagccaaaacctggggttgcagctcccccagaagtagcacctgctcccaaatcatgggccagtaacaagcaaggtgggcaaggagatggtaagtggacattagttggggaagctgcctaggcttgatagttactgaacagccatgcaggagataaggggtgaactgtgttttggtagagccataaagcattgttaaaggatatactcaaggctcttaaaaaggttttttaaaaaatctcttgggctagctaagttccaatgtcaagagccatgtatgagtcaatgatattggttaaggaaaggagtctttaagataccctgtgccccacatcattttatctttacctctgcatatccaagcaaagcttgtaccttcaaagtatccagccatcgcatagattgttagaaaccatactcatttttcatctatgtccccaacatctcctgtttcagacatgctgccacgattcctgagaggagaagagctagaaagtagccataaagcaccactgctgtaatattcccctttcccccaaggaatgatggaatccccagcagaatttagttttcccactttcgaaacaggaactgtctataaaacattctatggaagaaccaatctgggccctcaagctaacaaaactagctgttttaatttatagaagtacaaaaaataggtagataggaagttgggtgaatagtgaggtgtaataatcttagctgtaaattaaatcaaagtaaagtaaatgaagcaataaattaaataaaggcattttagcctcatcttgatcttggggtctttattcatcaaacactatttcagtaatatgatttgaacgaattctgagaattcttagcaaaggaatttgatgtgtattgaaaatgtaaggagtcataatgaaagagaaacaagctcttcacttgcatggtcatcttaaatgagtcctctggaatggtactggtagattactgtcttagactttcatctcctcatggctgatcattagcttttcaaaggagtctaggtgaattttaaagtgatatggctatgaacagtcatcactgaaatgtggaataatttaagagaaagaggcagagagctctatcctgggagggtggtttgtattatcttcagtataaaagttacctttaatgtttttttaaaaaaatctataggaatccaagtgaatagtcagtttcagcaagaatttcccagcctgcaggcagctggggatcaggaaaaaaaagaaaaggaaacaaatgatgacaactatggacctggacccagtttacgtccaccaagtaagagtactttctctttaatacaaaatgagatcatatttgtgtattatcttgcaatacaacctcctgcttgctgttgcatatattatttgcctacttcgaaaaggcagactttgtactatagtcacttgctactcaggtatgatttttgcaccgacagtatcactgtaacttgagaacatgttagaaatgtgtcatcttgggcctcgcatccaacttactaaatcaaaatctacattttaacaagatgtccaggtgactttcatgtataccaatatttggatttttttatactagtttttgagcaggcttccctaatgtgtaactatttacttactactgtattaatattcggtgattcctcactttctgagctcaaactgaggaaacaaataattttggataatgagggatagtttatgtacattacaaagcaaaaactaaaaataaaagtgtaaaatgttcgagggatttttaaatgtcttcttaattgtgatagcttcatactgtcattaccaagtatcttaaaggaccttgtttacatggggaggttcgtctatgacagaagtgtttacaaattccatatttctaaaaacctgatgtatttcacattttttagctcttgtcagatgtaaataaatctaaatcttatttttcaagcgtcataatgtggttggtgcatttgtattagaaatagatgtgctgactcctctattttgttcagttgaattttcaccagttgtctattgctgcataacaaatttagcaatgtaaaacaacaaactgaactatacttatgatatcccactgtatctgaaggtcaggaatccagggtcagcttagtttgaggttctggccaagggactctctctcaaagctgcgatgaagctgtctgaagctgacttgactggggctgtacttccaaactgactggtgtagctcttggctctttagtttcatggtctcttagtggggctgcttatgacatggcttctgcagaataaatgatgagagacagacaccctccacccaagacagaagcccacagtctttaataacttaatctggagagggacatgctatcacttctgccatattctacaggttacacagaccaaccctgctatattgtgagaagggactacacttagtgtaaataccagaagataaagatcatttgggctatccaggagactggttaccatgcagtgtttcttagcaaaaccacctagctgttttatttggttaagtgtaattacaccagataatttcacgcaatctgttcacttgggggcatctgtaactaacaataatatactggaaacagacaaatgagaatatcactgtcaacccttccagattgtagaagtcccatcttccttccctcaggaaacctcaggtgtgtcactctgaaacatggccatctgatatatggagaacagtgattttaatttctataccaaatattgataaagcttcatagagaagttctaatattttcttctcccaccccagtatttgcttgtggtgacaccctctgaggtacatcctctccactttggaagccactactacgcaaacaacttgaaagcattagtaggacctggattagacttttcctgctctttcactctgcttacttgctttcattttcctgaaatacattttggtttcactttgttccattttcagatttttatctttttccttttttctctgccttcatactagatgttgcttgttggagagatggtggtaaggctgctggctcaccttcgtcatctgatcaagatgaaaagctccctggccaggatgaaagcacagctggaacatcagagcaaaatgatatcctcaaagtggtggaaaagaggatagcttgtggtcctccacaggctaaactgaatggacagcaggctgctctcgcttcccagtatagagctatgatgcctccttatgtgagtattgttaaatgaacaagcattcaaacaagtggtttttgatctggggtccaaggagcgaattgttatagggaaaagtttaggtctttgttttcattaacatctaactaaaaattagcattctcttttattgtatggtatattgtgagaagggactacacatggtgtaaacaccagaagatagagatcatttgggctatccgggaaacgttaccacgcagtgtttcttagcagaaacacctagctgttttatttggttaagtgtagttgtaccagataggaaacaaatcagcagtatctttattattaacagggattgcagatattttcatatcacattacattcaacattacttcaaaataattattagacccatagatgatgatctaataaagaagcacgtacgttaccataccacagatttattttgtaaatacagagaacaattacactaacattctgtttaatataattgttcttctttgcaatatttttgtattttacattatgcatttaaaatgttttcctgagaggaggtccataggtccataggattcatcagactgccaaaggggtggttcatggaaaaaatgataaagaacacttgccgtagtttcaaagtttttatttgtgtacttttaatatttttttcaattttttttcaattttttttcaattttttttttttttttttttggagacagagtcttgctctttcgcccaggctggagtgcagtggcatgatctcagctcactgcaccctctgccccctgggttcaagcaattcttgtgcctccgcctcccgagtagctgaaattacaggcatatgccaccacacctggcttttttttttttttttttttttggtagagatggggttttgccatgttggcaaggctggttttgaactcctggcatcaagtagtctgcccaccttggcccctcagagtgttgggattacagacatgagccacctcacttggcctttaaactttttttaatggaaaattttaaacatgtacaaaaataaagataacagtgcaatgaatctgcctcttttcctaccactttttttttttttttgaaacagagtctcgctctgtcacccaggctggagtgcagtggcatgatgtcggctcactgcaacctctgcctcctaggttcaagcagttaacctagccttagcctcctgagtagctgggattatagctgcccgccaccatacctggctaatttttatatttttagtagagacaggattttgccatgttggcaaggttggtcttgaactcctaacgtcaagtgatccacccgcctcagcctcccaaagtgctgggattataggcatgagtcaccatgcccgctcttttcctaccactttggattactaaagcaaatccaagatatttcatcagtaaatattttaagttctattttaaaggataaagacttggggagaaggtttgcaatgctgttatacataaaaagaaaactaattccttgatattctcaaatattatgttagtattccagtagttgtctcataattaggatccaggcaacatccattcgttgagattggttcatatttcttttaagaatcttgttacctatagatatttctatctcctgtttcctttggagcttatctgttataatttgttaacctgtgaagttcctcagattttggattttgttgatactatctttaatttcatttattatatactctggcacccacccctgccctcccaccacattttctaaattattagttagatttggtgtcctcattctttgtttactttcagcccaatgtgaagttgtaaaacaagtcacatgtgcctggatacatccatttagttttccagaagactcattactctcataggaaacaaaaatctaggtcatatttatttagtttgttgtttaactcctaatatttgaatcctaaatatccatcatactttccattccttcatattgttgattttatttaaaaatatggaatgcttcatgaatttgtatgttatttttatgcgggggctgtgctaatcttctctgtattgttccaattttgctgccaaagtgagcatatacattactattttttaatcattctagactaacagagggagatgaatgattaaatacaattacttgttaaatgttttttgctctgatgcctaggctggagtgcagtggcaccatctcggctcactgcagcctccacctcccaggttcaagcgattctcccgcctcaaccttccaagtagctgggattacaggggcacgccatcacgcccagctaattcttgtatttttagtagagacagggtttcaccatgttggctgggctagtctcgatctcctgacttgaggtgatccttcctcctcggcctcccaaagtgctgggattacaggcgtgagccaccgtgcctggccattaaacgttttcctaaaagaagtttgggagtatgctgacctggccttgaaaaatgatttatacccaattactttttttctaatcattttcaaattgtgctaccaaagacccctgaactttcatgtgagagggtaggataggaaagaggggaaaccacgtgggcatcattcccactttcatcagtgattatatttgaataaagtgttccactaattaacaaaaacatttaaatatcactactgtatactgagaatttaaaatttgtttctaaaatgaattttctggcaaattcctagattttaagcattttttaagaccacatgaaattatgtctggaatgaccagatgaaggatttaatgcaactttagctatgaacatatgcctccagtagtgtctttattaacttcagtatagaagtgtgatgcaactgaaaattctccagagtatccctcaaagtttccccagctgagtttcagctgttgcttgacttaattaacattgcttcaacctgacttaagagaaatttcttctccttttttttttttttttttttttaataaagacggagtttcgctctgttgccaggctggagtgcagtggtgcgatctcagctcactgcaacctccacctcctgggttcaagtgattgttgtgtctcagcatcctgagttactgggattacaggcacgcccaccacacctagctaatttttttgtatgtttagtagagacagggtttcaccatgttagccaggatggtctccatctcctgacctcgtgatctacccgcttcggcctcccaaagtgctgggattgcaggcatgagccactgcacctggctgagaaatttcttctttagacagcataatcatataaacatagccttacttcaaatgtaagaattttcttatctaacacacagttactacttactttttagaaaaactagtcttctatttcaggatataaattatgtttttacagtaatataatttcctattatttacataatttgacttggatataagcatatagtcaatgaccaagacattctttgacccttcttcccttcaaaatcataggatgaatcccttggtgttatttgttcccagaatctatcttatgtcttctcttaagtttagtttcccagagccaagttcctacagagaacagtatctggacctgtttgggacagtttataatgatcatctgtgcagtaacttgattgagaattcacctatgccatatacatagaaaatttctgggtagctctctgtcccccttttccaactcacttccttggattgtggactgtcttttaattttatctgagctgagttcttcttccccacgcctgccacccctacatttttctttttgaggtgctggggctggggactgatgttatcctccttatccacaaatctgcctctgattattctactcctgcttatggaggaaggccaacagcatttgcttttcaaatattttcactttgccgtttgctagggtgcatgtgtgtacatatcctgttgatacaattactttaatgtaatttatatcttgttgacacagttactttaatgtaattttacattacatatctcattgatacagttactttaatgtgtacatatcttgttgatagttactttaatgtaattttattaatataatacagaagtttttcatatgtgctctagttattctatttataaagagttgctagtggcaatggccttggaaatgggttgctattgaggatgaacagataacagtcattaatagttttattcacttaaatcattgttttataaattgtaacttcaggcctaggctcagatttatatatatatataattttttaaaataactaggttgctaaatttatcacaattttttgtttccttcattcagatgttccaacagtatccgaggatgacatatcctcctctacatggtcccatgagattcccaccttctttatctgaaacaaacaagtaaggctattaaatgattaaagtctgtaaggaatatatgcttgttaagatttcctgaaggttgagtggattgtgtgattctgagttgtgtaattgatcgttttcctatcctcacagtacagttgtcattagtaaataattggctaactcttataagacagaacagaaataattcattcttttaagcatttaaattaatttacataggattttgaaaactgaaaaccaggccggggacggtggctcacccctgtaatcccagcactttggaaggccgaggtgggcgattcgcctgaggtcaggagttcaaggccagcctggccagcatggtgaaaccctgtttctattaaaaaagtacaaaacaattagtcggacgtggtggcgtgcacctgtaatcccagctactcgggaggctgaggcaggagaattgcttgaacccaggaggcggaagttgcaatgagccgagattgtgccattacactccagcctgagcgacagagcaagactccgtctcaaaacaaaaagaaaactgaaaaacatggccctaaaattgatgacacttgtttttctcttcttcctttcatattatggactccccattttctttctttttttttttttgcttattatatgagacttgaacatcctcttgaattattttcctcaaaatatatattttgaagttagttttattcatatcgttatccttttaacatatttgttttatcttaaatatttgagaattcttaaaaactttgtcagctgttacttaagagttacgtattatcctatcattatgtattaatattaattttttcatacacatgtccatgcagaacatattaggtatcttggtgtagaaaacactaatgttgaaatgaactaaattccaatcttttagtattctcccagtttagtatcataaacttttgtatcttttccatgacctgcctttcattagaggccttcgaggaagaggcccacctccttcatgggcctctgagcctgaacgcccatccattcttagtgcatcagaactgaaggagcttgataaatttgataacctagatgctgaagctgatgaaggttgggcaggtaagaggcaaaattaattaagtcctttaaattgttagatgctttcaagcagccagtctgagttttccttaatttaataggtgctcagatggaagtagattatacagagcaactgaatttcagtgatgatgatgaacaaggaagtaacagtcctaaagagaataacaggtaagttgtgatatcttttactaataacagtatgaatttgttgatacaatattagctacttatgcaaagaagctttgttaatagacaattgtttgttatttgtagaatttatatattctcagaagttttactgaatagagggtgcttaatgagctagattaatacagtatacagctaatcaaggaattaaaatttgatgcgtctcaagaaagtttatttaaaaacatttagggctgggtgcggtggctcacatctgtaatcccagcactttgggaggccgaggcaggcagatcacttgaggtcaggagttcgagaccagcttggccaacatggtgaaaccccatctctactaaaaatacaaaaattatccaggcgtggtggtgcatgcctgtaatcccagctactcaggaggctaaggcaggagaatcacttgaatccgggaggcggaggttgcagtgagccaagatcatgccactgcactccagtctgggtgacagagcaagactgtatctcaaaaaaaaaaaagatatttagatgcttggcacctagtttggagatcttttgagaactggtattaggaacaattttttaaactgttacttgcttgacctgatctgtatttacaaaattggagaataattccctgggttactacagctttttcaggtcctcgatttcttaaaacttagtaaactgcattagggccttggaaaatggggagctttttatttctttttccttcattctggaatattggagcaccagtcaggaatatatgggttatatatcataaaagttgggcttttaaaatatatggaagtttggaagcacatttggtataatttttcagttatggcattgtgacaaacatcgttttatgatcgtttaagagatacctgtggtttgtcgtggctttgaaaaaatactgtagtttgatttatctttttattaaatcagaataaattagaatgcagttaaataataattccaatattacccagttacatttggattgtatttcttatgtagaggagataggaaatgatgtgattatattcttttgccaggatatatgcctgacatgtgtgtttagatttgacaactactgtattgcactttcatagtatatatttattgaaagaacaaattagcactaatgggtcacacacccatctcattccttaatacatttccccccccagaaaccatacagaaataatttttttaattgcaaaaataatgtgtgtacttatgatacagttggtccactttatttcttctgcattttgatttttcagtgaggatcaaggttcaaaagcctctgaaaacaacgaaaacaaaaaagaaacagatgaagtttccaacactaaatcatcttcccaaatacctgcccaaccatcagtagcaaaagttccctatgggaaaggaccttcatttaatcaggtttgttggactcatggagatccttgttattgcaaggatctccttattgtaattactgtgtaatactatggataattattcttaccacagagtggaacgggacttagaaaaaggaaactgtgtatttttttcttgaatagtcttgaatctatcataatttttattgcatttaaccggaattatcaatacagtagctaaagttatcaagtgaaaactaaagcttcacattttttttaccttatgatatagctcaatcatagcaaagtgtagggataatatttttctaaaataaaataaacattgctgaagtgctttatggtttattgaatacttaaatactagtcagtctttttgtgtgaatggtacactatctgtagggaaatcacatagtgagtagggagatctaaagtctgaatcattttgaagaacattgtgaatgaagggaaatgtgtgtgcaacagatatttgatcccacttctgagatggtaaatggttgcaaaagctgcattataaactgggaataaaaaggactactttcaagggagtccacttatctctttattaaggaatcagtatagttagcatgtatttgttggattcatacaaaatagatggaggaacttgtcccttctgagggctaaaaggaggtagctaacagtttccttgacaggaaaaaaagtcagtaagcagttacagtgtgctaagtggcgtaatcatagagggtacaaaataaattctttgagcattcatttaaggtagaaggctgcagaagactaagtacttgagctaattcttaaacaagcatgatttaggcagtatagaaagggaatatagctgttacaagcagtggaaacacatgtagagaagtatgagaaaacatggcacattcaagaaattctaagtagtttgatataggagagaggtaagagagctatgtaagaaccacttctttaaaatgtatgctatatgagggttttaatcttaaggcattgatgatccattgaataaatttatgaaccctgaaaaagaagaattttttaaataacattttaataacttttttgtgtgactttttacttattggcataatggggaatgagaatttttcatgaaagaatagaggaatagatggaatatgtcttgatgtctttgacttttttgtgacagtcatgtgacagtttatattagcaagtgaatgtttcatgtattttgttccattatgttttagattttctttttttaagataaatctcatatttttagtttgccactagaaaagaattgagcttacataaataaaatttagtaattagaggtatagatctcctcagtcagatttgctggatcagaattccagaacagctagactaaaattctttttttccctcttgagacagagccttgctctttcacccaggctggaatggagttgcgcgatcttggctcactgcaacctccacctcctgggctcaagagattcttgtgcctcagcctcccaactagctgggactacagtggtgcaccaccacacccagctaatttttgtatttttaatagggctggggtttccccatgttggccaggctggtcttgaactcctggcctcaaatgacccacccgcctcagcctcccaaagtgctgggattacaggcgtgaggcaccacgcctggctaaaatttttattgtaaagtgcatttaagattctaaccttactgaaatagcagagtgattgcataaaagtaatcttgtaatgagtgatatgcttttatttaaaaagagaggagaaagatgtttagcaatcttatggtattgagaaaatcattacattcagaaatatatctttttttttttttttttttttgagatggagtcttgatctgtctcccaggctgtaatgcagtggcgtgatctccgctcactgcaacctctgcctctcaggttcaagcaattcttctgcctcagcctcccaagtagctgggattacaggctcctgcccccatgcctggctaatttttgtatctttagtagagacaggtttcgccatgttcgccaggctggtctctaactcctgaccttgtgatccgcctgcctcggcctcccgaagtgctaggctcacaggcatgagccaccgtgcccggctgaaatatttctaatagatatatcttttctttttctttccttttttgagacagagtcttgctctgtcacccaggctggagtgcagtagcatgatcttggctcactgcaacctccgcctcccaggttcaagcagttctcctgtctcagcctccagagtagctgggattacaggcacccgccaccacgcctggctaatttttgtatttttagtagagacagggttttgccatgttggccaggctggtcttgaactcctgacctcaggtgatccgcctgcctcggcctcccaaagtgctgggattacacgtgtgaatcaccgcacccagcagatatattttttcttacatggttctttttaagtaattctttcaagctggtgtggtggctcacatctgtaatcctagcactttaggaggctaaggcaggcagatcacttgacatcaggagttcaagaacagcctggccaacatggcaaaaccctgtctctactaaaaatgcaaaattacccagttgtggtggcagacgcctgtaatcccaggtatttagcaggctgaggcatgagaattgcttggccccgggagacagaggttgcagtgagccaagatcatgccactgcactccagcatgggcaacagagcaagactgtctccaaaataataagaataattctttcttctttataataggaacgtggaacatcttcacatctgccaccacctccaaagttgcttgcacagcaggtaaattttaagtgcttgtttatggattatatattttatttgaccttttgttttggtggaaagacaccaaattttttattcaaaacttttatgaaacagttactaactttttaccttgtgactcttacatgtcttactcttcatccttttcattttcattctcagttgataagcatgcttcaagtttcactaagaaaataagaagtacctaggagataactttttttttctctctcactgcccgtatactttttcttcctattgtttttggtgctaaggacacttttttacttggttccttgtatccttttccacttatgataatgttatctcatattttaagaaaaacaacttcacaaaaacctctctctttacattactccatcccactttccatcccattgcagtgtctaccctatttctctgttctccatcagtgaaatttttttttttttttttttttagacagagtctagctctgtcgcccaggccggagtgcagtggcgtgatcttggctcactgcaacctctgcctcctgggttcacagcattctcctgcctcagcctcctgagttgctggcactacagatgcccgccaccacgcccggctaattttttgtgttttttttagtagagacggggtttcaccgtgttagccaggacggtctcgatatcctgacctcgtgatccgcccaccttggcctcccaaagtgctgggattacaggcgtgagccaccgcgcccggccaatgaaattcttttagtgaactatttatacttaccgtcttttgctgctcattctctcattagccctctccaggcatgctttcttttcccactctacctttgaaactattattatcagagtcagtgatgacttccatcttgacaaattcagttttcttgtcttcatctcatttaaatctcagctgagtcattgacatagttgatttctctatccttcttttgtatatgcatatatttttagagacagggtcttgctttgtggcccaggctggagtgcagtggtgtaatcatagctcactgccacctggactcctgggctcaaggggtcctctcacctccccagcagctgggactgcaggtgcacaccaccacgccaggctaattttttgcagagacagggtctcaccttcatgcccaggctggtctcgaactcctagacaagataccaccttgacctaccaaagtgctggaattacagacttgagccaccatccctggcctatccttaaaacacttttttatctacttgcatctgagacacctcgctattttgtttttctttgctttctattccttctgggcctcctacacttcgagtgttggagcactcagcctttttctcagtccattttaaaaatctgtatccttttccttgggtatgtcttctatgagctgatggcattcaaatgtacatttagcccgaaaagctttgcactgacttttaagagtcatatattcaacaatcaactcaacatctccacttggatctctagtaaacagctcaaatatgtccaaaccataacacacacccccacctttcctgcatacccacagtgctgcttctcctgtctttcccatttcaggtaatggcattatcattcacatatttgctaaggctgaaacttagaagttactcttaactcttctttttttaccctacatctagctttatctatcagcagattgtcacctgtaccttcaaaatgtacactgactacttgctaccaccttttatatttcctttgaactattggagtgggttcttgacagatactgctttcctcttatgctgcctgctcacttgccaccttcatcccatattcttctgtagtagttgttgtctttttaaaactatggattaggtccgttactccttgttcaagtccttctcatgatctttcagatctctgtctacttttctaatttcatctgctgttcttaccacatacacattgctcttcttgacttttttacttgttcttctttctaactagcagattttcttttcctgaaatcgttgttatgatcagggtctccagaccttctgtaatcaccctactgtgatagctgtacatatcacaaccatcaccatcgtttccagcaatccctctcctcataaccactgaaagctctttataacatttctgcgtacacagaaactaaaactaaaacatctagaaaaaagtatagaagatcaagtgttcatgaacttggagctgacaaagttttcttcgataaataagaccttggccacgaattagaaaggaaaagcagctggtcagttggactttggagaacatttcccaaagaatgcaaagatatgttacagaaaaaaatattcctaatacatctgacgaaggacttgtagctgggcttttttttttttttttttttttttgcgcaacagagtcttgctctgttgccgaggctggagcaagatctcagctcattgcagcctaaacctcctgggctcaagcgatcctcctgcctcagcctaccaagtagctgggaccacaggcatgtgcctctatgcccggctaatttttttgtattttttgtagagatggggtttcgccatgttgcccaggctagtcttgaattcctgagctcaagcagtcctcctgccttggcctcctaaagtgctgggattccagatgtgagccaccgtgtctagcctgggccgtatttttattttttttttaatatcttacaactcaataatacgtagttaaacaaaaagacttgaacatttgtttctcaaaagaaaatgtaagaatggccagtatgcacatgaaaagatattcagtgtctttagttattagggaaatacaagttaaaaccactgagattttactgcactgccagaattaaagactgatgacaccatgtgttggcaaggatgtatagagcagctggcacccttatacattggaaaaccttataaccactttggaaaacagtttggcagtttcttgtaaatgaaatatctatttaccatatgacacaggattttcacttgtagctgtttatccaacagccaggaaaacatacatttacacaaagacttacgcatgaatgttcatagctgttttattcatagtttaaaaactggaagcaacccacgtgtctatcatacatgaaacaacgtgcccacaatggaatactatccagcagtaaaatggagcaaactacttatacataaaataacctcaatgccattatacttagcaaaagaagctagcacaaaagagaatataattttatacatgtatataaaattctaggacaaacagaactatacaaggttagggttggggtgcttggggccacagggggaggcagaggagtgatggaaatgttgtgtctgcgttggagcagtggttacacaggtgtatcatttgtccaaactcatcaaactatacacttaaaatatgtgcagcacagcacattttatgtaaattttacttttatgaagtgagttgtgtaaattaggcactaatatatttggtttttcagcttatctctgagctgtggatgaagaaactcagcacaagagagatgaagtaatttgcatatgatggcactattagtaaatggtagtctgcattcatttaaaaagatagtcaagtgttttcgttgtgtcattgtttaatctttttataagcattccagctgggttacatatggctcttaagatttcttcaccctagtagcttttaaaatcaatatgttaaaaacatttttttaattacttttattgtttttgcatagttgcaagcagtgattttaaaacctgtcattgttttataacacattaatgaaaatttagtcattgaaacttggatgtttcagatgatcctccgattctccactccgggttctagatacgcttttctggatctttcagtctaaagatagaacttttcttcacccagactaatttgtaggaatttcttctcctttggggtatcattacagcactgactctgtctttttcactttgcttctttggctctgtgctttttacctgtagctgtaccttaattttctcagggctcacatgccatcattttggatatttaataccttcatttctctcccttagacattccaactctggcagctgcttctaaagtatccatgctaaatttcctttgtctctaaatttagattttgagattcactgttgtgcttctagttttattcagcaaatactgaatgagcaacaacgtctggcacaataataggtacatactcagtaaacattggaccgctggattaattattctggtcttagtttggtgaattatctagatgtaatatatttcccatcttatgtgttttcattttaatgtgtatgttcatcagagaaatttctgatatttttgtggggtttttccttctccatgcctgatacccagtgttagtcagaaatagagttgtcataactcatctgataccttaatgtttcagcatccacctccagatcgacaggcagtacctggaagaccaggcccctttccctccaagcagcaagtagctgatgaagatgaaatatggaagcaaagacgaagacaacaatcagaaatttctgcagcagtagaacgtgctcgtaaacggcgtgaagaggaagagcgaagaatggaagaacaaaggaaggcagcttgtgcggagaaactgaaacgattggatgagaagcttggcatcctggaaaaacaaccatctccagaggaaattagggaaagggagcgagaaaaagaacgggagcgtgagaaagaacttgaaaaagaacaagaacaggagcgagagaaggagagggaaaaagacagagagagacagcaggaaaaggagaaagagctggagaaggagcaggaaaaacaaagagaaatggagaaagaaagaaagcaagaaaaagaaaaagaactagaacggcagaaagaaaaggaaaaagaactacaaaagatgaaagaacaagaaaaggaatgtgagctggagaaggaaagggaaaaattagaggagaaaattgaacccagagaacctaatttagagcccatggtagaaaaacaagaaagtgaaaacagctgtaataaaggtttgatagtattcttcattctcttttaaaaactttacaaagagctttatgttggttacagtttggggtttgtatattttaaatatatgtaatcaatataaaagtgattgttttatgatagcatttgcagtacaaaatatgggctagagccgtgttttctaattctgtatatgaacagacgtctctgaagtgtttctcagttattagatgagcttcatttctgttttatctgcagaattgtattggcttcatagtcacatatactgattctccccctgcttttttctgactccaagacatttaactaaacaaaatctcatttgttcacatgcattaatacctctaaaactgaactggcatagagcttaatgagtatgttggattatcataattaaatgactgcacctagttcataatttcaggtttgctgtttaatcagtttaaacatgcaagcttccatggtgtagttgatatgctattaaactgtaatttcctggagtaattatactttaaaataaaattctttttctagatctaatcaacttttttgttcttctccgagttggcttgtagactgattaatggcattcaaatatagtataaagccttggcaaagttaaagttcagggttttcgttttttgtttgttgttgttgtggtggtggtggttgttgttgtttttgagacagagtctctctctgtctccaggctggagtgcagtggcggaatctcagctcactgcaaactccacctcccaggttcaagtgattctcctgccccagcctcccaagtagctggggctacaggcgcgtgccaccgcacccagctaatttttgtatttttagtagagacggggtttcactatgttggctagcatagcctcaatctcttgacctcgtgatctgcctgcctcggcctcccaaagtactgggattgtagacgtgagccaccgcgcccagcctaaagtttagttttaatgaacgacttgaattaaaatagaaatgcagttttatttcagtgtattttctgatgtggaaatattgtaagttttctaacctgacgtctcatgctcttttctacaaggcactgctgcttaaaataataagaatgtgtttttaaaaataaagtttttatttatatgcagggttaccttcaaacttggctcttaatttaactataaaggagtatgagtattttatctttaatttttttaatgaaataaggcctgtatggaccatttgttaagactctaagatttcagatttttttcatattaatcaatctagagagactttgctattgaatagtgggcttatattacataagtacttatgaagattgctcataacaccaaaatagtgaaataaagtgttcacaagagaaaggaaaacattatcatagtttaataagttttatttgtgcttttattttcattcacattttatatattctctctcatggcaatttaattttagcttgtttatcagtgagatgtacccatgtgatttttttttcccccctcaattctgatactagacacatacaatttttttgtttgttttaatgctctctgagatgttctcaagacacacgtgattttaaagtcagtgcctatgtggctctttttcctccagtatattattttccattcttttttttttggctgtgttgcccaggctggtctcaaactcccaggctaaagtgatcctctcacctcagcctcctgagttactgttattacagtcatgcaccaccatgacctgctcactcttttacaacattcttaatattgaatgtaatccaagcaataaaaatgttatttgtgattcttaacaatatgcttttacattgggagataaacttccattttaaattcattactagtcatttgagaaaagaatttgtaacaagcgtggatttgtaattgtgacaaatgacattctagaatgaattatgtttgaagataactagtgatcactctgttgtcttcagacttaaactcattagttttccttacagataatagtccctttacccaataaataactaaataaaccaacatgctctctttttaagtatttataggccatttgtgttttcatgtagattttaatgaactaccagtaaatactgacaattacattgatgtttattgaaacaaataaaaaatatgtggagttggaaatgtttcattatttaaaaaaaaaaaacatagattttatatgatgaagcatttggatctctgctctccatctctaagaatgcagcttttaggaaatctaaggttttgataatctaatgttacctcattgataactaccaatgttaaagtagaaaataatgttttagagtgtcgaggatattttcttcctcattaacttttattatacctcagtctttgtaaaaatcctgtgtttgataagtgtcatagatgaatactattacctttcaccttttctttgagcagaggaggaacccgttttcactagacaagacagcaatcgcagtgaaaaggaagccacaccagtggtgcatgaaacagaaccagaatcagggtctcaacctcggccggctgtattatctggctatttcaaacagtttcagaagtctttacctccacgattccagcggcagcaggtaatgataaaaatattttatcatgtatgtgtgattgaagtggtttattatgcagtagtctgggaaattagacataaaactgataatacgtaaagcacacaaagttcccttgaaattatttttccttgtaaataaaagttaacgtgggttttaccttgaccttctgtgtcattccttttgatcttctgcctcatttatagacaccatcttccatttctaggagatagatcatacagtgcttgagtataaggtaaaatgttatagttcatctttcagttttttgtcttgccaactcttaactgttaaataccttttgaactcttacttttccttcaaggattcaaaacaggccattattttgtgatatgattgattatgttaatttgtcatgtggaactaaactctcaagatatgggatcttactttttcaggaacagatgaaacagcagcagtggcagcagcagcaacagcaaggtgtacttccacagactgttccttcacaaccgtccagtagtactgtccctcctccaccacacagacctctttatcagcctatgcagcctcatcctcagcatttggcttctatgggttttgatccaaggtggctcatgatgcagtcctacatggatcctcgaatgatgtcaggaagacctgctatggatattccacccattcatcctggtcagttgaatttgcatttatagttttacaggatcaaaatttttttttccctgcttttagtttcagttcctttgagagttgtaatctaggaaaaacttaaacctccgatttttaatcaaaatgatgtaactttcagcatcgagtaattaaatatctgacactcatattacttatgtggcaagaacaaaatactagttcatttctgttttgtaagtattatttaaaacttcagatggaaataattatgtgttattaacagtatttgttattggctacattgttgttcttctttaaagtgttttcagcgtttgaattttgtccatatgttatatatattccttttcaagttcttcttccatcatttaccaacctaacacttgaatttccttttaggttagggggaaaaaaagtgaattagcagtcttttatggaatccatcagaataaatcaagataatctattaccaaaatgttacagaggaaaatttagggatgataagctgatcacaaatcatgttttgatttttacatttatactggtatttggaaatttaagtggcatattttgtagaatattgaccaactaaggtaggttaatggaatttaggaaagaattttctctgaaagttatcatagtataattttcatgatgtttgtattgacatccagagtcacagtacttggtgtctgatttttatatgcataatattttctttcttttgaagtaaaacaggctgctattgtgattttgcttattttgcttcctcagttcttaaatgcaatttttatttaacagcagtaataaaattccattcacagaacaacccttacataatttccaccagtcttttactcaggaaaaaaatgcttttaatatggagaattccacctaacaattaataacctgtattctatgtctatcatggttttgtttcgttcatttttcaaaatcctcatttcacctttttctgaacttttgttacaggaatgattcctcctaaaccattaatgagaagagaccagatggaagggtcaccgaacagttctgagtcatttgagcatatagctcgatctgcaagagatcacgcaatttccctttctgagcctcgtatgctgtgggggtcagatccctatcctcatgctgagcctcaacaagcaactactcccaaagcaacagaagagcctgaggatgtaaggtaataaattatttcaatttaatagatgatacagaatattttggtaaaaggaaaactgtgtagtgtttctgaagatcattccaatttaggactgaagcataaatctggtttccttctatttaatttagcatgctacgcttactctttggacatattctctgtattcattagggcattttgtaacctggttctgtactcaattgtatgctgtaatttagtattagatgttgaaattggtaggttcttttttgagataggaacttgctctgttattcaggctggagtgcgttggtatgatcttggctcactgcagcgttcacctcccaggctcaagtgatcggcttacctcagcttcctgagtggctgagactacatgcgttcaccaccacaccccgctaatctttgtggggttttttgttttgtttttgtttttgtttttgtttttgagacagagtcttgctctgtctcccaggctggagtgcagtggcgcgatctcagctcactgcaagctctgcctcccgggttcacaccattcttctgcctcagcctcctgagtagctgggactacaggcacccgccaccacgcccagctaaatttttgtatttttagtagagacggggtttcaccgtgttagccaggatggtctcgatctcctgaccttgtgataatctttgtattttttatagagatggggttttgccgtgttgcccaggctggtcttgaactcttgggctcaagcagtctgactgccttacctcccaaagtgctgggattatagacgtgagccatcgtgtgcagccacttgggatgtctttattgtagagtaggtgtgaagaaatttaggtgtatctacaatgcttatataatatagctagatgtaatttttccattagtgagatgtttctttttaacagtattttagggaacatttttaaggccaagataaggagaaatacaataatacaaagttaactttgaaatggcgcacaattggtgatgactgtaataatttatagccatacagttggaacttcctgcccttttatgggctatatttttttggtaatgttttataatgttttataattatttgtaattaactgggacagataagcttactcaagtgtactctttcattctaggtggaaattactggtcttgatggattagaaattcacatcagcatggtcttaactttgtttttccttaaggaataaacttcatttatttatttctattttttatttttattttttgagaagggtctcgctctgtcagccaggctggagtgcagtgatgcaatcacagctcactgcagccttgacctcccaggctcaagtgatcctctcacctcagcctcctgagtagttggactacaggcatgcagtaccatacccggctaatttttgtattttttgtacagacagggttttttcatgttgccctggctggtctcaaactcctggggccctagtgatcctcctgcctcccagagtgcaaggattacaggcatgagccaccgcttcaggcccatttttttttttttaatggagttttgctcttgttgcccaggctggagtgcaatggtgccatctcagctcaccgcaacctccgcctcccgggttcaagcgattctcctgcctcagcctccctagtagctgggattacaggcatgtgccaccacgcccagctgattctgtatttttagtagagacggggtttctccatgttggtcaggctggtctcgaactcccgacctcaggtgatccgccctcctcggcctcccaaagtgaggattgggattacaggcgtgagccaccgcacccggccctatttatttttaattgtggcagaaaccacttagaacattagatatatcctcttaacaaaaatttaatcatatggtaccatgtagttaactgtaagcagtgttatacagcaaatctccagaacttttttttatcttgcatgactgaaactttatacctatttcctattcttacctttacctatatttcctatatttacctttacctatatttcctatattatacctatacctatatttcctatttccccctactcctagcccctggcagccaccattatggtttctgctttgatgaagttgattatttcatgttcctcatgtaagatatttgtcctgactgactgacttcacttaagcataatgtcctcagggtttatccatgttgtagcatatgacactatttccttcttttttatccctgaataatattctattgtatgtgtataccacattttctttatccattcagctattggatatttaggctgtttccacctcttggctattgtgagtaattctcctctaaactttttatatagcgagagaaagattctcattatggttaagagccattgctttctgttttagagggattattttgctatatacttacacatgggaaagattgctttgttgattatacctttgaattcttatcatcataggtctgaagctgcgttggaccaggaacagattactgctgcttattctgtagaacataatcaattagaggctcacccaaaggcagactttatcagagaatcaagtgaggcacaagtacaaaagtttttaagcagatctgtggaagatgttagacctcaccatactgatgcaaataatcagtctgcttgttttgaagcacctgatcaaaagaccttatccgctcctcaagaggagcggatttcagctgtagaaagtcagccttcccggaaaagaagtgtttcccatggatctaaccatacgcaaaaaccagacgagcagagaagtgaaccatctgcaggcattcctaaagtaaccagcagatgcattgattcaaaagaaccaatagaaaggccagaggagaaaccaaaaaaggaaggctttatacgatcttctgaaggaccaaaacctgaaaaagtatataaatctaaatcagaaactcgttggggcccacgaccaagctctaacagaagggaagaagttaatgatagacctgtgagaagatcaggtcccattaaaaaacctgtacttagagatatgaaagaggaacgggaacagaggaaggagaaagaaggagaaaaggccgaaaaggtcactgaaaaagtagttgtaaagcctgaaaagacggaaaagaaggatcttcctcctcccccaccaccacctcagccaccagcaccaattcagccacagtcagttccaccaccaattcaaccagaagcagagaaatttccttcaacagaaactgcaactttggctcaaaaaccatctcaggatactgagaagcctctggaacctgtgagtactgttcaggtagagcctgcagttaagactgtaaaccaacagactatggcagcaccagtagtcaaagaagaaaaacaacctgagaaagtcatcagcaaagaccttgttatagagaggcctcgaccagattcaagaccagcagttaaaaaagaatcaactttgcctcccaggacctattggaaagaagctagagagagagattggtttccagatcaaggatacagaggtcgaggccgaggtgaatattactccagaggtcgaagctatagaggttcttatggagggcgtggcaggggtggtaggggacacactcgagattatcctcagtatagagacaataagccaagagcagagcatataccctcagggcctctcagacagcgagaagaaagtgaaacacggagtgagagctctgattttgaagttgtccccaaaagaagacgacagcggggttcagagactgacacagacagtgaaattcatgaaagtgcaagtgacaaggacagtttaagtaaaggcaaacttcccaaaagagaggaacggcctgaaaacaaaaaacctgtaaagcctcattcttctttcaagcctgataatcatgttcgaatagataatagactgctagaaaagccttatgtaagggatgacgataaagctaaaccaggctttcttcctaaaggagagcctacaaggagaggcagagggggaacattcaggcgtggtggaagggatcctggaggccgtccatcacgcccttccactttacgaagaccagcttatcgggacaatcagtggaacccaaggcagtcagaagttcctaaaccagaagatggagagccgccaagaagacatgagcagtttattcctatagcagcagataaacgacctccaaaatttgagcgaaaatttgacccagctagagaaaggcctcgaaggcagcgtcctactcgaccaccaaggcaagacaagccacctcgatttagacggctaagagagagggaggctgcttcaaaatcaaatgaggtggtagcagtgcccacaaatggcacagttaataatgtggctcaagaaccagttaatactcttggggatatttcggggaataagacaccagatttatctaatcagaactcttcagatcaggcaaatgaagaatgggaaacagcttctgaaagcagtgatttcaatgagaggcgagagagggatgaaaaaaaaaatgctgacttgaatgcacaaacagttgtaaaggttggagagaatgttctacctccaaagagggaaattgcaaagagaagtttttctagtcagagaccagtagatcgtcagaatcgacgtggcaacaatggtccacccaaatcaggaaggaatttctcaggtcctagaaatgaaaggagaagtggcccaccatcaaaaagtgggaagagagggtgagtactttgttttaaatatagttgcttttgcacctttaaagaagctaaaagtagagttcttggttgaattatgcaaagagccagtctagataaaggaccaaaaaacattgttcttcccaaatgctttattctctgttctcaaagtgtaagggtgcttaaggaagagaggttaaggtgtcttaggagtctttgcctgctacgttacattttccagaagagttctcttggaaacttgtagctttgggaaaatgttcacatctaaggagggacatgtactgtgtccttatttggtaagttatctgatgagtagccctcccttctttctcagtttctcctaataaacctctaatgctacacaggtgtcctctgagatttaaattaatgttataaccatatactttgtcactctagagagaggcccagaaaacaaatccctgttctactaccaaggacaccaataacataattgccatggcaatggatttttttaaaaaaatattttttctcaagtaagctaaacttggcctgttttttgttgttgttgttgagatggagtctcgccttgtcacccaggctggagtgcagtggcgtgatctcggctcactgcaagctccacctccagggttcatgccattctcctgcctcagcctcccaagtagctgggactacaggtgcccaccaccatgcctggttaattttttgtatttttagtagagacggggtttcactgtgttagccaggatggtctcgatatcctgacctcgtgatccacccgcctcggcctcccaaagtgctgagattacaggtgtgagccactgcacctgttgcttggcctgtttttttaactattcagatgttgggcctggtgcggtggctcctgtaatcccagcactttgggaggccaagttgggcgggtcacaaggtcaggatatcgagaccatcctggctaacacagtgaaaccccgtcctctactaaaaatacaaaaaattagccaggtgtggtggcaggcgccactgggagtggagcttgcaatgagccgagattgtgccactgcattccagcctgggccacagagcgagactccgtctcaaaaaaaaaaaaaaaaaagttggttatagtaagctagtattgatttatttatttagtgttagcattataacgtagcagttaagattcagaatgcctaggttcaaatctcggctctagtactttctagttgcttcccctttgcttcctcaccgctaaaatggggagaaaataatagcacttaatgtgtgaagatactaagatgatacttgtgatgcacttaatacctggtatatagtaagtaatcattattatgtgtgccctgcttttagagcaattgccaggtttgcagcctgagctgataagaatttaagaatttatttggactgtatggtattaatctgagttccttagttttacatacttagcacttcagattactatacccataaggtatatttgtctattttctgttgatataactaaatacctgagatctggtaatttataaagaaaagaaatgtatttcttgcaaatctgttggctgcaaagtcgaaggttgagggggcgacatctcatgagggccttcttgttggtagagactctgcagagtcccaaggcagcatgcttatcacatggtgagggggctcacaagagatggcacaactggcttttataacagacccgttcatggtaactaaccaactcccttgataacccattcattaacctgttaaggatcaatcaatccattcagaagggcagagccctcatgacataatcaccttccaaagttctcacctctcaccactgctgcattgccattagggaccaagtttccaacacatgaacttttttttttttattgagggcgtgggtgagggacggagtctcactctgtcacccaggctggagtgcagtggcgcaatctctgctcactgcaacctccaccccgctgggttcaagcatttctcctggctcagcctctctagtagctgggattacaggcgtacactaccatgcccggctaatttttgtatttttagaagagacagggattcgccatgtttgccaggctggtctcgaactcctgacctcaggtgatctgcccacctcggcctcccaaagtgctgggattacaggtgtgagccactgcacgtggcccaacacatgaacttttgagggatatgttcaaatcacagcattagtttgctgttccagataatttagaaaaaggaaatttttacttggaatttgaacattcccttaaaattccaagagaatcaggataaccaaaataaacagaatagtttatttcccgtaaccaaactattagaattttaagtaacaatactcagggaaaattttgataagatttttgtgccatgtaaatctcaactatgtagcaagatttttgtgccacatagatagataacaacaactttgaacctgtagaaatggcagtgacgattataattaaatgttttttataagagcaccatatagaagaaatgaactcattcttaaaatgtttcaggttatgaccagggacctggtaagcttttatcttgagtaatactataggctaagatgcaaatgaattagtaaacccatttcccatgatcattttcacttggaaatttaaaaaaacaacctgaaattattcttttaggaaataagaactattaagaactgtaggggatacatttggtttgtgaagtgaattatttccatattaaagttttttaaataattatatcaatgtgtaaatctgattacatttttttaaatgtacatagttgtaaatatagaatgctttttaaaaatttttgttttcatatgctgcccacttttggagagcatccatttgtgaatactttgaacttgcttggatcacagaaattttctgctataaacagtgttaattagctcatttataatatgatagacaaatagactctaagaacttctggtataactagaattctagaatttaattgctggaaagaactctagggagctagtctactttcttgggaaacccggttttagtaaggttgtgctgaacaaaagttactaatgcttgtttggttacagttaagagttttctatcccaacagtgtttcatcttagaatgaactttagaaactgccaataagagcatttttcttttgtttgggtaggtggaaatagtaatatctcaagttatttttttgtaggccatttgatgaccagcctgcaggcacaactggggttgacctcatcaatggcagctctgcacaccatcaggaaggagtacctaatggtacaggacaaaagaactccaaagattgtactgggaaaaaaagagaagaccccaaaccaggccctaaaaaaccaaaagagaaagtggatgctctatcacagtttgatctcaacaattatgcaagtatgtcttaggtttctttcattttatttatttatttatttatttatttatttatttatttatttgctacattttaaaatgtagatgccacaattaaagaagttttccaagaaggaaagatttggacattcaaggtatacatagtggctgattatgaaacactaactgattgaacttaaactaaaataactccagcttttagcgtagccttgaatgcttaataaaatttttgttaaaaataatccaacagcattgcactgttcttccaaaaaagaggaagaaaattcagtaaccactctactttgccagatttgagaaagcacagaaatttgattcttagttagttatattggtatagatgtattattaaaaacaaaaggaactaaatgttaaactcaataattatgtccttggtaaaattggtgtctaagatgtggcaaatacagaataaataataggacgagaggcagtgtcactgtggataaataggaaagccatgaagtaatagaggatcaaatatgaaggataatacaagcaacaagaaaatattggatgaagaaaaaacagacaaggaatatctgtgtatagacattgtacatgtaaaatgtactatttgccattcatttggatgaaactggaaatactgaataaaattgagagatttactaagttaagaccagatagctcaatagtggtaataatagtagtaataggaaagttgggttagttgcagttattctagtataagagatatagatgaggtttttctttcatctgcctaattgttatttgtacatattaagctctgatttgagcacagctcatggacattattttttgaccagtggttctcaaagtgtggtccccacatcatcagcattacctggaaatttgtgagcaatgcaaattcttcatttgtttgtttgtttgtttgttttgagacagagacttactctgttgcccaggctggtgtacagtgatgcaatctcggctcactgcaacatctgcatcccagacgtcaagcgattccccagcctcagcttcccgagtagctgggagtacaagcatgagccaccatgcccagctaatttattattattattattattatttttgtttgtagaaatgggttttcgccatgttgtccaggtcggtccggaactcctgagcttaagccatccacccaccttggcctcccaaagtgctgggattacgggcatgagccaccacgcccagccataatattgctatattaagacataataggcccagggcagtggcccaggcctgtcatcccagcactttgggaggctgaggtgggcggatcacctgaggttgggagtttgagaccagcctgaccaacatggagaaaccttgtctctaaaaatacaaaattagccaggcatggtggtgcatgcctgtaaaaacaaaacaaaacaaaaaagacagtaaaaacagataaaaactatatatatttctgaagtggtgatagaaattaagctattcatttcaactcattaaagttatctttaagagttagtcgtctttagttctttttcctggtaacactgtttttaagtaatatctctaacctaaaatgttaaaaagaagaggacattggaaactaaaaagtagtgttcgaattttccataaatgctacatgtagttgggtgaactaaggaagttgaaataataagataggctttacacacacacattttagtgtaagtgaaaaactgagatgaaattagaattatgatgaggtctttccatcagtctgaagtaatgtgtgcatgacatcctttgaaatgtttgacttagacctttcatggaaatgagaatatgcttcattttacagagttaatgatttttaaaaggattttaaaaacaagtagaagtgttttataaatcagaataaactgggtttttttcttttgaaatcaagtttcccttctttttttttttgtttttttttttttttgagacacagtcttgctctgtcccccaggctggaaggcggtggtgtaatctcagctcactgcaacctctacctcctcggttcaagtgattctcctgcctcagcctccttaatagttaggattacaggcacatgccaccatgcccagctaattttttgtatttttagtagcgactttagtagagggtttcgccatgttggccaggcagctctcaaactcctgacttcaagtgatccgcccaccttggcctcccaaagtgctgggattaaaggcatgagccaccgtgcctggctgaaatcaagtttctattagaaaaatggaataatggtaatgtctcgccctgtcacccaagctggagtacagtggcgtgatctcggctcactgcaacctctgcctcccaggttcaagcgattctcctacctcaaccttctgaataggtgggactacaggcgcgcaccactattcccagctaattttttgtatttttagtagagagagggttttttaccatgttagccaggctagtcaggaactcctgacctcatgttatccgccttccttggcctcccaaagtgctgggattacaggtgtgaaccaccatgcccagccagtttctaaggagtgaaagccagtattcatttttcatttcatctctcagagtatgttaatgctaagttttaactattttagaagaaatgtttgtagatagtttctctgtgaccacttccttgatcatacctatgttgccatagctaacaagtatcaccttcccttgttgctgtacctaacaagttatcaccatcctgaattgtatacttatcgtttccaagaaaaatatttttattgtatatgtaatttccaattaaaacatggtatattgtttgaaaattaaataatttctttaaattgcttcactctttcttgatacttattattcagacattatacctataataaaaaattacatcacctgaggtaatttaatttttcttggaaatattatttgatggatttatatttcacatactgactgggatatagggtaattttaagatagccaaaataattggttagttggaaaataagttaaaaaatgatcttgagttgttcatcacctagatgattctggtatgtgttcacctatgccatcttacattcacacacagcttacacatttattttaattaattaacttattcatttctttatttattgagacagggtcttgctctcccaggctggagtgcagtggcttgatctcagctcattgcagtctcaacctccccaactgaagtgattctcctacctcagcctgccaagtagctgggaccacaggcatgcgccagctaatttttgcattttttgtagagacagggtttcactgtgttgcccataacatatatttatttttaacaactccacactgtagacaagggtctacataaaacagagacattaagagtcataagaccagctaggctggtcatcttaccttaaacaaatcagtttatttcattttttaaaacattatttatttatttatgtgtttgtttttaaagtagagacagggtctccccatgttgcccaggctggtgtgaaactgttggcctcaaatggtcctcccactttggcctcccattatgctgatactacaggcatgtgccacagcactaagccaatttatttcattttttgaaaaggagaaataatagtaacagccacctcttagaatggttagatgcaaatgaggtagaatgctttgtagatcttttaaagcactatacagtctgaggctaagagatggaggttaggtcataggataattttgattttttttcttttttaaggcattacttctatattacttaaggaaaagaaaaaagacctatatcattcaaaacaggtatttttaggattttttggacagagtcgcactctgtcacccaggctggaatgcagtggcacggtctcagctcattgcaacttccacctcccaggttcaagtgattcttgtgcttcagcctcctgagtatctgggactacaggtatataccaccacacacatctaatttttgtatttttagtagagacagagttttgccatgttggccaggctggtctcaaacttccggcctcaagcagtatgcccatctcggcctccaaaagtgctgggattacagacgtgagccactgcacctggccagttttaggatttttattttcaactttaagagtatgaaatcttttcagatctttacaatgaatggccatgcaatagggtgagaaataggttatacactataagttataggaactaggcctttggctagtttttttttttttttaagtactactgtactaaacatttttattaattttcatttgaaaaacagaaaatatcttaaatcctttcccacacccacaggtgttgttataattgatgatcatcctgaagtaacagtaattgaagatccccagtcaaatttgaatgatgatggttttactgaagtggtatccaaaaaacaacaaaaacgtttacaggatgaagaacgccgaaagaaggaagaacaagtcatacaggtttaaatcttgtttcaacttgttgctagttatctagatttgttgcccaaagtgtatcagcaaatgttcaaggtttttatacttgtcaaggctgttttcattattcacgtgttaaaagtgacatcatcttcccaacttttaatcattttgaccagaatcaaaggaaattttaaataaaatataaggactgtagctccttatattttgacttacagcaaagaccatcttttttttttttttaaatactgtaagttctagggtacatgtgcacaacatgcaggtttgttacatatgtatacatgtgctatgttggtgtgctgcacccattaactcatcgtttacactaggtatttctcctaatgctatccctcccccctccccccatcccacaacaggcccaggtgtgtgatgttccctgccctgtgtgcaagtgttctcgttgttcagttcctacctatgagtgagaacatgaggtgtttggttttctgtccttgcaatagtttgctcagaatgatggtttccagcttcatccatgtccctgcaaaggacatgaactcatccttttttatggctgcatagtattccatggtgtatatgtgccacattttcttaatccagtctatcattgatggacatttggattggttccaagtctttgctattgtgaatagtgccacgataaatatacgtgtgcatgtgtctttatagtagcatgatttataatcctttgggtatatacccagtaatgggatcgctggggcaaatggtatgtctagttctagatccttgaggaatcaccacactgtcttccacaatggttgaactagtttacactcccaccagcagtgtaaaagcattcctatttctccacatcctctccagcacctgttgtttcctggctttttaataattgccattctaactggtgtgagatggtatcttattgtggttttgatttgcatttctctgaccagtgatgatgatcattttttcatgtgtctgctggctgcgtatatgtcttcttttgaaaagtgtctgttcatatcctttgcccactttttgatggggttgtttgattttttcttgtaaatttaagttcattgtagattctggatattagccctttgtcagatgagtagattgcaaaaattttctcccattctgtaggttgcctgttcactctgatggtagtttcttttgctgtgcagaagctctttagtttaattagatcccttttgtctgttttggcttttgttgccattgcttttggtattttagtcaccaagtcctttcccatgcctatatcctgaatggtatggcctaggttttcttctagggtttttatggttttaggtctaacatttaagtctttaatccatcttgaattagtttttgtataaggtgtaaggaagggatccagtttcagctttctacatatggctagccagttttcccagcaccatttattaaatagggaatcctttctccatttcttgtttttgtcaggtttgccaaaaatcagatggttgtagatgggtggtgttatttctgaggcctctgttctgttccattggtctgtatctctgttttggtaccagtaccatgctgttttggttactgtagacttgtagtgtagtttgaagtcaggtagcatgatgcctccagctttgttctttttgtttaggattatcttggcaatgcgggctcttttttggttccatatgaactttaaagtagttttttccaattctgtgaagaaagtcattggtagcttgatggagatggcattgaatctgtaaattaccttgggcagtatggccatttttacgatactgattctttctatccatgagcatggaatgtttttccatttgtttgtgttctcttttattttgttgagcagtggtttctagttcttcttgaagaggtccttcacatcccttgtaagttggattcctaggtattttattctctttgaagcaattgtgaatgggagttcactcatgatttggctctctgtttgtctgttattggtgtataggaatacttgtgatttttgcacattgattttatattctgagactttgctgaagttgtttatcagcttaaggagattttgggctgagacgatggggttttctaaatatacagtcatgtcatctgcaaacagggacaatttgacttcctcttttcctaattgaatatcctttatttctttctcttccctgattgccctagccagaacttccaacactatgctgaataggagtgttaagagagggcatccctgtcttgtgccagttttcaaagagaatgcttccagtttttgcccattcagtgtgatattggctgtgggtttgtcataagtagctcttattattttgagacaagttccattgatacctagtttattgagagtttttagtatgaagtgctattgaattttgtcgaaggccttttctgcatctattgagataatcatgtggtttttgtctttggttctgtttatgtgatggataatgtttattgatttgcatatgttgaatcagccttgcatcctagggatgaagccaagttgatcttggtggataagctttctgatgtgctgctggatttggttgaccagtattttattgaggatttttgcatcaatgttcatcagggatattggtctaaaattctctattttcattgtgtctgccaggttttggtatcaggatgatgctggcctcataaaatgagttagggaggattccctctttttctgttgattggaacagtttcagaaggaatggtaccggctcctctttgtacctctggtagaattcagctctgaatctgtctggccctggactttttttggttggtaggctgttaattattgcctcaatttcagagcctgttactggtctattcagggattcaacttcttcctggtttagtcttgggagggtgtgtgtgtcgaggaatttatccatttcttctagattttccagtttatgtgcatagaggtgtttaaagtattctccaatggtagtttgtatttccgtgggattggtggtgatatcccctttatcattttttattgcgtctatttgattcttctctcttttcttctttattagtcttgctagcggtctgtcaattttattgatcttttcaaaaaaccagctcctagattcattgatttttttttttgaagggtttctttgtgtctctatctccttcagttctgctctgatcttagttatttcttgccttctgctagcttttgaatgtgtttgctcttgcttctctagttgttttaattgtgatgttagggtatcaatttcagatctttcctgctttctcttttgggcacttagtgctataaatttccctctacacactgttttaagtgtgtcccagagattctggtatgttgtgtctttgttctctttggtttcaatgaacatctttatttctaccttcattctgttatttatccagtagtcatttaggagcaggttgttcagtttccatgtagttgtgtggttttgagtgagtttcttaatcctgagttctaatttgattgcactgtggtctgagagacagtttgttgtgatttctgttcttttacatttggtgaggagtgcttacttccaactatttggtcagttttggaataagtgtgatgtgatagtgagaagaatgtatattctgttgatttggggtggagagttctgtagatgtctattaggtctgcttgttgcagagctgagttcaagtcctggatatccttgttaaccttctgtctcattgatctgtctaatattgacaatggggtgttaaagtctcccattagtattgtgtgggagtctaagtctctttgtaggtctctaaggagttgcttaaatgaatatatatgctcctgtattgggtgcatatatatttagaatagttacctcttcttgttgaattgatccctttaccgttatgtaatggtcttctttgtctcttttgatctttgttggtttaaagtctgttttatcagagactaggattgcaacccctgctttttttgttttccatttgcttagtagatcttcctccatccctttgttttgagcctatctctgtctctgtacgtgagatgggtctcctgaatacagcacattgatgagtcttgactctttatccaatttgccagtctgtgtcttttaattggggcatttagcccatttacatttaaggttaatattgttatgtgtgaatttgatcctgtcattatgatgttagctggttgttttgcccgttaattgatgcagtttcttcctagcattgatggtctttacaatttggcatgtttttgcagtgactagtactggttcttgctttccatgtttagtgtcaggagctcttgtaaggcaggcctggtgttgacaaaatctctcagcatttgcttgtctgtaaaggattttatttctccttcacttacgaagcttagtttggctgcatatgaaattctgggttgaaaattcttttctttaagaatgttgaatattggcccccactctcttctggcttatagagtttctgccgagagatcagctgttagtctgatgggcttccctttgagggtaacctgacctttctctctggctgcgcttaatattttttccttcatttcaaccttggtgaatctgacaattatgtgtcttggggttactcttctcgaggagtatctttgtggtgttctccgtgtttcctgaatttgaatgttagcctgccttgctaggttggggaagttctcctggataatatccggaagaatgttttccaacttggttccattctccccgtcactttcaggtacactaatcaaatgtagatttggtcttttcacatagtcccatatttcttggaggctttgttcgtttctttttactcttttttctctaaacttctcttctcgcttcatttcatttatttgatcttcagtcactgatacactttcttccacttgatcgaatcggctactgaagcttgggcatgtgtcacgtagctctcgtgccatggttttcagctccatcaggtcatttaaggtcttttctacactgtttattctagttagccattcgtctaatcttttttcaaggtttttagtttccttgtgatgggtttgaacgtcctcctttagctcagagaagtttgttattaccaaccttctgaagcctacttctatcaacttgtcaaagtcattctctgtctagctttgttccgttgctggcgaggagctgtggtcatttggaggagaagagttgctctggtttttagaattttcaccttttctgctctggtttctccccagctttgtggttttatttacctttggtctttgatgatggtgacctacagatggggttttggtgtggatgtcctttttgttgatgttgatgctattcctttctgtttgttagttttccttctaacagccaggtccctcagctgcaggtctgttggaatttgctggaggtccactgcctgggtatcaccagcagaggctgcagaacagcaaatattgcagaacagcaaatattgctgcctgatccttcctctggaagcctcggtctcccagttaggctacacagggccagggacccacttgaggaggcagtctgtctcttctcagagctcaaacaccttgctgggagaaccactgccctcttcagagcagtcagacagggacttttaagtttgcagaagtttctgctgccttttgttcagctatgccctgcccccagagcatacagagtctacagagtcaggcaggcctcattgaactgcggtgggctccccgcagttcaagcttcccagttgctttgtttacctactcaagcttcagcaatggtggacaccactcccccagccaggctgccaccttgcagtttgatctcggactgctgcgctagcagtgagcaaggctctatgggcgtgggacctgccgagccaggcgtgggatataatctcctggtgtgccgtttgctaagaccgttggaaaagtgcagtattagggcgggagtcccgattttccaggtacagtctgtcatgacttcccttggctaggaaagagaaatccccccaccccttgtgcttcctgggtgaggcaatgccctgccctgctttggctcaccctccgtgggctgcacccactgtccaaccagtcccagtgagatgaaccaggtatctcatttggaagtgcagaaatcacccgtcttctgcgtcaatcacactgggagctgcagactggagctgttcctattcagctgtcttggaatggcaacgactacttcctcaagaccatctttactttaacaacatatcgtatgctagggacaccttatttgccccaaggcaaagttgagttgattttaaattatcttggaaagctaatgaacacaaatatcacgaaccagtagattttggattcctggcctacaaaagtatctattgtaatttatattagttcatttaaatacacagaatgaatcaaggtaaattattcatttaattgcctataacctttggaaccaaattttcagaagtcatttatttagaaaggtaaaatagttgtgcatctaccctatatcataacgtaccagccacactgcccaaattaatgcctgtggcaaatatatgagttaagactgtgagtagcattttgttagctcaggtaagttttgctgccagtgaatttactgcaaaatttcttagttcttgaatttcagaattatgtacctgtatgtcaagaatgtacaatacctatttgtcttttgtctcaatatcattttggcttctcatcattcaaaatcttattagcaaccctgacattttgtggtttgagtacctattttgaaaagtaaaggagccaagttagtgggagttgttaaaagttgcatttatgaactgttgcattcagctgcattattgacaaaaatggtccccgttaattttttaaggtctggaacaaaaagaatgcaaatgaaaaaggaagaagccagacttctaagcttcctccaagatttgccaaaaaacaggctacagggatccagcaagcacagtcttcagcctcagttccacctctagcttcggctccacttccaccttcaacctcagcttcagttccagcctcaacctcagctccacttccggcaaccttaactccagttccagcctcaacctcagctccggttccagcctcaactttagctccagttctggcctcaacctcagctccagttccagcctcacccttagctccagtttcagcctcagcctcagtctcagcttcagttccagcctctacttcagctgcagctataacctcttcttcagctccagcctcagccccagctccaacccccatccttgcctcagtttcaaccccagcttctgtcaccattcttgcctcagcctcaattcccattcttgcttcagccctagcatcaacttcagctccaacgccagccccagcagcctcttccccagctgccccagtcatcacagcaccaactatcccagcctcagccccaactgcctcagtcccacttgcccctgcctcagcttcagccccagccccagcccctaccccagtctcagccccaaatcctgccccacctgccccagcccagactcaggcacagacccacaaaccagtccagaatccactacagactacatctcagtcttcaaaacaaccaccaccatcaattaggctgccttcagctcaaacacctaatggcacagattatgtagcctcaggaaaatccatccagaccccacagtcacatggcactctgacagctgaattatgggataacaaggtggccccaccagctgtgctgaatgatatctctaagaaatgtaagttgcaaaagagaagtgaggggtggggaatggcatgggaatactgaggtttcttttcaattttatttatatactctttaagtgttttctagccatctcattttttattgtaggaaaaagtaatagtaatcctctcaactttcttaaaatttttgttttaagcatgtttaacaagcatattatattttatggaaataattttgtgttgatgagaaaataataggcaatgtttggggggggacttgtacatgcatatctcatttgattacagtttgtggacactgcatttttaaaaattaaaagttcatggtaactgtgtcaagcaagtcttctggtgtcatttttccaacagcatgtggtcatttcatgttctgtgtcacattttggtcattcttgcaatatgtcaaatttttcatcatttatctgttatggtggtcagttatctttgatattgtaattgtttcagggtaccatgaacacccaaataagatagtgaacttaattgataaatgttttgtgtgttctgaccactccattgatcagctgttccctgatatctacctctcctggacctccctattctttaagaacacaacaatgttgaaattaggccgattaataactctctggtggcttctaagtgttcaagtggatggaagagtcacgtacgtctcactttaaatcaaaagctgggaacgactaagcttattgaagaaggcatggtaaaagccaagataggtcaaaagttaagtgctacttcagtaatcaacactaatgataagaaagtaaaacagtcttattgctgatacaaagttatagtggtctggatagcaggtcaatccagacacaacattcccttaacccaaagcctaatccaaagcaagtgttctatctctattcaattctgtgatgcctgagagaggtgaggcagctgccaaagaaaagtttgaacctagcagtggttggttcaggaagtttaaggaaagcaaccacctctatcacattaaagtgcaaggcaaagcagcaagttatccagaagatccaaaactgagataatggatgaaggtggctacattaaataataaatttttaacgtagatgaagcagccttctgttggaaggagatgccatctaggcctttcatggctagagagaagtcaatgcctgacttaaaaggacaggctaactctcttgttaggggctaatgtatctgatgacttgaagctgaagcccctgctcatttaccatgtttgaaatcctagagcccttaaaaattatgctaaatctgttctgcctgtactctagaaatggaacaacaaagcctagatgacatcacatctgtttacaaaatggcataccaagttttttttttttttttttttttttttttgagacagtttcactcttgtcacctaggctggagtgcagtggctcaatctcagctcactgcaacctccgcctcccggattcaagcaattcccctgcctcagcctcctgagtatctgggactacaggcacacgtcaccatgcctggctaattttgtatttttcatagagacggggttttgccatgttggccaggctggtctcgaacccctgacttcaggtgatccacccacctcggcctcccaaagtgctgggattacaggtgtgagccaccatgcctggcccatacctattatttttaagcccactgttgagacctactgctcagggggaaaaatgctcaaaagctttccttcaaaatataagcttgttgacagggcacctagtcaccctagagttgtgatgaagatatacaggaagatttatgttgttttcatgccttccaacatggcatccattctgcagcccatggatcaaggagtattttgactttcaagacttgttatttaagaaatacattttctaaggctgcaacctccatacacagtgattcttctgatggatctgggcaaagaaatttgaaaaccatgtggaaaggatttaccattctagactcctttaagaacattagtgattcatgggaggatgtcagaatatcaacattaacaggggtttggaagaagttgattgtaaccctcatggatgacttggaggaattcaagacatcagtggaggaaataactctgacgcaaagaaagttgttttttgtgatggaatctcctggtgaagatgctgtggacattgttgaaatgacagcaaaggatctagaatattacataaacttagttgattaaacaatgggatttgactccagttttgaaagaagttctaccatatgggtaaacagtatcacatgctacagagaattcatgaaaggaatagtcagttgatgttacagacttcattgttgtcttattttaagtaactgccacagccatgctagctttcagcaaacaccatcctagtcagttagcagccatcaacatctccactggcaagattccaccagcaaaaaaagtacaattcaaaggctaagatgatgattagcttcctttttagcggtagtttttttaaaattaaaaagtatacatcttttttaagacatgatgctattacctattagactgtagtataatgtaaacataacttttgatatgcacttggaaaccagaaaattagtgtgatttgctttattgcaatacttgctttattgcagtggtctggaactgaacccacaatgtttctggggtatgcctgtatgttgatacataataatctttgtaagtctgatttgaaaagtgattgttttattccctggctagtaatagctacacagtaggagattaaggaaagggttaaatgggttagagattattagactctaaatcttaatcatgttttttatggcttcttctttccagtaggtcccattagtccaccacagccaccttcagtcagtgcatggaataagcccttaacatcgtttggatcagctccttcatcagaggtaagaataggcttttaacagcataggtgtgctggattttccctaatacttcagtgtggccgggtgtggtggcttacacctgtaatcctagcgtggtgggagggttacttgagtccgggagtttgagaccagcctgggcaacatagtgagacccgcctgggcaatgtaggaagaccctgtctctacatacagaataaaaaatagccagttgtggtggcatgtgcttgtagtctcagctactctggagctgaggttggactgtcacttgagcctgggaggtcaaggctacagtaaagtcataactgtgccactgtactccagcctaggtgatagagcaagaccccacctggaaagcaaaacaatgcttatagcatgcctcagaattaacttggagggcaattaaaacagattgctgagccccatgtccatagttcatgacttattaggtctgggttgaggtttgaataaatgctaacaatttcccaagtgatactcttgctgctacatctttacatttataaggtgtgtctcacttttagacattaaacacttattttcaatttagtctcaagaaagatcttaatgaaacagaaaataaaagtgcaattattgttttctggacttttctcccatgtttctatcttgaggacttaagtagtataagtatttagaaactgtttatagcagatagttattctaacataatttctcaaatgtgatattggtaaatgactgttgggggtcagtgattcttcattcattcattgaatgaacatttactaagcactcacagtattctaggtagtgttctaacctgcgggcttacaaaactgggactaaaaacagtcaaaaagccctactgtcatgggacttccattgtcctgtgaggagaaaccactaataaaaaaacatcgtgatcagcactgtggagaaaaacgaagcaggaaaggtacataaggaattttccaaggttcacaaagacagtttaatatagggtgaccacgaaagcctacttagataatgcttgagttaaagacttgaaggatataagagagtatgctattcaaatgtctgaggaaaagagattccaggttcagataatagcaaatatgaatgccatgagacaggagcacacttggtttgtttgaggaagttcagggaagtccatgtagctggaatgaagtaagagatggaaagagaatagatgaagttggaagtcacacctgagtagcaggtggatcctgtagggcctatggaagaggtgggaagacactgaagggttttgagcaaggagcaacaggatctgacttttcaaattattctgggttgtctgtgaaaaataattcataggtggcaagagtagaagttacgatattacaataattgaatgatgatagcttaaaacctgggaagtggcatgaaaggtcatgagaaatagttggtttctgagtattttgaagattgagctgacaagatttactaaagtgttaaatggagtatgagaagggacagaggagtcaaagttagctccaaagtttttgggttgaacagtaggaaatactagaattttcagtaactgagattggacagtttttgacatgttagatttaagatgcttattatgcctctgagtggaaatgtagttggatatgagtctgtagttcagaagagttcatctagtttgaagataatgaatttgaagtcattagcatatagatgatgtttaaagtgatggaatggtataaggttaccaagggagaatgagagtagttaggaaagagaatcaaaaattaagtcttggggctttctgactccaggaaatgtaggaattagagaagctaagtgattagagaagtatcctaaaagtcaagtgaaagataagttcaaagaagggatagattaagtgtgtcagatggctgctggtaggtcaagtaatataggtgttcaattgatagagttacatgatggtcactgatgactttgataagaacattattggtggagtagtagggatgaaagcctggatgaaagagtgagtttaagaggaaatgaaaggaaagatgagtaccattttctctccacatctgtagagattggttctcaccaccatagaaaccaaaacccagggatgctcaagtctcatataaaatgaagcagtatttgcatgtaacctatgcataacctccctgtgtactttaaatcatctctagattaattatatacctaatacaatgtaaatgctatgtaaattgttgttataccatattatttagggaataatgacaagaaagaacagtctgttcttgtatagcactgacaaccatttataatttttttctgaatattttccatccatactgggttgaatctacagatgtggaacctgcaaataaggagagccaactgtataaagaacttgaacgtcattttgctataaaggagtacagaaaaaaatggggcagtaaagaagatatagttgagattttaatttttgtatagcctataggtgctaaaagatttttttttctttaaagaagtcttcctgctacttctgtctccactccagttttctgacttagtaggtctagagtaggcttcatcatctgttttgatgttacagattcttcagagaactctaaaactcaagagtcactgcattcaatatttaagagtctcagtttaataatttttcctttgcctgttggtattagcatcatgattagtcatagagagcatttcaggatttttcatgctggtatgaaggaaagagtggaagtttgtttcccaaccgcaagatttttcttgcaggcattctacaagtttacagtgataaatgggtgtttacgcttaccttcagtcagtggtggagcaagatattttattggtgtctcatttttctctcatacctttttcttcattgtctttgtgttctttatgttttctggatggaagatgattttttgtgaatgtcatacattattttggagtttttcctcatgaagaaattttgtattagcaaagttgacatttcataggatggaaagaattccctaatggactttttcttagattattctagtgaaatagaactcttaatgattattttacttaaagttatcaacgttagttacaccaactagccttacaaagacttgatattataatattgtctaagcttttatcattctttgtgttatgtatatttcataaacactttcatttcaaaggatataacattctctaacagtcattaacttgacagttatttttctactcatttaaatatgtacaagttcttaacatttttgtatatacagttaatagccttcacagtctacttactgcattattttcttttctaatactactgtacacttacatttaactgactgtagaatttcaacattgactaaagcaaagaaatttttattctaatgtgcatcagtattttccaatacattcatgctttgcttaacaacagagatacgtcctgagaaatgggtcattgtgtgaacatcatagagtctacttacacaaacctagatggtatagcctatggcttctaggctacaaacctatacagcttattactacactgaataccgtaggcagttgtaacacaatgataagtatttgtgtttctaagcatagaaaaggtacagtaaaaatacgatattataattttatggaaccacccttgtatatgtggtccatcattggctaaacatcaccattatatggcacatgactgtatttgaaggtgactatttaaatattaaaagtaaatctgaattgcatgcgttgttcatactcttgacattatatccgggtagatataacattaaccttatgtagtaattgaccatgctaggtttaggaatgccaaaaatgacatggagtagtgattcaattattaaaacaagctttagttgaattttgaccctagttttgctttttatgtttgtcttttcatgaaaagattaattgttgtaacaaagccctaggtcacctaatctgcttgtctgtttctacaactgttccccatacctgctatgcttcagcctcactgacctttttttgttcttgacctttaccctaggtatgtggtctccctaaactctttccactgatcttgtcttctagattcaatgtcagtgtgtcctcctcaggggctttctctgtctaccagtctagtagctggtctcttaaccctattttgcttttgcagattccttatctgacttttcagttctttatttgcttcacctgctagaatgcaaattgtgcaattagactgattagcacatctgattagcacaaagaagatgctcaacaaattagctgggttggtttgtttgtttttgagacaggtctcgctttgtcacccaggctggagtgcagtggcgcaacctaggctcactgcaacgtccacctcccgggttcaagcgattctcctgcatcagcctcctgagtagctgcgattacaggcacatgccaccaagccctgctagtttttgtatttttagtagagacagagtttcaccatgttggtcaggctggtctcaaactcctgacctcatcatccgcccacctaggcctcccagagtgctgggattacaggcatgagccaccatacccggcccaaattaactgtttaattggtggattgattgcttagatgtttgctctatgttaccaatcacaaagtttttattatatttcttaaatttcattttcaaagcagacttctgagaagcaggtgacacttattactgtcttttatttccagtgtattcatctgtttgttggtagtggtgtctttgtgtgttgcttttacgtttgttttaaatgaggaaacaacttgaagctgtgctttgcccatgatcacactcatgagagccaggactttaaaaacttaagtcttgtgctagtttcatcttatcagttgttttctagtacagacaaacaacagttaagagaaaattatcctaaaatataattaatgtcggtctcagttaatatgtagattgtcttaaaccttctattgtacttaaactgtatagtgcttcataaatcagtcacatctgaactatactttgcaagcaagttttaaaatattcttttactagggagcgaagaatggtcaagaaagtggactcgaaattggaactgacacaattcagtttggtgctccagcctcaaatggaaatgaaaatgaagttgttcctgtgctttcggaaaaatctgctgacaaaatacctgaacctaaagaacagcggcagaagcagccacgagcaggacctatcaaagcccagaaggtaaatatactttataatccagataaaattttatgaaggccactgacatgaagagcaaataatacttttaaaagtgaacttaattttaatgaatatctttgatcatggtgcaatgatgaaagatactcatctatcataaacatagttttatcataaacatttgactttagcttccagatttgagtccagtagaaaacaaagaacacaaacctggtcccattggaaaggaacgttcattaaaaaatagaaaagtaaaagatgcccaacaggtggagccagaaggacaagagaaaccaagcccagctacagtcagaagcacagatcctgtcacgacaaaggagactaaagcagtctcagaaatgtctactgaaataggaacaatgatctcggtatcatctgcagaatatggtactaatgcaaaggtaagccacatgtagggattaccagttcaacagatgcaagccatgtctaaaatgaacgagaagaacagcaacagtctgcttttttttttcctgctgaggcatataactctatagattatttccgcaaagaagattttgtttcatgatttgcatatgtaatctaaagaagttctttatagcaaattatatttctttttgaggaaatttactctgaattctggactatttgagtagcttaaagtgaaaaacatctatacaaaatctgaatactttgaaagatggctctatatcacttttaatataaatagaattacagtagagctttatcttgcccactggtgacattctaaagtcaggaaataaggcagacttttactaactccagtatagccagttttttttcatagttggaacagattactgtttctttggttgaacactggaggctgttgactcacatttaggggccacattgaatgaaacgtgtatctaaaaatgctcattaagacaagatatgttgattgaccatgggaacagacactcatgggaatagcaaacatatctgcgattttatattgactctgggacataaactctgagaaaaagttacatgcaattttttatattatctgaatattagtctctttttaattgccatacagctgaattcatataagtaatagcttatgtggtcctactctgccatatttcaaaatgagatttgtgacaggaaacaaggagtgtaccctaaaacctgagtaattgcaacaactaagatcttggtaattgatagtaagctaagaatgaatgtgggaaacacacaaaagattcttttaataacctacagaaataaatatttggtactgttgacagtctcctagtactaaatgtacaagaatgcagtagtagttgaaatgctatcattttgatcgtgagtccatgttgtattattccattgttagttgattgagtgagttgagtcttaaagtctgctctcttcccctgctttcttccagaacaactttacaactattaggctatcattagaaagtgagcaatttggccaggcgtggtggctcatgccagtaatctcagcactttggtgggctgaggcaggcagatcacttaaggccaggagttcgagaccagcctggccaacatggtgaaaccccatctctactaaaaatacaaaaattaatgtcatggtggcgcacgcctgtaatcccagctacttcagtgactcaggcacaagaatcacttgagcctggaaggcagaggttgcagtgagctgagatcatgccactgcactccagcctgcatgatagcgagactcaaaaaaaagaggaagaagtgagcaattaattcagtttaaaatgtattttttttctattactacttcacaggagtctgtaacagactatactacaccctcttcttctttgcctaacaccgtggctactaataatacaaagatggaggatactttggttaataatgtaagtaatcagtttgagatgtggcaagtttggattggaacctggctattattatcaagcacattatttcatgttttatttactgtagtgatcaatatttaactcagggaaagagttgatagtaaatttgtgtttaggagtactgtaatataattagcaaaaatagtcaaagctgagttttttatttttcctctgaaagccatctgctttccatttaagatgaaggtttgtggtgcgtaggcttggtttcgtgtaaatactaatcttattaacctggtattggtaagaagttgttttagctctcacatttacaaatttaacatgaacggttggtgattttgttcttacataaaacctttttataattcagtgaaacccaacttatttaagataactaaaattagaattaaaagacaactatagaattcccaaagaatcaagtatgtctttaaaaaagaaaaaataccagcgtgttaacaacattcttgttgtgtagattgagctatattgtattgtatacataagtacgccaaacactctgatatgctctaatataaggtgatgttaagtcatgttgtaacttaggacctagttttccagagcaaccatgttactaatataattcaaggttgtgttaaaagtctgtacagttcatcattttgcttagctcactgtctgatagatgaaaaattgttagcccagaaacattaggtagcttgccatagttatacagtgtcatttatttagaagaacattttaaaagttacttgcatggtccttattttggagagaggtatgatggaaatttggttagtgctctctgttttaaatatagccttctgtaataagtaaaggctatcagactaaaatgttgatcatcctttttttaaaaaaatcctttacagataaatatttaaaggtctgtcacaaagagctttctttaactatcattttgagttataaaaatctttattatcttcttactttttttctatgctttctattcttccctctagcatcaagtatatggaattttagaaaggtgagctgcattaggggtcacttaatccaatttttgtagttcagctgaaggactgtactaaatatgtagctgagaaaaggaatagaaaggagtgagtcacatattttttcttggtgttgagagctctctaggagctgattaatgtgatttgttcaactttcctcccacccaccccccacttttatgaaagtggtttaaatatatatatatatatatggttttttttttctttttttaactccttatacctcctgtgaaaaataatggaagacttgggaaggaggaaaagacttcctttcagtttaagtgctgtgatatcactgtctagattatgaaatattcaatcagtaagatctcaataaagtttaattatactttgtgtcttttctcatttttaaaaaatacagaatatttctacgatagtggtttttaaagtatatgatgctttttgcgaaactaccctctgaaaatatgatttataaaatatataaaataaggaagaaaaaattattattctcagaacccttaaaattcattgaaaatatccagatgagcattttgatggtttctgtgtgatctataaggctaattaatggagcgacttatatactggtaactactggagacaacagacccagcctcatatataggtgaatagtctgcatgcagttgttagcagtgtagccagggtatgtttgaaagcagaaagatcagtttgggttagggagcattataaatggtcatcagtttgaaaggatttcatggtgttgcttacttgtgccaagtgtgttggtgattctgaactcaatgtagagttaaaaacaaatgtccttcatgggaaaaaatttaggacctcttgagatgtccttttttctttcacttgtctgtttgggggttccattttctacatagaacttttgtctttcttaattatacttgaaaatggcttatttctcttattggggcttaatacacttttttatggtcttaactgatacatgttggttagtattactcagtagtacaatcatcttgtatcttgaatgtcttgaagattaaatgcaggtggccttttggattatcatagcacagctgctttcaacatgtatgaaagaatctccattaggtagtccatagtatcacaaagtgattatcttaaaactctcaagcatcccagttatttttcctgaacaactgaacgaaccatccaaaacgtaatacataataaagtcccaagatccagagataaaggcagtgagtttctaatatcttaaagtttctaacaatatttgccataattattactatagcagaacagttttattgtaatgagatggtgctaacagtccatactttcttcccaagattacttttgttcttgaatcttgttataaaagttaaccatattgcaggaaagagattaattttttatatttttgctgtcatgttaaatacttctggtggaacctgtagatatatggtgaaggttttattccttagagctttgctacacagtatgcagcctgtagaccagcaccatcagcatcacctggcaacttgtttgaaacccagcatttcaggccttaacatagaccaattgaatcaaaatctgctttttatcagcatcctcaggtgatttatgtacatattaaaatatgagaagcactgccttctgagtatacaccttatatctggtgcagactctctttctgccaacttaacgtataaaaaggcagataataatttcccttcagaagttttatctgaggtatccttaattaccaactactataaacacaatgtgactcttaagtaatcacatatttctgttagctctgatgaaaaataaacactacccttagaacaccttagcattgtctttaatggggctttcgtagtagacacatagttagattgtgatatgtgttgcctaccttttcaggtgcccctgcccaacacccttcccctccctaagagggagactatacaacagagctccagcctaacttcagttcctcccactactttcagcctcaccttcaaggtatgtacaacatccatctctaagagtccttaattgttgcatgcaaggggacataagttaacaatattcgtggggtatttttactagatttatgtggtaagcaacaatactaagctgaggaaatagagtgctgtcaaattataccttacagttttattagcttctgataccactaagtggtgacgtgatatcctcatatttaaagtgaggcctattatgcttgtgaattttgtcttaaaaatacaggagagtatttttccatgtttgtgttaagttcctcccagagatcttaataatttttggatatatgggtttgtatacaaaaaataaaatcttaattatttcatgtttttatgattgttaccaaaatattaagtactgataatagtaagaatgttgtttgtcttccctgtaagttatgtgtgaattgaatgaacactgtatgattattttatgggaagataattgacaagtatgctttatagatgatgtcagaagattttcagttgattttttttggataattatttaataagaggacaaaagagattcagcgctttttgatgtcaaaatgttttggcctttttttttaatctattataattttgagctatgttaatgattttttacagttgtgttgtttgagagtattttaaatcagttcgtctttggagtagtcagtagtttaaaaaagtgcaaacatggaattaaaggaggttttttttaatttaaaaaaaaattttttttaaatagagatggggttttgccatgttgcccaggttggttttgaactctgggctccagcgatccacctgcctcagcctcccaaagtattggaattacaggtgggaaccaccacacctggccaagggaagattttttttaagtctatttatctcattgatgttctttgttcataatccagggaagttcttaatctctaatatagtagggcttcctgatgttgcactggttgacaatctctttgatgatcttcagttggggtcacaggaactttgttgttctacagtgtggccaatattcattttggactcatattacttttgtccccttatcttttcccctgtctgcccaacttctttgtaagaggcttaacaaatataagtttgagatcataaaattttataagacaacagcttctgctttgtgccatccctgtctttgcctagtctttactgccaattcctgttcagccttttctgttgtcttttggcttgaatgactgtcttaatctgtgttccttacttagtcttacttttatggtttttatcattatactagcaaggtaaataatctaatttcacataagcaaatataatgtcatctttaattatttttaagccagtatttatttctttagaatacctattcaactttgcctttcactcatgtttttaacattccaagaagaaatatacacattgagaattaaatttaagtcaaattacattagcttaaaacctctgatttctttatttttacttcctctgccatctcctttttgttggagtaatacataaagcatagaaaagttatattacacagtaaattcttacttattatcagtgggttcatgaaaactgcaactttaagcaaaactgtatgatggatccatagaatagcatcatttggttcagtgccacttgttctaaagtgtatgagaaaaaatattgattatacattgttgggcttagtcacagtttccaagaacctattgacgacattaagtttttatggacatcattgacaaaatatgaaaaaaatgagtatgattaactaattgtacttttagtttcactgaatttccgaaaataaaaacttcaaattatctttctgcttaaggaatggaatcaagtcaaacttgtggcctgtatgttatgtaagtttgattagctataacttaatttatatgttcccagtaaaacaaaattggcataaaagacattgtactctgtcaacttgccgtaaaccacaaaatctcagatggtacaggtaaattatattctagcttacttcctaaattcccccaagacttctattttaaaataaaacacatttgaaatcaaccaagtgattttgagaaaaagaaaagatttcagatttttctcaaatataaaagttctgtattttaaatatctaatgataacaattagtcttaagaaaaggttaaattatgaatagtgtgtttttaaaggaaggcagggtaaaatatgtactatgtctcaaaattctttttttttttttttttttttttgagttggagcctcgttctgtcgcccaggctggagtgcagtggcgctatctcggctcactgcaacctctgcctcccgggttcacgcaattctcctgcctcagcctcccgagtagctggatttacaggcgcacaccacgcccggctaaatttttttgtatttttagtagagacagggtttcactatgttggccagactggtctcgaacttctgacctcgtgatccgcctgcctcagcctctcaaagtgctgggattacaggggtgagccaccgcacccggcctctatttctcaaaattcttataaccaaaataaaattttagaaattgatactttaaggactcacaaagttcctaacagtgatattaaatatgttacttgaaaaagttcctctctcataagtcattgcagctggatcttatagattatgttggatgtatactgcatatgaaattttaatattaaaaaaacttataaaatatcaatttatgttcattagtgttttagttataatattataaatattgggttgaattaaatgttttcaaaataaatatataatctatttgtatttactttttaaaatgtagctactagaaaatttaaaattacatacttgatttgcatttagatatgtatctgttgaaaactactgaatagtgctgctctagattgaaataaggccattttctgccatttaagaaactaggagaagaaaatacagctgaaaccaggggtcataaatgcaaatggttacatctggtggtacatgaaatgcttgagatctggatgtgaaacaaaagcatttctattgcacccaagcctaaaacctatcttgttaccttgccttttaaaacactgtgagcatgaagcagccaaccaaaagatgcctgccatttgccatttaagaagcattggagtaaaaagaaagaatggagagaatggatatttactgggggaaggcctttccttattcactggtagggataagggctcatgtttaaatgatacactctcacactcccaattttagtaatggagcaaagataaagaggcaaatggaaagtctgaaatccctagggtcttagggtcttagattttctttaaatatctttgtgtgtgtgtggtttttgaaagattatatttggcacttaaatactgatacatgtatatacatacgtatattctgtattaacatcatttttttactataaaatgtccgttttattgcagatggagtctgcacgcaaagcatgggagaattctccaaatgtaagggaaaaggggtctccagtaacttccacagcacctccaattgcaactggagtcagcagtagtgccagtggaccaagcactgctaattacaattcgttctcaagtgcatccatgccccagattcctgttgcttcagtcactcctacagcatcactatcaggtagaactttttcgttctgtttctttaaatatcttacattatttaaaattttttatgatctcttcttgtttactatctctagccctccgaaaatagtaatattcaatcttcccacctcagcctcccaaagtgctgggattacaggcatgagccaccacatgtggccagtaattgctttttaaaatgtcattttcctctaaatttttctaggaagttcaccttttgattgtcattttttatgtatgtacaactaactagatcagctcaaaaagaacagagaatcacacctcttttaaatgtttgacaatctgtatctaatttgaaggtgctgttggcctaaacctgttgggataacgtattttctggtaaagacttagggatggagaattttcagcctctgctatttgagtgatgtaattcattggatttggctttagtttggtttggattttgttttattttgttttttaggagagtcctttggtgcccaaagttagaaggtgcttttcttgctctttttccttagattttcttaaatttttactagtgtgtaatcttttcattgaactatctcattatttggagaccttacggttcttaaagaaacacagatgtttccaaaatgcttgactctagaaaagtacacccttttccttttaccatatgtagaaccaagtttcttctgttgaaaaaataaaatttaatttcaagctttctcagtattatctgcttccaaagcagtaggaagctcctttccagtgatataaattactttgtttgactggttctcattcaatattgctttttagtattccagcccaccgtgctatttttaggtaccaaaaagctggtcttaggtttatacaagttattttgatattgtctgtaatcagaagtatatattaacacaaactcccgagattctacgctgcattaacattttaaatcaaactgtgttccaactatatttcttttcactttaaaacccttcctagcattcctccaccactcatttgccaaggcatcttcacttatgtttactagactagcttgagccccagtccactttgggatgggggggttagtgaaggtggtgtaaaggaaacaggagagtatggtaggaagatctggaaataatggttcctagttctttctttggaacccaactaacccgtttccccaggtctagatttcctccactatgcttgactaggataatttttttaacaaggcccttattgcctagtcatcctactggtagatgattcactagaaggatagaagcacttgaattttggtccactctcaggtggaacatcatctgaagataatgacaacttatacattactttttaatcaaataccagtattgacattttgggctagtactaaagtcataatagctcactaatcaataaaacaaattaaccctaacacctaagttttataattctatttacttattaagtagtttatttaatttgttttaaaggtattactatataccaggtggttttgttttgtttttgtttgtttcttggttagttgtttttggagttgtgtggttttttttgttttttaagagttgatgtcttgctctgtcgctcaggctggagtgcagcgatgtcatcactgttcactgcagcctcaaactcctgggttcaagcaatccttccatctcagcctcccaagtagctgcgactacaggcaccaccatgcccaactaattttttaattttgtgtagagacaggatcttacaatgttccccaggctggtcttatactcctggcctcaacatgtgccagtttttgcaggagagagaaatccagccttaagtttatgtgacattttaggaccagttgagatctttcaaggcccatgtatattcataattatttctaaggtatagcacttttctcttttgtgtccttatatctgtggtcataagtgaatgaagctcttgattatatatcctattctttgtgatgattaaaaaacaaatcatttctggctaaactataacagttacataggctctcagcctcattttattaattttgtgttttgtttctttcttgttttgattttctgttgtttattgttccatattttctagtcatatttacatttggtgataattaccttttcttttataagctacctcatctacttttggcctgaagcagtatataagtacgtgatgggtagaaacattaattttgcagtttctggttggtactgtgaacaatagcaacacttttaaatatgctctattttcccctttatttgcttccccaaatataggagctggtacatacactacctcttctttgagcacaaaatctacaaccacatcggaccctccaaatatttgtaaagtgaaacctcagcagttacagacaagcagcctgccttctgcaagtcatttttcacagttaagctgtatgccttcccttattgcccagcagcaacagaatccgcaagtttatgtgtctcagtctgcagcaggtaatgtttttaggcttgaatataaggaatttagaaaatgaagacttactaaaatgcttatttttgtctcttcttaccctttcagctaagcataaggctcttaaagtacattgctgtaaatatttaaattcgcattttttttttttttttttttttttgagatggtgtctggctctgttgcccaggctggattgcagtgacgcggtcttggcttactgccacctccacctcccaggttcaagtgatcctctcacctcagcctcccaagtagctggggccacaggagcacaccaccacacccagctaatttttcttttttttttttttttttgcatttttggtagagacgggttttaccgtgttgcccaggctggcctcgaactcctgagctcaagtgatcctcctgcctcagcctcccaaagtgctggaattataggcatgagccacctcacccagcctaaattggcataattctttttaaaagtgtcttggaaaatataagtgtacatacttactgtagtaacagtttcataactaggaatctcatatggatacatttaagctattagagattaagtaagggtattcattgcagtattatttctaataatgacaagttaaaaacaatatataggctgggtgtggtggctcatacctataatcccagcactttgagaggccaaggcagaaggattacttgaccctaggagttcaagaccaacccgagcaacatagtgagacccatctctacaaaaaattttaaacattagctggatgtggtggcacatgcctctagttccagctacttgggaggctgaggtgagagaatcatttgaacccaggtgataatcatgccactgcactccagcctggcggagtgaggccctgtctcgtcgtaataatatgtggagttctgcagaacatactactatataaaaacagcgagtcagctaggcaccgtggctcacgcctgtaatcccagcactttgggaggctgaggcgggcagatcagttgaggccagcagttcaagacccacctggccaacatggtgaaaccacgtctctactaaaaatacaaaaattggttgggcgtggtggcgcacactcagctgctcaggtagctgaggcacaagaatcgcttgaacccgggaggtggaggttgcagtgagctgggatcaatcgtgccactgcacttcagcctgggtgacaaagcgagactgtattcaaaacaaaaaacaaaaacaaaaaaaaacagcaagtcaccaaatattatgtatcatacatagaaatgtgtttaaaatttataccaaacttttaaaattaaatgtcaatcctctaaatattttgctagattctagtaggtaggtttaaaattggagtagaattgctggttcaatgggtagattcattttcaattttagtagattatgtgaaattttaccactgacaaaatctgcgtatctataccccattggcggtatataaatttttttttcatgccttcacaagtactagttatgtttgtgtgtacctgtctactagaagttttccatcttttcacatttgcatcttgtcacgtttttagtttttccatggctgtattttcagagggtgcacttaatttggaatctgctacaaaacttggtttttatttactgtttggaaaattctgaaattaggacacttactactgcttgtttatcctgatggtctacagctcaaatcccagccttctatatggacacaagtcatttattcaatacccaacatgcacgattggctccgccatccttggctcaacaacagggtttccaaccaggtctctctcaggtaatatcaaagacttcttccatcctgtatttgttccttcgcatttctgtggttataatagttatcttggaacataaataatagactctgaaattacaagctacccacgattagcttgatattctataagcaaaatttaaaatttttcccaaatttaccaaagcttaatagtaataatgtagaataagtagtgggttgaaagggaaatttagatgtttacattcagttttgttttaaaatggagctgatatatagtattaatcttactcttttcatgtctcaaatttttatattccagtgttaatgatttatctgtatgatgttgatatatatgtttacatactttctcaatgcattgcagccaacttcagttcagcagattccaatccctatttatgcaccactgcaagggcagcatcaagcccaactgagtttgggggctggccctgctgtttcccaggctcaggaattgttcagctcctcacttcaaccatataggtaaatgctttaaaagttatgtttgtaatgatgttgaaaacattgtaactgctgatcctccttgccgtaatccatactgttccttcccaaaaaaacctaggatgactctgctataaactacattggctaattgagcatgttgattatatgtcatgaacctcagcctctggtaatttcaaccatatcttattaaagaatgtcaggtttcaaaccctcttgaagtagtgaacaacagcaaccccaaaactgttagaaattatagaaagtagctgctaaagaacctaaaagtatgtgtgccatctggctaccaaaaactataaatctgaatctcctctatgtacgagctgaggcatggcagttaactacatcatgttagggggtgcagggcagggtggaatataacagaacagagaggggtaaatatcaaagcatggaagtaatgatgataaatatgctgtgtagtgaagaaagcattttttccaaaaattcactcagatgcactgtaagttacctttgcaactagggaaataatgaaaactgatttttattgaactttccttatatatgatagatattcagcctttcacatacattaactaaatttagtcttcacacaaccacctaagataagtcaccctcatttaacatgtggatgttaggacttgaagagggtgaggctttttttgttttgttttgttttaacctgaggttatacataaagtggcagaccctcagtgtctctggtttccagtttaatgagggaagaagagtgagtaagagtcagatagtaggagcagtgcatcatggcatagctgtcatccatactcatgatggtggccttaaatcatcataaagaaaaataagttacattcaggacacttagtttaggaaggctgtgcatttgtttttaggaatttgttttcagaagtgggttcagatagaatttctatactttatagattaaacctgtcatcagttaatacagtatgttttatattaccataatgatactcctagagaagccaggttcagctaatgaaactttcttaacagagagcctagtcattagtaaacctcataaatgtggcttttatttttaccttttgattaaagatgctttagtaaaatttaagacacctgtatcattacttatatagctgttgtaggtcttccctcctcattttactctcatttaatttcgttattttctcccgttagaagccccaactagaagctaaaggaagtcttgtattgaatttgggattatcttggaatttatattaaaaataaaacttgaaaatttctgacacaggaatagcagctagatttaatctcacaagccagtctccttgtaaattgtattggctgcttgaaacactgttgaaaagtttgcaaccgcttttcagtactgtgaaaaagagtacagtgattaattagtaatgttttccacaggccgtgggaggtggagtagcaatgtactatatttgtaatccccatttcactaattgtcttggaagatatactttttaagaccagacgtggtcaatagaaataaaatgtaagacacatatataattgtggcacttggctaccacattggaaagtacaggtttagattttgaaagcagttattttatccctaaacattccttgcttgttccttaacctaatcagcatagtgtttattagggaatctctgaattggtttctgcaaagacaggatagtttatagcagtatattcatgttttcttacctcgtgtttgaaacataaattataagtaggtattgtaaagactgctatgatcctagactagcattcttccttagtggcttttgttcctgccacataggtcagttttaacaaagcaacaaagcataatgttctttaacccactacttttgatttaggtgcttattctttatctctgcatcttaaaagtgtagactggaggcatccatctcagagatgatagggaagtctggggttagattctggcatattgtggttttgttttgagggggtgtgttttggcttggtttggttttggtttatgttcttgtttgtttgcttgcttaatcttcatgggtaactctgacatgagctactactgtgctttattccatggagatcttgaggctaggccatttatattaaaaatatatgtggggaagtaatgaaatacaaataagaaaagttggggctattggggctatgaattagaatgttgccaaagagaaaaagagattttgttctgaactttgtagtgaacacaaaaagagaattattctcactgttcaaaaggaaagagcaatccacttcttagggagaacaggccttttcacagaacttttacatgtgaagcttccttgtatacagggctttaaatcttgaaataagttgctttagacacagtctgtattctctgcctcttttcttgatttctgagctaattagagtgcatccaagtatcagtgatggggagacattctgaagtatgcatcctttttcaaacatcatagagtgtacctacaggaacctaggtggcatagcctgcagctatacacctaggctgtagagtacagcctattgtgtctaattaggctataaacccgtgcagcattttactgtacttaatactgtaggcagttgtaacacagtggtaaatatttgtgtctaaacatagaaatctaaacaatctaaacagaaaaggtacaataaaaatatagcatacaagattaaaaatggtacgtaccatgtatagagcacttaccatgaatggagcttgcaggactggcagttgctgtaggtgagtcagtgagtgagtggcgagtgatattactgtacactactgtggactctatactacactgtgggtacactaaatttgttaaaaaaaaaaaaaaacaaatttttcttcaataataaattaacctcaacttactataattttttgactcttataataacatttagcttacaacacaaacacattgtacatctgcacagaagtatttctttttttgtttgtttttttgagacaaggtctgtgtcacccaggctggagtgcagtggcacatacagctcactacctcgaactcctgagctcaagccattgtccagcctcagcttcccaagtagctaggactacaggcacttgctaccatgcccacctaattttttatttttttgtagagatgatgtcttgttctcttgcccaggctggtctcaaattcctggcctcaagcagccctttcacctcagcctctcaaagtgctgggattatgagcatgaacaccatgtctggccttttcttttgtaacgtttttctgttttttaattttttaatttttttttaactttttaaacttttttgttaaaaactaagatgcaaacacacacattaggctaggcctacgcagggctaggatcatcaatatactttcatctacctccacatcctgtcccactgggaggtcttcaggggcagtaacacatacagagctgtcatgtcctatgataacaatgccttcttctggaatacccgctaaaggatctacctgaagctgttttataagttttaagtaaaaagagtacactctaaaataaccagaaaatgtatagtaaatacataaactagtaacataattctttttatcagtatcagatattatgtactgtatgtaactgtatgtactgaactgttaggactgtaggtgtagtaggtttgtttatatttaatactagcaccagcaaaaacacttgagtcatatgttctatgatattagaacagctatgatgtcactaggtgataggaatttttcagcttccttatgatcttatgggaccatcaatatatatgtggtctgttgttgactaaaatgtcatgcagcacatgactgtattgggtcatttgggatttgcattcttaagattttcagattccagatgaaattaacttctaacaatattttctctttaatccttatgtagatctcagccagcttttatgcaaagcagtttatcccagccatctgtggtcctttctggtactgctattcacaactttccaactgtccaacaccaagaacttgccaaggcacaatccggtcttgcctttcagcaaacatcaaatactcagcccattcctatattgtatgaacatcaactggggcaggcatcaggactaggaggttcccagctgattgacacacatcttctccaggtaagtcaggggactagagcaatgcaccctcattgtattcctatgccacagatcattttaaggaaacatttttaaaagaaaacatgttagaagatgcaatgaaaaaaacaaagtcctttcatttatctaatactaaaaattgctagacattgctttgaagtcataatctccacctctgaatttgaaatttttttcagtcttactcatgttttcttaaaaaattttttctaggccagagcaaatcttacccaggcctcaaatctttattctggacaagtacaacagcctggtcagacaaatttttataacactgcccagtcaccaagtgctctccagcaggtaaactatggcatggtaaatttcctcaattttctttattattatttttattgcttttgttattgtttgggaatttaaattgaaccaagatgcaagatggaggatggtttttgaactgttcactgagatgtcctgaagaattccactgggtccacgtagaaggggtttcaggctcatgacacccctcttctcaccaccatcaccccctacttcagtcattcctgtttttttatatcttccaggttttttgttggtttagggggttttgttttgtttttttctgtcacctaggccagagtgcagtggtgtgatcatggctcattgcagcccaacctcccaggctcaagtgatccttgcaccgcagcctcctgtgtagctgggactacaggctcacgccattatgcctggctaatttttcttcgtagtttttgtagagacagggttttgccatgttgccccaggctgatcttgaactactggtttcaagcgatctgcctgcctcggccttccaaagtgttgggattacaggcttgagccaccacacctggctgctttttgttttttgtttttttttaattaagggggaaaaaacaacttaggtttccgtgtaattatttattctattttaacaaaggattcaatgaatataaaaccttgaaaaccattgtccagaatatagttacattaagtgtgatacaggtggtttacccattagtgctagggagaagcctcccaaagaccatctggcaggttagctatacatacaacagtgtggcagactgtgatcgagcataaatgacaaacactttcttaagtgtatgaatgcaataataattttcagtgaaaagtatatggtacgtttaaaactatctctaataatttcattagcttattctttaaaagtggtggagggctggtgggggaacaagtcattagtcattttcttataactgttgttgtttgctattttagggagtgataattcatgaatatcttattgacattcagattaaatatagtgtttatgtgaaaactgagagattcttgttcttctcatagctcattttgaccagccttgaaagtattatgtaaaatgtctgtttggaaacttgtgaatactgcttatattgtgtcctcatttactttgtgattatttgacatgtcctgtggataaattcaaagatagtcctaattctttcagtttctattctcttcactacaagtagcattaactaaactatgttgtacctttaatagaagaatggagatacggttgagggttgagtgtctcttaccgaaatgcttgggaccagaaatgtctcggatttcagattggtttttttttgtgtgtttgcgtatacataatgaggtgtcttggggcgtggggcctgtctaaacatgaaattcctttgtttcatacatactttatacatataacctgaaggtaattttaagcaacattttaaataactttgtgcatgaaacagaagttctgacctcacttcgactgatccgtcgcaggaggtcaggtgttgatttttttttttttttttttttttttttttgagacggagtctccctcacccaggctggagtgcagtggcatgatcttggctcactgcaacctccacctcccaggttcaagtgattctcgtgcctcagcctcccaagtagctgagattacaggcacccaccaccatgcctggctaatttttgtattttattttatttatttatttatttatttttttagtagagacggagtttccccatgttggccaggctggtctcaaacccctgacctcaagtgatctgcctaccttggcctcccaaagtgctgggattataggcgtgagccaccgtgcctggacttggtgtcaaattctctacttgtggtgtcatatcagcctctcagaaagttttggagcattttggattttgattttcagattagagatactcaacttgtcatcactaagcaaaagaaatatgtgaaatatattagtagatggatgtgttctatgtattttattttattttattttattttattttattttattttattttattttgagacagagtctcgctctgtcgccaggctggagtgcagtggcaggatctcggctcactgcaacctccccctcctgggtccaagtgattctcatgcctcagcctcccaagtagctgagactacaggcacatgccaccacatacagctaattttcgtattttttttttttagtagagacagggtttcaccatgttggccaggatggtctcgatctcttgacctcgtgatctgcccgccttggccttccaaagtgctgggattacaggcatgagccactgcacctggccgatgtgttctgtttgaaatcttactcaaaagtatttgaagagttgtgtatagttgtatggatatgtctgtagtaaacagaaacaaattgcttcagtttctctttacttattttctaggttacagtacctttaccagcatcccagctttccttgcctaattttggatctacagggcaacctctaattgctttgcctcagactcttcagcccccattacagcataccactccccaagcacaggctcagagtctgagtcgtcctgcacaagtaagccagcctttcagaggattaattcctgctggaacacagcatagcatgattgcaaccacaggaaaagtaagtaaagagacatttgcacaggttatttgagaatttaaggtagtgtgttcagatatatgcatctgtgttatctaaaaaactaaaatgcgtcagtttttaccaccctgcaaaaatctcaaaccccagtatatttacattttatctatttacttttaatgtgtttggccccatctagtttttacctaataacaaagaattcacaaatttattggaagaattggatttatagtgtctcttgggcttatttaattataagtctgtttggtcaggtaattccataatacttgaagcctaactataggagttttgtactaaggttctttgccctttcctagattacgtcttcacgtataggacatgtaaacacagcacttagcttgtggaattaaagaaatgttaagtttattttatgcttctcctcagatgtctgaaatggaactaaaagcctttggaagtggcattgatataaaaccaggcacacctccaatcgctggtagaagcaccacaccaacatctagtcccttccggtaaaatgggcatttaaatttgcttatgaaattccaatttggtcactatttgttaaatacttatcagtcctgtgtgacataatcccttttccaagcagaaaaggaattattaagacattctttttgatagttttgtctaaaatgttaagcttttaaattatttaaaatgtgtttattgtactatattttaagtaaattcttttgttacagagcaaacctttttttcttttattttttttgagacagagtctcacactgttacccagactagagtgcagtgccatgattatagctcactgcaacctcaaacacctgggctcaagcaagcctcctgcctcagcctcctgagtagctgggactacatacacgtgccaccacacctggctaatttttaaaaaaatattgtccaagctggtctcgaaccagccaatctaactggtaactggtatcctttcttacctctgctcctccaatgtctctcttctaccagaatgttttggtaatcatcatagtaaatttttaccaactaccaagtatgatgaaaataccaagaacggtgtttgcaaaaatctaacagcattatttacttggtattactatactgactagtaatggcttctttccaagggctacttctacaagtccgaacagccagtccagcaaaatgaacagcattgtctaccagaagcagttccagtcagcccctgccactgtgagaatgacacaaccatttcctacacagtttgcaccccaggtgggcagacataattaagaaatgagtattatttacttaaaaatagttgctaatctgataaattattatcttgccttatgttaaccagttaagaagtacagtttttaataaaaaattgtttctgaatttaacaataaatttattttataaagatagtctgcgatttatagccagacatggtaattgtttagttctaaagcagacaagagaaatagttaaaagattccccacacagctctgataatgagtccttttccttttaactttttttaaggagttgacttttcagcgaagggtcccagtgcttgaagttttctaggtttaaagttgttttttgttgttgttaagatatttatgtgcaattgagataaaatttccaaaaagatgttttaatatatgtaaaaaatgttggcttctcttccccttgctgatcgtataaaaggactaagaactctcacaaactagaactggttcctgagaaattcacatttgttgaattagtattgattttatttatcttcagattacatttgttacaggtgtgtgccttttctgcaactaccttttgaaaagatagcctaattaaaagtctttctatccccccttcagaatttacaactgagatgctaggaccaactgaagtgccatagcatgctttgcctagtttttctgttaaactctccaagcatggcctgtttattccttgtccttgttaatggaatggcacaatctgtacacttcctttcactggtaggatgggcacagatttactctgggatgagccaacctggtctagttggcagttttttttttttttttttttttaacagttcaatgttgtatgttttgtttttttcactcagattctctctcagcctaacctggtccctccattggtaagagccccacatactaacaccttcccagcgcctgttcagaggccaccaatggcactggccagtcagatgcctcctccgctgaccacaggcctcatgagccatgctcgtttgccacatgtagccaggggtccttgtggatcactatctggagtcagaggtaatcaggcccaggctgcgttgaaggctgaacaagacatgaaggttagtacagtgttaacagccaacagatcaagaatctgtctctgaaccatgtcttaaaatgcctctggacccataactgtatatccaggcattcattgtcttagcagacttaaccaagctaactacttttattcattcccccttttttttcttttttttcccccattcccattcctttcatcttttttttctttttgtttctttttctttttctttttttttgcaactgtagtcaggaaatgaattaatgtcttaaactgtggccaaatgaattgttatcaaataaatatttgagggagatctgagtttagatgcacacttttttttggaatagcaaagaagtaatatcaattattatagacttccccattttctttctttttttttttttttttaatatatattttcttcccccctttcccctgactctcctcctcccagcagcttaaaatgtaaatcatggttatatgaaaactctggaatgggtaagatgtgttactatcttagtacttttttccattatgagtcatcaaagtacagttttcttctcaaactgttttcatacccttattggcctaccacatgaggtggttgtattccacagtggattgtgcagttatagatgaagaactcagaaaagcactttgggatccttcatgatgaaaggcactgataaacatgaggtttgctaatgcagaaagagtgcctttaggagtctgtgtggggacagttttgtagcataaaccttacatgtctgccagtacagccagttgaatccgtttatttctatatttactttaggcttgactttcagggatcttagtaatttttgcctgttttgtcactacatatgtcatcagatcagactagaacaaagaaaagcttactgctttcaaacagggaaatgtgcatagtaatgctttactctgaattagaaacatgtttatgataatcctattagaaaatttgattgattgattaaagtgtctttttgggtcgacatccctagtgtttctgatcctgagtaatcaaatttaaagactacccagcagcaaaacttttattaaataattatctacttttattaaggctgtatgcctaggatttccatctgtttgttataattagaaataccagtgtgagtaaaaatcttaggaagttatttggccttggattccagttctactcctggctccttggctcttgattttcgcatattcccatgttggaaataacattagagcttaatagtagtaatggggtgggagagggtacaaacttcttgaaaattgcttcagatctttggatagtacaggttacctatagaacataaagcatttttttaatatgcaagaaggatggaaacttaagttttaattgtgaatgttacagtggtaaaatttacagatttgacgtaagtatatttttgggggcacatagtcaaaactaagaaattatttaccagctcagaatgtggtaggagctatcagaacttagtgatcaagtgaagtcgtagttactaatttctgatgctcttcccctgcagaagagagctgtgggaagaggactcagccacaagacatttggtcctaggtgttggtaatgccacaatataagtgcttccttttcattttattgtagaccacatattgataactagaagttttaagtgttacatgtatgtttttagatttgcaagcaggttccctaaataaaatttaatatgagagggcagaccttgaaaaggtggtgggaggtggtcctgtggtttttttttttttttttaaatcacatgaaatatttcaaaaataggaagaaatctattcattaaaagctcaaagatcaatgaggtacttttggctttggccaaaccagtgtggggaaaactgatttgtgattggtaaaagaatttgaaccaagattgatttgacaggctttggtaatgctgcagtattttcagttgttctttctcattttttaaggcaaagcagagagcagaggttcttcagtccacgcaacggttcttctctgaacagcaacagagcaaacagataggaggaggcaaagcccagaaagtggacagtgattcaagtaaacctcctgaaacactgaccgaccctcctggggtctgtcaggaaaaagtagaagaaaagccaccccctgcaccctccatagccaccaaacctgttagaactggaccaatcaaacctcaggcgatcaaaaccgaagaaacaaaatcttaaaggctatggtttattgcaggggattgggaggggggcgggaaaacatggagaattaagtcagataatgctggcagccaaaggggcaaaatggcctgtgacattatcctgttcagagcttggagatgtacaagggacataggagcaatttacactgacacacagctgctgtaccagtgaaaacgaggctttgcaagcttgtacctactatataacatgtgcttggttgatggccatgcatcttcagtcagaatttatatataaatgtatgcacccatttttttgagtgcatataatttagacctaaaaatccttatgattagatgaaacaccaaaaatataaggaaaataacacagcagaggaatagctcagcctgaacagtgtgatggtcccagctactacatcagatgcggtttttttgctcccttatgttcttcggatatggttatggcatttgtaggcttggaggtaaagaactgaagataactggtgctggatagaggagccttattttttattatggcagcttgctatttttataacatggtgattgagttgaacacaatcaaagtacagtagtaactgatgtccccttcttcctggatgaatgagcagataaatattgatgtcagcatccttgaaccatatcaaagtgagcagtgtttggctactgcttctatttgaaatggtgctgtgttttggttgtggtctgaagctttgaagcgctacttagcatctcctttcttccatggagctctcacgattcaaacatgacagatttggtaaaatgctggttaggttgagtcttccttgcccccactcagtcatctttgtatgaatcccatgatttgggggtttttttctttttttttttataccagtttttagctggtgtttatgaagaacagtgagtacctagaactgtgccactaattaaaggaaatcctaagaaggtgcatttctttacagagctgtgtcatgccatcctttgggccctctgctggaaaagtagaatcaagtctcaaataatgcctttttaattgtatcctctagtattatagatataggacagtactgtatcatacctctgtgaatgtaaaatatcttgtacctgctttatgatacgtagtagtgaccgtgctttatcagagctgtttttaatgatgttattctagaatgttttctttccagatgatgattcagaagctaattttaaaaaacggtgccaggtaccacaacagtaacagaactttgcaattttctggggttttgttttttacctttttccccccttttttttaaatggagtgtgctggatgtctctataattttattcagatgactgcagaacctggaaaagctgttgctgctattgatgcataacatactgctattggtctttttatataaatatatatatatatatacatatatatatataatttgaatttttggaaactttagctgtgctgtcaactttggaaaaagtatcccggtttactgtgttgagttggcattgtacagaaattaacagccatattggtctagaaacgttaaacttaatttttttccatttgtacaggggtaacgcactgtattaaatatgtaaggtcttatctacatgggtttgattacagaaactaataaagtattctctaaataatgattcttggagcttataatcatttcctaaaatctgaagcaagagggtttgtcatgtattaaaaatagtggtcaagagtactggccagtcgcagtggctcatgcctgtaatcctagcactttgggaggccgaggcgggtgaattgcctgagctcaggagtacgagaccagcctgggcaacatggtgaaaccccatctctactaaaaatacaaaaaaaaagtacattatacagccgggagcaatggctcatgcctgtaatcctaacactttgggaggccaagggaggtggatcacctgaggtcaggagtttgagaccagcctggccagcatggcaaaaccctgtctctactaaaaatacaaaaattagctggcctggtggcaggtgcctataatcccagctacttgggaagctgaggcaggagaattgcttgaacctggggcgggagtcagaggttgcaatgagccaacatcaagccacttcactccagcctgggcaaaagagtgaaactccgtcttaaaaaaaaaaaaaaaaaattacattatactctagaaaaggattatcatccaaagccttgacttctcactttgaagaactctggagatcattcaactaaagtaactattgtcatggcagatagtcatggcccctgttctgaagtagccaaactcatattgaaaacaaatctgtcagctgggcgtggtggctcatgcctataatcccagcactttgggaggctgaggtgggcggatcacctgagatcaggagttcgagaccagcctggccaacatggtgaagccctgtctctactaaaaatacgaaaataagctgtgcgtggtggtgcatgcctgtagtcccagctacttgtgaggccgaagcaggagatgtcaaggagtaaaattctcttgatgcacagtgccagatgtagaagagtttcaccatcttttggtcagaagctgaaggaccaaaaatagatctcagtattatttatgtttgtatttttcatagctttgttagcatgttcatgaacatcacctgccctaaaaggctatagggcatttattctatcatttactcaatttatgaaatgaaatactgagggattgtaattacttaatcccatgttcagaacatacggcttccagacccagctttgagaaaactagtcatttagtcactaatgacgcatgtgccttcttaactcatggatactgcgattgttaaacacaagatactcaagttttgatggttttgtgttgggtagagacagggtttctccatgttgcccaggctggtcttgaactcctgagctcaagcaatccacctgcctcagcctcccaaagttctgggattacaggcgtgagccaccgcaccaggtctgatacgtattaataggccctgccttgatccaagttttcagtctagggtttttctcaaaatatgctctaaattaaaagctgtggtttattgcaggggattgggggaagaggtatgatggataagaatgggaatcaagtacttgccttactaagtcactgccattgtcagtatttttcatattctagtttttaagtttaatcctcctaaattttaagacctaatgggtgaccagctatacagcttgcattacccccacttgcaaaccagcaggcatgtgctatttggttgtattaactgttaaaataccactaatacttagggtccttcgctagaacctacaatggaaaaatggcaccaaaagcatatcgaatgaaagtaagataatgtatataagtgtctctgcagttggccatgtagttttgtccatggcttctctgacatgtgacagaataacccaaaaggttttgcagttaatagttgactgtagatacttggtcacataagcttctgaacattgtcccttgagctgccctggtagaaggtaaggggagtccaggtccttgcccctagttaataacaaatagtgcttatgatagaagagtgattgggggaggagggttggggaatgagaggagggtatagtttataaagttctaacaaactcttggccagaggcaagatacagagggcagaatgagtcagaagctatttaagtgtcttttctaacaagtaacccgtgatttttcatgttaccactgcagcatatttcacagatgcttaccattttcagtactgacttcacatgcccctgcaacttttttccaccttatggataaatataaaactatattatagtttgacagacctaattattttgtaggtgctttagaagtagaagaactaggattggtggttggtcagttaaaatggaaagtcacaaagtctagatactttgattgcttgtattagatgtatgcttattttccatacaatcttttaatgaaggactacaccatttctttgagatgtctgctgcctagattctattacatatgcatcatatatagttttcagttttgtcttaaagaaatctgaatagagaattcccttgaactttcacagataccttccctcagttttccagctttcttcatacccctaatttgaccacagtttttacagtaaaaattgtagaaatcaagtaatattgacaaccacctactagctaatagtcatcagtcaacttatattaccttggaagtggttaaatagagtttggttaagagccacaaatttacttcatattgtaatgtaatgatttttttaaaaacttccctcaacagaaaggaataatgtgctacaggaaaaggaaaacttacctgaggtagagagtttaagcaagaggtgaatctggtgtaatcaggcaaggagtcaagtattaactctgtatgtgtcaggtgctgggaatatagaggacagtttcttaacacagtctggggtgtaggtggagatacatggggtggctttgaggcctttcaggttttcatcactgatagatacctagcccttatttcatggatgcctcaaaccccattttccagtctaagctttcgcccctaatctatttgcctgtactgcataaccttctaaatatgattaaaatcttccagaagtttttagtcagccctgatctggccttctcaccatttcttcacatactagctaatatttaataagtagaattatgtgtaaatttgggtcttcctggtatatgagcaaaaaaagcaatagtttccttatctgagctgaaaaagacactaatgttcagtggagaacagaggaagagaattccaataagcagagcctgtggttccaggtgaataagtcttaagttcaaggatggtgtagagggacagagatgcattctggccctccagggttagatttgtcaagaggcgaaatagttaatttcagacagttctctggaactgatgtaatctggtttacttagggcagtggttttcagattggaagtacacactattaaacagaagcaattccactttaaaattttgcttggctaaaggattcagtggctattttttttttttttttaattaccaatgtgaataaggtttattggttccggggaggagacaccctctctagtatgagaagctgcaaagaaggttgtacttggagtaaaaaccacactcttcacagaagctgatcgtgatacccattgaggagactgattgggcctcagctttctataacctgggaatataaatgggtgttataaagtttcgtgttacatgactcagttatcagaattgtatctccagcttagaaccttacagggaaaaactggaaattacacataaatatcacccacttgccccctccaccccccaactttataaggtaggtaatattatttacacatgcagagaatgaggtgtggtaacctgcccaatgatacacagtaagcagaggaggcagggttttttggtccagacagtctaattcttaagtgtaagctctttactaagctgcactgttgtgaaagcactgtacttgaagttacaggcataccttgttttactgcactttgcagatattgcaagattttttcttcaaaataacgaaggtttgtggcaaccccatgttgagcaagttcattagtgctattttctaacagtgtgtgctcatttcctgtctgtgtcacatttgataactcttaaaattatttcaggcttaaattatcatgttatggtgatccgggatcttgaatgttactagtgtaatttggagcctcatgaaccacacccatacgatggtgaacataaatgcacgtgttctgattgctccacaaacaggctgttccctctctccgtctccttaggcctctgtattcccggagacacaacattgaaattaggccaattaatagccctacagtggcctctaagtgttcaagtaaaaggaagagtcgcacgtctcagtttaaatcaaaagctgaaaatgattaagcttaatgaggaaggcatggcaaaatctgagatgggccagaaagataggcttcttgggcccattagacaagttgtgaatgcaaaagataaatcttgaaggaaattaaaagtgctactccagtgactacacaatgataagaaaacaaaagaaccctatttctgatataaagttttagtggtctggataaaagattgaaacaggcccaacattctcttaagccaaaaccgtatccagagcaaagccgtaactccaattccgtgaagtcagagaggtgaagaagctgtggaagaaaagtttgaagctagcagaggctggttcatgagatttaaggaaaacacccatctccataacattaaagtgcaaagtgaagcagcaagagttgatgtacgaactgcagcaagttgtctggaagatctagctgagataattgatgaaggggctatgctaaatagcaagtatttaaggtagacaaaatagccttctattggaagcagatgccatctaggcctttcataggctagagagaagtcaatgcctggcttcaaagcttcaaaaaagactgacttgtgaggggtttatgcagctggtgactttaagctgaagccaatactcatttaccatttcgaaaatcctagggcccttaaaaattaagctaaatctactctgcctgtgctctagaaatagaacagcaaagcatggatgacagcacatctctatagcataacgcatctaatattttaaacccactgttgagacctattgctcagggacggaaaaaacctaaagctttcaaaatatgataagctcattgacaatgcacctagtcactcaagagttgtgatggagatgtacaagaagattgatgttttcatgcctgctaacatgacatccattctacaacctatggatcaaagagtaattttgactttcaagtcttatttaagaaatattaggccagacgcggtagatcacgcttgtaatcccagcactttgggaggccgaggcgggcagatcatgaggtcaggagttcgagaccagcctggccaacatggtgaaaccccgtctcttctaaaagtacaaaaaaaaaaaaaaatccaggcatggtggcacatgcttgtaatcctagctactcaggaggctgcggaaggagaattgcttgaacctgggaggtggaggttgcagtgagctgagattgtgccactgcactccagcctgggtgacagagtgagactctgtctcagaaaagaatatatatatattaatacgttttgtaaagctacaactttcgtaaatagtgagtcctctgatgaatctgggcaaagaaattgaaagccatatgaaaggatttaccattctagatgccattaataacatttgtggttcatgggaggatgtcagaatatcaacaacaaataggagtttggaagaagttttattccaaccctcatggagccctaggggattcaagacttcaatagaggaagtaaatgcagatgtggtggaaatagcaagagaggtagagttagaagtggagcctgaaggtgggactgaattgctgcaatctcatgatcaaacttgaacagatgaggagttgcttcttatggatgagcaaagaaagtggtttcttgtgatggaaccttatccttgtgaagatgctgtgtatgttgttgaaatgacaagaatttagaattttacacaaactcagttaataaagcagtgacaaggtttgaggcgactgactccaactttggaagaagttctactgtggctaaaatgatatcaaacagcatcacgtggtacagataactcattcatgaaaggaagagtcaattgatgtggcaaacttcattggcttatttgaagaaattgccacagccaccctggtcttcagcaaccaccaccttgattaggcagcagccaccaacatcaaggcaagattctccaccaacaaaaagatataacttggttgggcgcagtggctcacgcctgtaatcccagcactttgggaggctgaggcaggcggatcacctgaggtccggagttccagaccagcctgaccaacctggagaaaccccgtctctactaaaaataacaaaattagccaggcgtggtggtgcatgcctgtaatcccagctactcaggaggctgaggcaggagaatcgcttgaacccaggaggcagaggtttccgtgagctgagatcgcgccatttcactccagcctgggcaacaagagcgaaactctgtctcagaaaaaaaaaaaaaagatatgactcactagaagctcagatgatcattagcatttttttagcaatgaagtattttaaataaaactgcatttttttagacataatgctattgaacacttaatagcaaccatgtaaacataacttttatatgcactggacacccaaaaagtccacgtgacttattttactgtggtagtctataaccaaacccacaatttcttcaaggtatgccttgctaggtgagtaacctaagaaaaatcactcagttgggtgcagtggctctgagggaagagagagaccttctcatattgttttatattcagtgcctgttttaagaaaaaaagaaaaaacaacaaggaagtaaaaccaaagacaggcagcccagcgccaggcctgaaaccaggcctgggcctgcctggcctaaacccagtagttaaaaatcaactcctgacttagaaaccaatgttacccatagatttcaggcattgtataaaagaacatgtggaactccctgctctgttctgtttctctctgactaccagtgcatgaaacccctgtcacgtatcccctagattgctcaatcaatcacgaccctttcatgtgaaatctttagtgttgtgagcccttaaaagggacagaaattgtgcactcagggagctcggattttaaggcagtagcttgccaatgctcccagctgaataaagcccttccttctacaacttggtgtctgagaggttttgtctccggctggtcatgctacatttcttggttccctgaccgggaaacgaggcagacaaaacctgggtagttaaggggctacccgaggcagccccttaggtggcttaggcctgctgtgtggagcatccctgcaggggactccagccagcctgagtgaagccatccgaagagcgatcccaggtagagaattgccccggtggaacgcctcgccagagcagtgcgtagcaggcccccgcggaggattaacacagtggctgaacaccaggaaggaactggcacttggagtccagacatctgaaatttagtaagactagtctttagaacttgccccactccatctgagtggaagcgtggcctgatcacccagggtgtgcctgcattggcacttttgttctggttttgacttgacttgaattgctggacactttggttttagttttgacttggcttgaattttttggtacacggattttgaatttcgtgattttggtttggtataaacagtaaaagtgtgggtgtgccctctttacccgttctttgtcttgtggtgagtgtgtgtagtgtgagcgtggtattttgtctcaaaaaaaaaaaaaataggtcaggtgcaaagtaagcccaccccactgggaactatgttaaagaatttcaagaaaagattttagggagactatggagtcactatgactccaggaaaacttaggactttgtgtgacatagactggccagcattagaggtgggttggccatcagaaggaagcctagacaggtcctttgtttcaaaagtatgacacaagttaacctgtaagccaaggcacccagaccaatttccgtacatagacagttacagctggttttagacccccttcctccccacagtagttaagagaacagcagcataagcggctggcagaggcaaggaaagaccagcagagagaaaaagagaccatctataccaattctaagttaatttagactaaacaaggtcttattaatagcaaaagataattgaaatcccaaacttacaaggttttcaacaaagtgaagtttgctaaaagttaacagtgtaacatgtattatggtaacttctaatcttgtagccttagacagtctagtccaaagacataaagaaagtttgctttaaaaaaaaaaaaggaatagttatcttcaaaaaataaagagaaaaaaaaggggggaggcagaatttatgtaaagagtgttatatggtaaattcttgtcctgaaataaattaactgcttgtttaaagaaaaaaatctttgtaataagtcagaaagttgagacatgttgaaaaattgtgtgcgaaagtcgtgaaagaaaaaatgttataaaaaattatgcaaaaaatgttgtataatttaaaagtaataaggcctcctgagtactgtttaaaaaaacagtttatgtgcaaagtgtataagaaaagtaaaatgtacctttagtaaaaagattataaaggggcataaaaacgtggatttttacctacattaaaaggttaaaaaaatattgttttaaaagttttaaaacgttaattgtaaagaaaattctgtgtgtaaacatattagctaaagttaaaaaggtatcatccaatttttctgtgaactagacattaaagtaaaaatgcaacaggtttttcttaaagcatcaacctgctctttaacaaaaattataaaaagttaaaaagagtctataaaatcttaccttatggtcaaacataaaaaattagataaatatgtctacaaggttttattaaaattaagtttaacattaataacaccctaatataaaagtaaaatttaacttacgtggtataaaaatcatacaagaagcattattaaatataaaatagtgtttaactttctttggtctaaaaactaataaaaaatagatgctaaaagaaacattcattttactagaggatcatagaagttaaagacttaaaacaaactttggcaattaagacggcataccaagatgcaaatgcctggttgaaatagatcaaatattccatctgcacgttataaaaagcaattgttatgcttgtgcacatggcaggccagaggccccgattgtcccccttccactaaggtggtcctccagtccaccaggcgtgggctgcatggtagctcttttccaggattctacagcctagagtaataagtcatgccaagctctctctgctatatcccgaagtccctgcaggtcagcccccaaaggccatccagcttccgtctcccaacactaagttcacttcgtgtctctcacggcagggaggagacttattagcattccttagagacctgaagggatgcagtgagcttaagaattttcaaccagtcagcccttgttcctccccgagcaaatgtgtggtggtattctggtggacctttactgggcactctgccgcataactagagtggcacttgtgctttagtccacttggctatccctttcaccctggcatttcatcaaccagaggaaaaacaaaaaataagacatcgtaaagtgagagaagcccttataggtctttcaactctcacatctatttagatgcaattggagccccacaagaaatacagatcaatttaaa

SEQ ID NO: 629 - DNA, 10361 bp, Homo sapiens
ctcgctccccctcggaaagctgcgaaagtgctttggcggtttgtccatccgcagcttcggcttttccagtctggtggcccttccggccacccctttaaccccagctttccctcccccttctttcgatcagagatcggcggagaccctcgaagtgcgcaaacttgacactcaccctgaccggactggggttttaaggggtgtggcaggaggttttggactcgatgagtttccaccgaaatgtcggagaagtcaggccagagcacaaaagcaaaggatgggaaaaagtatgcaacactcagtttatttaatacttacaaggggaaatcattagaaacacagaaaaccacagttgcagctcgacatggattacagagtcttggaaaagtcggtatttcacggcgtatgcctccacctgctaacctcccaagtcttaaagcagaaaacaaaggcaatgatcctaatgtaaacattgtacctaaagatggcacagggtgggcatcaaaacaagagcaacatgaagaagaaaaaacaccagaagtgccaccagcacagccaaaacctggggttgcagctcccccagaagtagcacctgctcccaaatcatgggccagtaacaagcaaggtgggcaaggagatggaatccaagtgaatagtcagtttcagcaagaatttcccagcctgcaggcagctggggatcaggaaaaaaaagaaaaggaaacaaatgatgacaactatggacctggacccagtttacgtccaccaaatgttgcttgttggagagatggtggtaaggctgctggctcaccttcgtcatctgatcaagatgaaaagctccctggccaggatgaaagcacagctggaacatcagagcaaaatgatatcctcaaagtggtggaaaagaggatagcttgtggtcctccacaggctaaactgaatggacagcaggctgctctcgcttcccagtatagagctatgatgcctccttatatgttccaacagtatccgaggatgacatatcctcctctacatggtcccatgagattcccaccttctttatctgaaacaaacaaaggccttcgaggaagaggcccacctccttcatgggcctctgagcctgaacgcccatccattcttagtgcatcagaactgaaggagcttgataaatttgataacctagatgctgaagctgatgaaggttgggcaggtgctcagatggaagtagattatacagagcaactgaatttcagtgatgatgatgaacaaggaagtaacagtcctaaagagaataacagtgaggatcaaggttcaaaagcctctgaaaacaacgaaaacaaaaaagaaacagatgaagtttccaacactaaatcatcttcccaaatacctgcccaaccatcagtagcaaaagttccctatgggaaaggaccttcatttaatcaggaacgtggaacatcttcacatctgccaccacctccaaagttgcttgcacagcagcatccacctccagatcgacaggcagtacctggaagaccaggcccctttccctccaagcagcaagtagctgatgaagatgaaatatggaagcaaagacgaagacaacaatcagaaatttctgcagcagtagaacgtgctcgtaaacggcgtgaagaggaagagcgaagaatggaagaacaaaggaaggcagcttgtgcggagaaactgaaacgattggatgagaagcttggcatcctggaaaaacaaccatctccagaggaaattagggaaagggagcgagaaaaagaacgggagcgtgagaaagaacttgaaaaagaacaagaacaggagcgagagaaggagagggaaaaagacagagagagacagcaggaaaaggagaaagagctggagaaggagcaggaaaaacaaagagaaatggagaaagaaagaaagcaagaaaaagaaaaagaactagaacggcagaaagaaaaggaaaaagaactacaaaagatgaaagaacaagaaaaggaatgtgagctggagaaggaaagggaaaaattagaggagaaaattgaacccagagaacctaatttagagcccatggtagaaaaacaagaaagtgaaaacagctgtaataaagaggaggaacccgttttcactagacaagacagcaatcgcagtgaaaaggaagccacaccagtggtgcatgaaacagaaccagaatcagggtctcaacctcggccggctgtattatctggctatttcaaacagtttcagaagtctttacctccacgattccagcggcagcaggaacagatgaaacagcagcagtggcagcagcagcaacagcaaggtgtacttccacagactgttccttcacaaccgtccagtagtactgtccctcctccaccacacagacctctttatcagcctatgcagcctcatcctcagcatttggcttctatgggttttgatccaaggtggctcatgatgcagtcctacatggatcctcgaatgatgtcaggaagacctgctatggatattccacccattcatcctggaatgattcctcctaaaccattaatgagaagagaccagatggaagggtcaccgaacagttctgagtcatttgagcatatagctcgatctgcaagagatcacgcaatttccctttctgagcctcgtatgctgtgggggtcagatccctatcctcatgctgagcctcaacaagcaactactcccaaagcaacagaagagcctgaggatgtaaggtctgaagctgcgttggaccaggaacagattactgctgcttattctgtagaacataatcaattagaggctcacccaaaggcagactttatcagagaatcaagtgaggcacaagtacaaaagtttttaagcagatctgtggaagatgttagacctcaccatactgatgcaaataatcagtctgcttgttttgaagcacctgatcaaaagaccttatccgctcctcaagaggagcggatttcagctgtagaaagtcagccttcccggaaaagaagtgtttcccatggatctaaccatacgcaaaaaccagacgagcagagaagtgaaccatctgcaggcattcctaaagtaaccagcagatgcattgattcaaaagaaccaatagaaaggccagaggagaaaccaaaaaaggaaggctttatacgatcttctgaaggaccaaaacctgaaaaagtatataaatctaaatcagaaactcgttggggcccacgaccaagctctaacagaagggaagaagttaatgatagacctgtgagaagatcaggtcccattaaaaaacctgtacttagagatatgaaagaggaacgggaacagaggaaggagaaagaaggagaaaaggccgaaaaggtcactgaaaaagtagttgtaaagcctgaaaagacggaaaagaaggatcttcctcctcccccaccaccacctcagccaccagcaccaattcagccacagtcagttccaccaccaattcaaccagaagcagagaaatttccttcaacagaaactgcaactttggctcaaaaaccatctcaggatactgagaagcctctggaacctgtgagtactgttcaggtagagcctgcagttaagactgtaaaccaacagactatggcagcaccagtagtcaaagaagaaaaacaacctgagaaagtcatcagcaaagaccttgttatagagaggcctcgaccagattcaagaccagcagttaaaaaagaatcaactttgcctcccaggacctattggaaagaagctagagagagagattggtttccagatcaaggatacagaggtcgaggccgaggtgaatattactccagaggtcgaagctatagaggttcttatggagggcgtggcaggggtggtaggggacacactcgagattatcctcagtatagagacaataagccaagagcagagcatataccctcagggcctctcagacagcgagaagaaagtgaaacacggagtgagagctctgattttgaagttgtccccaaaagaagacgacagcggggttcagagactgacacagacagtgaaattcatgaaagtgcaagtgacaaggacagtttaagtaaaggcaaacttcccaaaagagaggaacggcctgaaaacaaaaaacctgtaaagcctcattcttctttcaagcctgataatcatgttcgaatagataatagactgctagaaaagccttatgtaagggatgacgataaagctaaaccaggctttcttcctaaaggagagcctacaaggagaggcagagggggaacattcaggcgtggtggaagggatcctggaggccgtccatcacgcccttccactttacgaagaccagcttatcgggacaatcagtggaacccaaggcagtcagaagttcctaaaccagaagatggagagccgccaagaagacatgagcagtttattcctatagcagcagataaacgacctccaaaatttgagcgaaaatttgacccagctagagaaaggcctcgaaggcagcgtcctactcgaccaccaaggcaagacaagccacctcgatttagacggctaagagagagggaggctgcttcaaaatcaaatgaggtggtagcagtgcccacaaatggcacagttaataatgtggctcaagaaccagttaatactcttggggatatttcggggaataagacaccagatttatctaatcagaactcttcagatcaggcaaatgaagaatgggaaacagcttctgaaagcagtgatttcaatgagaggcgagagagggatgaaaaaaaaaatgctgacttgaatgcacaaacagttgtaaaggttggagagaatgttctacctccaaagagggaaattgcaaagagaagtttttctagtcagagaccagtagatcgtcagaatcgacgtggcaacaatggtccacccaaatcaggaaggaatttctcaggtcctagaaatgaaaggagaagtggcccaccatcaaaaagtgggaagagagggccatttgatgaccagcctgcaggcacaactggggttgacctcatcaatggcagctctgcacaccatcaggaaggagtacctaatggtacaggacaaaagaactccaaagattgtactgggaaaaaaagagaagaccccaaaccaggccctaaaaaaccaaaagagaaagtggatgctctatcacagtttgatctcaacaattatgcaagtgttgttataattgatgatcatcctgaagtaacagtaattgaagatccccagtcaaatttgaatgatgatggttttactgaagtggtatccaaaaaacaacaaaaacgtttacaggatgaagaacgccgaaagaaggaagaacaagtcatacaggtctggaacaaaaagaatgcaaatgaaaaaggaagaagccagacttctaagcttcctccaagatttgccaaaaaacaggctacagggatccagcaagcacagtcttcagcctcagttccacctctagcttcggctccacttccaccttcaacctcagcttcagttccagcctcaacctcagctccacttccggcaaccttaactccagttccagcctcaacctcagctccggttccagcctcaactttagctccagttctggcctcaacctcagctccagttccagcctcacccttagctccagtttcagcctcagcctcagtctcagcttcagttccagcctctacttcagctgcagctataacctcttcttcagctccagcctcagccccagctccaacccccatccttgcctcagtttcaaccccagcttctgtcaccattcttgcctcagcctcaattcccattcttgcttcagccctagcatcaacttcagctccaacgccagccccagcagcctcttccccagctgccccagtcatcacagcaccaactatcccagcctcagccccaactgcctcagtcccacttgcccctgcctcagcttcagccccagccccagcccctaccccagtctcagccccaaatcctgccccacctgccccagcccagactcaggcacagacccacaaaccagtccagaatccactacagactacatctcagtcttcaaaacaaccaccaccatcaattaggctgccttcagctcaaacacctaatggcacagattatgtagcctcaggaaaatccatccagaccccacagtcacatggcactctgacagctgaattatgggataacaaggtggccccaccagctgtgctgaatgatatctctaagaaattaggtcccattagtccaccacagccaccttcagtcagtgcatggaataagcccttaacatcgtttggatcagctccttcatcagagggagcgaagaatggtcaagaaagtggactcgaaattggaactgacacaattcagtttggtgctccagcctcaaatggaaatgaaaatgaagttgttcctgtgctttcggaaaaatctgctgacaaaatacctgaacctaaagaacagcggcagaagcagccacgagcaggacctatcaaagcccagaagcttccagatttgagtccagtagaaaacaaagaacacaaacctggtcccattggaaaggaacgttcattaaaaaatagaaaagtaaaagatgcccaacaggtggagccagaaggacaagagaaaccaagcccagctacagtcagaagcacagatcctgtcacgacaaaggagactaaagcagtctcagaaatgtctactgaaataggaacaatgatctcggtatcatctgcagaatatggtactaatgcaaaggagtctgtaacagactatactacaccctcttcttctttgcctaacaccgtggctactaataatacaaagatggaggatactttggttaataatgtgcccctgcccaacacccttcccctccctaagagggagactatacaacagagctccagcctaacttcagttcctcccactactttcagcctcaccttcaagatggagtctgcacgcaaagcatgggagaattctccaaatgtaagggaaaaggggtctccagtaacttccacagcacctccaattgcaactggagtcagcagtagtgccagtggaccaagcactgctaattacaattcgttctcaagtgcatccatgccccagattcctgttgcttcagtcactcctacagcatcactatcaggagctggtacatacactacctcttctttgagcacaaaatctacaaccacatcggaccctccaaatatttgtaaagtgaaacctcagcagttacagacaagcagcctgccttctgcaagtcatttttcacagttaagctgtatgccttcccttattgcccagcagcaacagaatccgcaagtttatgtgtctcagtctgcagcagctcaaatcccagccttctatatggacacaagtcatttattcaatacccaacatgcacgattggctccgccatccttggctcaacaacagggtttccaaccaggtctctctcagccaacttcagttcagcagattccaatccctatttatgcaccactgcaagggcagcatcaagcccaactgagtttgggggctggccctgctgtttcccaggctcaggaattgttcagctcctcacttcaaccatatagatctcagccagcttttatgcaaagcagtttatcccagccatctgtggtcctttctggtactgctattcacaactttccaactgtccaacaccaagaacttgccaaggcacaatccggtcttgcctttcagcaaacatcaaatactcagcccattcctatattgtatgaacatcaactggggcaggcatcaggactaggaggttcccagctgattgacacacatcttctccaggccagagcaaatcttacccaggcctcaaatctttattctggacaagtacaacagcctggtcagacaaatttttataacactgcccagtcaccaagtgctctccagcaggttacagtacctttaccagcatcccagctttccttgcctaattttggatctacagggcaacctctaattgctttgcctcagactcttcagcccccattacagcataccactccccaagcacaggctcagagtctgagtcgtcctgcacaagtaagccagcctttcagaggattaattcctgctggaacacagcatagcatgattgcaaccacaggaaaaatgtctgaaatggaactaaaagcctttggaagtggcattgatataaaaccaggcacacctccaatcgctggtagaagcaccacaccaacatctagtcccttccgggctacttctacaagtccgaacagccagtccagcaaaatgaacagcattgtctaccagaagcagttccagtcagcccctgccactgtgagaatgacacaaccatttcctacacagtttgcaccccaggcaaagcagagagcagaggttcttcagtccacgcaacggttcttctctgaacagcaacagagcaaacagataggaggaggcaaagcccagaaagtggacagtgattcaagtaaacctcctgaaacactgaccgaccctcctggggtctgtcaggaaaaagtagaagaaaagccaccccctgcaccctccatagccaccaaacctgttagaactggaccaatcaaacctcaggcgatcaaaaccgaagaaacaaaatcttaaaggctatggtttattgcaggggattgggaggggggcgggaaaacatggagaattaagtcagataatgctggcagccaaaggggcaaaatggcctgtgacattatcctgttcagagcttggagatgtacaagggacataggagcaatttacactgacacacagctgctgtaccagtgaaaacgaggctttgcaagcttgtacctactatataacatgtgcttggttgatggccatgcatcttcagtcagaatttatatataaatgtatgcacccatttttttgagtgcatataatttagacctaaaaatccttatgattagatgaaacaccaaaaatataaggaaaataacacagcagaggaatagctcagcctgaacagtgtgatggtcccagctactacatcagatgcggtttttttgctcccttatgttcttcggatatggttatggcatttgtaggcttggaggtaaagaactgaagataactggtgctggatagaggagccttattttttattatggcagcttgctatttttataacatggtgattgagttgaacacaatcaaagtacagtagtaactgatgtccccttcttcctggatgaatgagcagataaatattgatgtcagcatccttgaaccatatcaaagtgagcagtgtttggctactgcttctatttgaaatggtgctgtgttttggttgtggtctgaagctttgaagcgctacttagcatctcctttcttccatggagctctcacgattcaaacatgacagatttggtaaaatgctggttaggttgagtcttccttgcccccactcagtcatctttgtatgaatcccatgatttgggggtttttttctttttttttttataccagtttttagctggtgtttatgaagaacagtgagtacctagaactgtgccactaattaaaggaaatcctaagaaggtgcatttctttacagagctgtgtcatgccatcctttgggccctctgctggaaaagtagaatcaagtctcaaataatgcctttttaattgtatcctctagtattatagatataggacagtactgtatcatacctctgtgaatgtaaaatatcttgtacctgctttatgatacgtagtagtgaccgtgctttatcagagctgtttttaatgatgttattctagaatgttttctttccagatgatgattcagaagctaattttaaaaaacggtgccaggtaccacaacagtaacagaactttgcaattttctggggttttgttttttacctttttccccccttttttttaaatggagtgtgctggatgtctctataattttattcagatgactgcagaacctggaaaagctgttgctgctattgatgcataacatactgctattggtctttttatataaatatatatatatatatacatatatatatataatttgaatttttggaaactttagctgtgctgtcaactttggaaaaagtatcccggtttactgtgttgagttggcattgtacagaaattaacagccatattggtctagaaacgttaaacttaatttttttccatttgtacaggggtaacgcactgtattaaatatgtaaggtcttatctacatgggtttgattacagaaactaataaagtattctctaaataatga

SEQ ID NO: 630 - protein, 2801 aa, Homo sapiens
MSEKSGQSTKAKDGKKYATLSLFNTYKGKSLETQKTTVAARHGLQSLGKVGISRRMPPPANLPSLKAENKGNDPNVNIVPKDGTGWASKQEQHEEEKTPEVPPAQPKPGVAAPPEVAPAPKSWNKQGGQGDGIQVNSQFQQEFPSLQAAGDQEKKEKETNDDNYGPGPSLRPPNVACWRDGGKAAGSPSSSDQDEKLPGQDESTAGTSEQNDILKVVEKRIACGPPQAKLNGQQAASQYRAMMPPYMFQQYPRMTYPPLHGPMRFPPSLSETNKGLRGRGPPPSWASEPERPSILSASELKELDKFDNLDAEADEGWAGAQMEVDYTEQLNFSDDDEQGSNSPKENNSEDQGSKASENNENKKETDEVSNTKSSSQIPAQPSVAKVPYGKGPSFNQERGTSSHLPPPPKLLAQQHPPPDRQAVPGRPGPFPSKQQVADEDEIWKQRRRQQSEISAAVERARKRREEEERRMEEQRKAACAEKLKRLDEKLGIKQPSPEEIREREREKEREREKELEKEQEQEREKEREKDRERQQEKEKELEKEQEKQREMEKERKQEKEKELERQKEKEKELQKMKEQEKECELEKEREKLEEKIEPREPNLEPMVEKQESENSCNKEEEPVFTRQDSNRSEKEATPVVHETEPESGSQPRPAVLSGYFKQFQKSLPPRFQRQQEQMKQQQWQQQQQQGVLPQTVPSQPSSSTVPPPPHRPLYQPMQPHPQHLASMGFDPRWLMMQSYMDPRMMSGRPAMDIPPIHPGMIPPKPLMRRDQMEGSPNSSESFEHIARSARDHAISLSEPRMLWGSDPYPHAEPQQATTPKATEEPEDVRSEAALDQEQITAAYSVEHNQLEAHPKADFIRESSEAQVQKFLSRSVEDVRPHHTDANNQSACFEAPDQKTLSAPQEERISAVESQPSRKRSVSHGSNHTQKPDEQRSEPSAGIPKVTSRCIDSKEPIERPEEKPKKEGFIRSSEGPKPEKVYKSKSETRWGPRPSSNRREEVNDRPVRRSGPIKKPVLRDMKEEREQRKEKEGEKAEKVTEKVVVKPEKTEKKDLPPPPPPPQPPAPIQPQSVPPPIQPEAEKFPSTETATLAQKPSQDTEKPLEPVSTVQVEPAVKTVNQQTMAAPVVKEEKQPEKVISKDLVIERPRPDSRPAVKKESTLPPRTYWKEARERDWFPDQGYRGRGRGEYYSRGRSYRGSYGGRGRGGRGHTRDYPQYRDNKPRAEHIPSGPLRQREESETRSESSDFEVVPKRRRQRGSETDTDSEIHESASDKDSLSKGKLPKREERPENKKPVKPHSSFKPDNHVRIDNRLLEKPYVRDDDKAKPGFLPKGEPTRRGRGGTFRRGGRDPGGRPSRPSTLRRPAYRDNQWNPRQSEVPKPEDGEPPRRHEQFIPIAADKRPPKFERKFDPARERPRRQRPWPRQDKPPRFRRLREREAASKSNEVVAVPTNGTVNNVAQEPVNTLGDISGNKTPDLSNQNSSDQANEEWETASESSDFNERRERDEKKNADLNAQTVVKVGENVLPPKREIAKRSFSSQRPVDRQNRRGNNGPPKSGRNFSGPRNERRSGPPSKSGKRGPFDDQPAGTTGVDLINGSSAHHQEGVPNGTGQKNSKDCTGKKREDPKPGPKKPKEKVDALSQFDLNNYASVVIIDDHPEVTVIEDPQSNLNDDGFTEVVSKKQQKRLQDEERRKKEEQVIQVWNKKNANEKGRSQTSKLPPRFAKKQATGIQQAQSSASVPPLASAPLPPSTSASVPASTSAPLPATLTPVPASTSAPVPASTLAPVLASTSAPVPDLAPVSASASVSASVPASTSAAAITSSSAPASAPAPTPILASVSTPASVTILASASIPILASASTSAPTPAPAASSPAAPVITAPTIPASAPTASVPLAPASASAPAPAPTPVSAPNPAPPAPAQTQAQTHKPVQNPLQTTSQSSKQPPPSIRLPSAQTPNGTDYVASGKSIQTPQSHGTLTAELWDNKVAPPAVLNDISKKLGPISPPQPPSVSAWNKPLTSFGSAPSSEGAKNGQESGLEIGTDTIQFGAPNGNENEVVPVLSEKSADKIPEPKEQRQKQPRAGPIKAQKLPDLSPVENKEHKPGPIGKERSLKNRKVKDAQQVEPEGQEKPSPATVRSTDPVTTKETKAVSEMSTEIGTMISVSSAEYGTNAKESVTDYTTPSSSLPNTVATNNTKMEDTLVNNVPLPNTLPLPKRETIQQSSSLTSVPPTTFSLTFKMESARKAWENSPNVREKGSPVTSTAPPIATGVSSSASGPSTANYNSFSSASMPQIPVASVTPTASLSGAGTYTTSSLSTKSTTTSDPPNICKVKPQQLQTSSLPSASHFSQLSCMPSLIAQQQQNPQVYVSQSAAAQIPAFYMDTSHLFNTQHARLAPPSLAQQQGFQPGLSQPTSVQQIPIPIYAPLQGQHQAQLSLGAGPAVSQAQELFSSSLQPYRSQPAFMQSSLSQPSVVLSGTAIHNFPTVQHQELAKAQSGLAFQQTSNTQPIPILYEHQLGQASGLGGSQLIDTHLLQARANLTQNKGQVQQPGQTNFYNTAQSPSALQQVTVPLPASQLSLPNFGSTGQPLIALPQTLQPPLQHTTPQAQAQSLSRPAQVSQPFRGLIPAGTQHSMIATTGKMSEMELKAFGSGIDIKPGTPPIAGRSTTPTSSPFRATSTSPNSQSSKMNSIVYQKQFQSAPATVRMTQPFPTQFAPQAKQRAEVLQSTQRFFSEQQQSKQIGGGKAQKVDSDSSKPPETLTDPPGVCQEKVEEKPPPAPSIATKPVRTGPIKPQAIKTEETKS
